United States Patent Application Publication US 2006/0041961 A1 - sequence listing, part 2

SEQ ID NO: 4655 - protein, 171 aa, Spinacia oleracea
MASDSSAQPKSVHEFVVRDARGNDVDLSIYKGKVLLIVNVASQCGLTNSNYTEMTELYEKYRELGLEILAFPCNQFGNQEPGSNEEVLEFACTRFKAEYPIFDKVDVNGSNAAPIYKFLKSSKGGLFGDGLKWNFTKFLVDKDGNVVDRYAPTTSPKSIEKDVKKLLGIQK

SEQ ID NO: 4656 - protein, 467 aa, Pseudomonas aeruginosa PAO1
MTHDTGLRRGLNARHIRFMALGSAIGTGLFYGSASAIQMAGPAVLLAYLVAGAAVYMVMRALGEMAVHEPVSGSFGHYASSYLGPLAGFVTGWTYAFEMIIVCLADVTAFGIYMGFWFPDVPRWIWVLSIVLFIGGLNLCHVKVFGELEFWLSLVKVGAIVAMILAGLGIMFFGFSLGGAATSATGVHNLWQHGGFLPNGWAGLVASLSVVVFAFGGIEIIGITAGEAQDPQRVIPRAINAVPLRILLFYVLTLFVLMAIFPWQQIGSNGSPFVQIFDGLGIESAAAILNVVVITAAISAINSDIFGAGRMLYGMARQGQAPVGFSRVSRHGVPWMTVLLMAVALLLGVALNYLIPQSVFLLIASIATFATVWVWLMILLAQVGMRRRMGPRQVAALKFPVPLWPFAPAAAIVFMLFIFVVLGYFPDTRPALWVGAIWIALLVIAYRRWVRPKGDAAHGVLQAQGGL

SEQ ID NO: 4657 - protein, 338 aa, Glycine max
MAGNPATTSSSALSPEKFNFNFSPDNPSRITLTSDQVNHCTQALNILKEKLHAPNVITQEFAHLQANRITPSEMRRRCTVAYDDVNLRKNRYTDVLPFDKNRVVLKSSTDYRPEAQGYINASLVSTSSAGNVSQFIATQGPLQHTYEDFWEMIIQYHCPAIIMLTRLVDNYKMAKCGDYFQAEDRPREVGNISIIGKWENTTETSLVLRHLEVNHREVEDAPLSVLHIQYPEWPDHGVPKDTFAVREILKRLYHLPPNFGPIVVHCSAGIGRTGTYCTIHNTIQRIVAGDMSAVDIAKTIAMFRSQRIGMVQTQDQYIFCYNAIIDELEDLVSQQQSE

SEQ ID NO: 4658 - protein, 420 aa, Ralstonia metallidurans
MKNAELVRRKDAATPRGVGVMCNFYADRAENSEIWDVEGKRYIDFAAGIAVLNTGHRHPRLVAALQAQLNRFTHTAYQIVPYASYVELAEKINQRAPGRSARKTAFFTTGAEAVENAVKIARAATGRPGVIAFSGGFHGRTMMGMALTGKVAPYKTGFGPFPGEVFHAPYPSALHGVTVEDSRRALEHLFKADIDPRRVAAIIFEPVQGEGGFNVAPPEFVRMLRAVCDEHGILLVADEVQTGFGRTGKLFAMEHYDVAPDLTTMAKSLAGGMPLSAVCGRAEIMDAPAPGGLGGTYAGNPLAVASALAVLDVLESENLIARGAELGERLTARLNSLKPRVPQIAEVRGIGAMVAVEFRRADGSPDAEFTREVQNRALERGLLLLSCGVYGNVIRFLFPLTIQDAVMNEGLDILADVLTR

SEQ ID NO: 4659 - protein, 628 aa, Fusobacterium nucleatum subsp. vincentii ATCC 49256
MPLLGTGIMPLLYSATIVFLEDISSAALIDAMKKYKVTMMIGVPKLWEVMHKKIMDTINSKGITKFIFKLAKIVNSLSFSKLIFKKVSEGFGGHIKFFVSGGSKLNPEITKDFYTLGIKICEGYGMTETSPIISYTPKNDIVFDSAGKVIKDVEVKIADDNEILVKGRNVMKGYYKNPEATAEIIDKDGWLHTGDLGKLVNDYLYITGRKKEMIVLSNGKNINPIEIETKISSMTNLISEMVVTEYNSILTAVIHPDFEKVKEEKIDNIYENLKWEVVDKYNQKAPDYKKILDVKIINEDFPKTKIGKIKRFMIADMLDGKIEKQERKPEPDFEEYNKIKKYLINVKEKDVYFDSHIEIDLGMDSLDMVEFQHFLDLNYGIKEDNLISKYPTLLELANYIKDNKNQEKIGNLDWKEIINKDTNADLPSSSFIAVFFKFLSFVLFKTFFRVKVKGKEKIEKDKPTIFVANHQSFLDGFLFNYSVPLKVMKKTYFLATVIHFKSSIMKFMADSSNVVLVDMNKDIAEVMQILAKLLKENKNIAIYPEGTRTRDGKIDKFKKSFAILAKELNVDVQPYVIDGAYDLFPAGKKLPKPGKITVEFLDKIKVENLTYDEIVDEAYTVIKNKIEA

SEQ ID NO: 4660 - protein, 329 aa, Corynebacterium glutamicum
MKLLVTGGAGYVGSVRAAVLLEHGHDVTIIDNFSTGNREAVPADARLIEGDVNDVVEEVLLEGGFEGVVHFAARSLVGESVEKPNEYWHDNVVTALTLLDAMRAHGVNNLVFSSTAATYGEPDVVPITEDMPTQPTNAYGATKLSIDYAITSYAAAFGLAATSLRYFNVAGAYGNIGENREVETHLIPLVLQVATGHREKIFMFGDDWPTPDGTAVRDYIHILDLAKAHVLALESNEAGKHRIFNLGSGDGYSVKQVVEMCREVTGHPIPAEVAPRRAGDPATLIASSEKAKQELGWTPEHTDLRTIVEDAWAFTSALGDRSHAAKKKA

SEQ ID NO: 4661 - protein, 435 aa, Brassica rapa
MKGVRKTYDNSYTLSFLLVFFVLILFRRAFSVNTLSSTESLTISNNRTLVSPGDVFELGFFRTNSSSPWYLGIWYKKLSERTYVWVANRDNPLSNSIGSLKILGNNLVLLGHSNKSVWSTNVSRGYERSPVVAELLANGNFVMRDSSNNNASQFLWQSSNYPTDTLLPEMKLGYDLKTGLNRFLTSWRSYDDPSSGDFLYKLETRRLPEFYLMQGDVREHRSGPWNGIQFIGIPEDQKSSYMMYNFTENSEEVAYTFLMTNNSFYSRLTINSEGYLERLTWAPSSVVWNVFWSSPIHQCDMYRTCGPYSYCDVNTSPVCNCIQGFRPKNRQQWDLRIPTSGCIRRTRLGCSGDGFTRMKNMKLPETTMAIVDRSIGLKECEKRCLSDCNCTAFANADIRNRGTGCVIWTGELEDIRTYFADGQDLYVRLAAADLV

SEQ ID NO: 4662 - protein, 178 aa, Bacillus subtilis
MIFDFVVIRENSEGEYSEVVGRIHRGDDEIAIQNAVFTRKATERVMRFAFELAKKRRTLVTSATKSNGIYHAMPFWDEVFQQTAADYSGIETSSQHIDALAAFFVTRPETFDVIVASKLFGDILTDISSSLMESIGIAPPDINPSGKYPSMFEPVHGSAPDIAGQALPIRSARFGQRS

SEQ ID NO: 4663 - protein, 315 aa, Hordeum vulgare subsp. spontaneum
MATAGKVIKCKAAVAWEAGKPLSIEEVEVAPPQAMEVGVKILYTALCHTDVYFWEAKGQTPVFPRILGHEAGGIVESVGEGVTELVPGDHVLPVFTGECKDCAHCKSEESNLCDLLRINVDRGVMIGDGQSRFTINGKPIFHFVGTSTFSEYTVIHVGCLAKINPEAPLDKVCVLSCGISTGLGATLNVAKPKKGSTVAIFGLGAVGLAAMEGARMAGASRIIGVDLNPAKYEQAKKFGCTDFVNPKDHTKPVQEVLVEMTNGGVDRAVECTGHIDAMIAAFECVHDGWGVAVLVGVPHKEAVFKTHPMNFLNEK

SEQ ID NO: 4664 - protein, 198 aa, Oryza officinalis
GQTPVFPRIFGHEAGGIVESVGEGVTDLAPGDHVLPVFTGECKECPHCKSAESNMCDLLRINTDRGVMIGDGKSRFSINGKPIYHFVGTSTFSEYTVMHVGCVAKINPAAPLDKVCVLSCGISTGLGATINVAKPPKGSTVAIFGLGAVGLAAAEGARIAGASRIIGIGLNANRFEEARKFGCTEFVNPKDHDKPVQQ

SEQ ID NO: 4665 - protein, 230 aa, Oryza sativa
  unsure (1)..(230): unsure at all Xaa locations
MASQSKKRRIAGGGDGEDRISELPDDLLGHILSFLPNNLAARTAVLSRRWRYIFGYVHTISFEEEVYFQXPRRRRAXAGSSSTGXTPRSSAAAAAPAATXPLRSFHFACDSYHVWDRVIFWIGPICAGGERDRLSTIVDSEPPVFPGRHYELPRSLYSCVALQTLCLSYCDLNLLESIDLSLLKTMRLTGIHGSRSRIQRLISSCPRLADLTLEALRWMMSRSAKAVFLX

SEQ ID NO: 4666 - protein, 164 aa, Glycine max
  unsure (1)..(164): unsure at all Xaa locations
MASADVEYRCFVGGLAWATDDHALEXRAFSQYGEIVETKIINDRETGRSRGFGFVTFXASEQSMKDAIGAMNGQNLXGRNITVNEAQSRGGGGGGGGGGGGYNRGGGGRXYGGRSGGGGGGGGYRSRDGGYGGGYGGGGGGGYGGGRDRGYSRGGDGGDGGWRN

SEQ ID NO: 4667 - protein, 271 aa, Zea mays
MGIVEEAHNLRVVGKGKRGVIVLAHGFGTDQSVWKHLVPHLVADYRVVLFDTMGAGPTNPDYFDFSRYATLEGYALDLLAILQELGVQSCIYVGHSVSAIIGALASISRPDLFTKLVLLSASPRYLNDVDYYGGFEQDELDELFEAMQSNYKAWCLGFAPLCVGGDMESVAVQEFSRTLFNIRPDIALNVAQTIFQSDVRSLLPHVSVPCHIVQSTKDLAVPVVVSEYLHRHLGGDSIVEVMPSEGHLPQLSSPDIVTPVLLRHIQHDIAV

SEQ ID NO: 4668 - protein, 335 aa, Oryza sativa
REKKALQQGCGDHFAVDDLLVLPYGEEDETTREAADSSTITALDSCSNSFGLADGDFPGELCEPVNSLATFCLVNYDQLAELEWLSNYIDDAFATEDLQKLQLISGIPSGGFSTASVPSAQAQAASAAASMAVQPGGFLPEAPVPAKARSKRSRAAPGNWSSRLLVLPPPPASPPSPASMAISPAESGPSKPAKKKDAPAPPAQAQLSSVPVHSGGSAPAAAAGEGRRCLHCETDKTPQWRTGPMGPKTLCNACGVRYKSGRLVPEYRPAASPTFMVSKHSNSHRKVLELRRQKEMHQQTPHHHQPQVAAAGGVGSLGDDFLIHHHLRTDFRPPI

SEQ ID NO: 4669 - protein, 251 aa, Zea mays
MAAKCYPTVSDEYLAAVAKAKRKLRGFIAEKNCAPLMLRLAWHSAGTFDVATKTGGPFGTMKCPAELAHGANAGLDIAVRLLEPIKEQFPILSYADFYQLAGVVAVEVTGGPEVPFHPGRQDKPEPPPEGRLPDATQGSDHLRQVFSTQMGLSDQDIVALSGGHTLGRCHKERSGFEGAWTANPLIFDNSYFTELLSGEKEGLLQLPTDKALLTDPSFRPLVDKYAADEDAFFADYAEAHLKLSELGFAEA

SEQ ID NO: 4670 - protein, 813 aa, Neurospora crassa
MKLTTHPLLPLLASVLTANAFQFPDCVNGPLAKSKACDVTGTAPERAASLVDQLTIDEKLVNLVDQALGASRLGLPKYAWWSEGLHGVAGSPGVKFNTTGYPFSYATSFANAINLGASFDDDLVYEVGTAISTEARAFANFGFGGLDYWTPNVNPYKDPRWGRGAETPGEDPLHIKGWHGLTRYEFEAIVTLQDLSEYYLPPFQQCARDSKVGSIMCSYNALTIRDMASGKPDEEINLTTAQPACAKPYLMTILRDHWNWTEHNNYITSDCNAILDFLPDNHNFSQTPAEAAAAAYKAGTDTVCEVSGSPLTDVVGAYNQSLLPEAVIDTALRRLYEGLIRAGYLDHGRSSAVAGGDGGSFSSPAYDALNWEDVNTPSTQELALRSATEGIVLLKNAGSLLPLDFSGKKVALIGHWANATGTMRGPYSGIPPFYHNPLYAAQQLNLSFSYANGPVVNASDPDTWTAPALAAAEGADVVLYFGGTDTTVASEDLDRESIAWPETQMQLLSELAGLGKPLVVIQLGDQVDDSSLLNNGNVSSILWVGYPGQSGGTAVFDVLTGKKAPAGRLPVTQYPEGYVDEVPLTEMALRPFNYSSSSNLEQEVSVQGRGSLTIQPRSTPGNKTLSSPGRTYKWYSSPVLPFGYGLHYTTFNVSLSLSSSNASSSSSSPSFSIPSLLTPCTATHLDLCPFSPSANSALSVSITNTGTHTSDYVVLLFLSGEFGPKPYPLKTLVSYKRVKDIKPGETVTVKDVPVSLGAISRVDGDGNTVLYPGTYRFVVDVDGSQGVERGEEVVVELVGDEAVLDEFPQPPKE

SEQ ID NO: 4671 - protein, 390 aa, Phlebia radiata
MAFNFAAILAFVSLAAVTSAAPSKTTCSNGVVVPDAVCCDFVPLASALQSEVLMGDCGEDAHELVRLIFHDAIAISQSMGPSAGGGADGSMLIFPTVEPAFFPNLGIADSVNNLIPFLSQFPTISAGDLVHFAGAVAISNCPGAPQLEFLAGRPNATAPAIDGLIPEPQDDVTKILARFKDAGNFSPAEVVALLASHSIARADHVDPTLDAAPFDSTPFDFDTQVFLEVLLKGVGFPGLANNTGEVSSPLPVTDGTDVGELRLQSDFALARDERTACAWQSFVNEQEAMATAFKNAVKKLAVLGHNRNDLVDCSAVVPVPKPATGTPATFPASTGPQDLELTCTTEPFPTLSTAPGAQQTLIPHCSDGTMTCNSVQFDGPATNFGGADDS

SEQ ID NO: 4672 - protein, 436 aa, Mycobacterium tuberculosis CDC1551
MRTYRTVRYPLGEALLALYRWRGPLINAGVGGHGYTYLLGAEANRFVFANADAFSWSQTFESLVPVDGPTALIVSDGADHRRRRSVVAPGLRHHHVQRYVATMVSNIDTVIDGWQPGQRLDIYQELRSAVRRSTAESLFGQRLAVHSDFLGEQLQPLLDLTRRPPQVMRLQQRVNSPGWRRAMAARKRIDDLIDAQIADARTAPRPDDHMLTTLISGCSEEGTTLSDNEIRDSIVSLITAGYETTSGALAWAIYALLTVPGTWESAASEVARVLGGRVPAADDLSALTYLNGVVHETLRLYSPGVISARRVLRDLWFDGHRIRAGRLLIFSAYVTHRLPEIWPEPTEFRPLRWDPNAADYRKPAPHEFIPFSGGLHRCIGAVMATTEMTVILARLVARAMLQLPAQRTHRIRAANFAALRPWPGLTVEIRKSAPAQ

SEQ ID NO: 4673 - protein, 166 aa, Tripsacum dactyloides
RKIPVLLLPDGRAICESAVIVQYVEDVARESGDAEAGSLLLPDDPYERAMHRFWTAFIDDKFWPALDAVSLAPTPDARAQAVEDARAALSLLEEALKDRSNGGAFFSGGDAAPGLLDLALGCFLPALRACERLHGLSLIDASATPLLDGWSQRFAAHPAAKRVCRT

SEQ ID NO: 4674 - protein, 374 aa, Oryza sativa
MDAAAATAVNGVLEVEERKAQKSYWEEHSKDLTVEAMMLDSRAADLDKEEMDRPEYKASGILRYERIFGEGFVSTGGIETTKEFVDRLDLKPGQNVLDVGCGIGGGDFYMADKYDVHVVGIDLSINMVSFALERAIGRKCSVEFEVADCTKKTYPDNTFDVIYSRDTILHIQDKPSLFKSFFKWLKPGGKVLISDYCKCPGKPSEEFAAYIKQRGYDLHDVRAYGQMLENAGFHDVIAEDRTDQFLDVLERELAKVEKNKNEFVSDFSQEDYDAIVNGWKAKLQRSSAGEQRWGLFIATKAGKFSSLKQKRYPWAIAEQQAGITSGVKSSHFMHLPSQARSFPLNQERVQIPHAQCAKGVDVAERDERQVAERK

SEQ ID NO: 4675 - protein, 312 aa, Mesorhizobium loti
MRPLAVIGNVNVDLIVGPVAPWPKAGTETVVDHDELRVGGQAGNTGLAWQALGIDFEIAANVGDDQFGHWLREAFGSRADKWPVRPESTTLSVGMTHPDGERTFFTTRGHLPRFSLADVFSVLDGTHLTGGYALLCGSFLTDDLTRDYEAFFDWADRHDIAVALDTGWPIEGWTTANCKAARTWLARCDLALFNEVETVTLAGLPDPVEAARQIQSSMKKGATAVVKRGPEGAIAIGPGGALVTATAPDVKVVDTIGAGDVFNAAFLAALAQDQTLTASLAAATQVASRAISTLPRNYGEPMHPREATHERA

SEQ ID NO: 4676 - protein, 203 aa, Escherichia coli CFT073
MERTLTTVSYYAFEGLIPVVHPTAFVHPSAVLIGDVIVGAGVYIGPLASLRGDYGRLIVQAGANIQDGCIMHGYCDTDTIVGENGHIGHGAILHGCVIGRDALVGMNSVIMDGAVIGEESIVAAMSFVKAGFRGEKRQLLMGTPARAVRSVSDDELHWKRLNTKEYQDLVGRCHAALHETQPLRQMEENRPRLQGTTDVTPKR

SEQ ID NO: 4677 - protein, 394 aa, Zea mays subsp. mays
LGAERRARLPPGEMWWPLVGGMWAFLRAFKSGKPDAFIASFVRRFGRTGVYRSFMFSSPTVLVTTAEGCKQVLMDDDAFVTGWPKATVALVGPRSFVAMPHDEHRRIRKLTAAPINGFDALTGYLPFIDSTVTSSLRAWADHGGSVEFLTELRRMTFKIIVQIFLGGADQATTRALERSYTELNYGMRAMAINLPGFAYRGALRARRRLVAVLQGVLDERRAARAKGISGGGVDMMDRLIEAQDERGRRLDDDEIIDVLVMYLNAGHESSGHITMWATVFLQENPDMFARAKAEQEAIMRSIPSSQRGLTLRDFRKMEYLSQVIDETLRLVNISFVSFRQATRDVFVNGYLIPKGWKVQLWYRSVHMDPQVYPDPTKFDPSRWEGHSPRAGTFL

SEQ ID NO: 4678 - protein, 437 aa, Petunia x hybrida
MNTNRAVLVPHRGEVGGKQKNGQADGRNNRRVLGDIGNLVTGAPVIEGKPKAQISRPATRSFCAQLLANAQAEKNKVKPLAEVVNKVPAKKKASDKPAVQEAVIVISPDEEVKKKTIEKSPLSKRKAKKTGKTLTSTLTARSKAACGLSNRPKNEIDDIDAADAANHLAVVEYVEDIYNFYKLTEDESRVNNYMEFQPELNHKMRAILVDWLIEVHRKFELMPESLYLTINILDRFLSMKTVPRKELQLVGISAMLIACKYEEIWAPEVNDFMHISDNVYTRDHILQMEKAILGKLEWYLTVPTPYVFLVRYIKAAMPSDDQEIQNMAFFFAELGLMNYTTTISYCPSMLAASAVYAARGTLNKGPLWTPTLQHHTGYSEEQLMECTKQLVSYHKGAAESKLKAIYRKFSSPDRGAVALFPPARNLLPTTTTTTTSS

SEQ ID NO: 4679 - protein, 228 aa, Gossypium cunninghamii
FTSLCHTDVYFWEAKGQTPLFPRIFGHEAGGIVESVGEGVTHLKPGDHALPVFTGECGNCRHCKSKESNMCGLLRINTDRGVMLSDGKTRFSINGKPIYHFVGTSTFSEYTVAHVGSVAKINPAAPLDKVCILSCGISTGLGATLNVAKPAKGSTVAIFGLGAVGLAAAEGARIAGASRIIGVDLNPNRFEEAKKFGCTEFVNPKDHNKPVQEVLAEMTNGGVDRSVE

SEQ ID NO: 4680 - protein, 579 aa, Saccharomyces servazzii
MFSRTDKNVDTLAGDISQLSFDSPSSKLAYNANNNMTPLRQRDNNRFGVGAGMNMGTPTPSPTKSTVYDQENDSSAMMVDDEDNDDITNSPKKLPMDFYKKSSSNKTQRLVSVCKMYFLDYYCDMFDYVISRRQRTKKVMEYIEQQKVLNNVPVERLNTEWFGYLQQEHDVLRKRRLKPKHKDFEMITQVGQGGYGQVYLARKKDTKEVCALKILNKKLLFKLNETNHVLTERDILTTTRSEWLVKLLYAFQDPESLFLAMEFVPGGDFRTLLINTKYLKSAHARFYISEMFCAVNALHELGYTHRDLKPENFLIDAKGHIKLTDFGLAAGTVSNERIESMKIRLEEVKNLEFPGFKEKSIEDRRKIYHHMRETDVNYANSMVGSPDYMALEVLEGKKYDFTVDYWSLGCMLFESLVSYTPFSGSSSNETYENLRHWKQTLRRPRLDNGRPAFSDRTWDLITRLIADPISRLRSFEHVKRMPYFSDIDFDNLRNMSPPFIPQLDSETDAGYFDDFTNEADMAKYADVFKRQNKLSAMVDNSAVSSKLVGFTFRHRSGKQGSSGILYNGSEHSDPFATFY

SEQ ID NO: 4681 - protein, 330 aa, Glycine max
QFESDVFLICSNAMQYNAPETIYHKQARSIQELGRKKFEKLRIGFEHSQIELKSEQKAGSNYLVKKQPKKPLARASQEPVGSDFSSGATLATIADVQPTSHLMQGGRCERSGNLDGILEANAFWIDANQEKAEDVLLGKGLLSKWGRKSFALDESRRASYNMSNQPIVKPDSIFMTFERGMKHLVTVGLHAEYSYARSLARFSASLGPIAWKIASHRIQHALPAGCKFGRGWVGEYEPLSTPILMVNNRVQKENSLVMKLHSTTELPKGNQNCKNVESSIMHPVNGQMLEGKRPSMPDFKGKPLFGSAGVRLSALVNILNQEQNAQSRKL

SEQ ID NO: 4682 - protein, 358 aa, Agrobacterium vitis
MREYKIAAIPADGIGPEVIAAGLQVLEALEQRSGDFKIHTETFDWGSDYYKKHGVMMPADGLDKLKKFDAIFFGAVGAPDVPDHITLWGLRLPICQGFDQYANVRPTKILPGITPPLRNCGPGDLDWVIVRENSEGEYSGHGGRAHRGLPEEVGTEVAIFTRVGVTRIMRYAFKLAQARPRKLLTVVTKSNAQRHGMVMWDEIAAEVATEFPDVTWDKMLVDAMTVRMTLKPETLDTIVATNLHADILSDLAGALAGSLGVAPTANIDPERRFPSMFEPIHGSAFDITGKGIANPIATFWTAAQMLEHLGERDAAARLMGAVERVTEAGILTPDVGGTANTSQVTEAVCNAIAGSNII

SEQ ID NO: 4683 - protein, 371 aa, Oryza sativa (japonica cultivar-group)
MGCFSCCGADDVGKKKKRDDPYVPIPDPGGNYGRSKPGPPAPSRSPPTSRNLPIAVPAIPLDEIKGITKNFSSDALIGEGSYARVFFGVLRDGRRSAVKKLDSSKQPDQEFLVQVSAVSRLKHENIIQLIGYCAGGSIRVLAYEYAPRGSLHDILHGKKGVKGAQPGPALSWMQRVKIALSAAKGLEFLHEKAEPRVVHRDIKSSNIMLFDNDVAKVGDFDVSNQSPDMAARLHSTRVLGTFGYHAPEYAMTGQLSTKSDVYSFGVVLLELLTGRKPVDHTLPRGQQSLVTWATPRLSEDKVKQCVDPRLEGDYPPKAVAKMAAVAALCVQYEADFRPNMSIVVKALNPLLNSRPNNRPASFTDAGERSGL

SEQ ID NO: 4684 - protein, 338 aa, Neisseria gonorrhoeae
MTVLITGGTGFIGSHTAVSLVQSGYDAVILDNLCNSSAAVLPRLRQITGRNIPFYQGDIRDCQILRQIFSEHEIESVIHFAGLKAVGESVAEPTKYYGNNVYGSLVLAEEMARAGVLKIVFSSSATVYGDAEKVPYTEDMRPGDTANPYGASKAMVERMLTDIQKADPRWSVILLRYFNPIGAHESGLIGEQPNGVPNNLLPYICQVASGRLPQLSVFGGDYPTPDGTGMRDYIHVMDLAEGHIAAMKAKGGVAGVHLFNLGSGRAYSVLEIIRAFEAASGLHIPYRIQPRRAGDLACSYADPSHTKQQTGWETKRGLQQMMEDSWRWVSRNPGRYGD

SEQ ID NO: 4685 - protein, 512 aa, Streptomyces collinus
MENPDFARSRDTGVSTGPDETNPTTEDHPSWNPDLSRHPAEAAGGSSKHHSPPFSVIARPIFHRRLDVGKAVTEMRKPALQQPEWDDPSQVRRIREVLAARPPLVKAEEVHALRTLLAQVADGSALVVQAGDCAEHPGECDAAHVSRKSALLDMLAATLKTATHKPVVRVGRIAGQFAKPRSSPSERIGDLQLPVYRGHMVNGPEPTPEDRRHDPLRLLTFVTMTAGDVMEQLGWRAPAPFGHQPPAEPRMWTSHEALVLEYELPMIRELGDGRRWFGSTHWPWIGERTRQLDGAHLHFAAGIVNPVAVKVGPTTTAEEITLLCALLDPLREPGRLTLIARMGADAVSERLPAFVEAVRLAGHPVIWFRDPMHGNTVTGPDGYKTRLMETMAREIRGFLRAVTGAGGTAGGLHLETTPDDVLECATDVSVLERETVRRTSLCDPRLNQEQAVSVVSVWADADIGPTATGDGSRVAQGTQGSPRAPGDREVMSVPEYREFRTRSRAEVWLNQA

SEQ ID NO: 4686 - protein, 174 aa, Helianthus annuus
GFQVGPSVGIEAGDHIWCARYLLERITEQAGVVLTLDPKPIEGDWNGAGCHTNYSTKAMREDGGFEVIKKAILNLSLRHTEHISAYGEGNERRLTGKHETASINQFSWGVANRGCSIRVGRDTEKAGKGYLEDRRPASNMDPYTVTGLLAETTILWEPTLEAEALAAQKLALNV

SEQ ID NO: 4687 - protein, 194 aa, Oryza sativa
  unsure (1)..(194): unsure at all Xaa locations
MSTLXXTRXAXLGLVVLYLXNKAEXARDKICXGIQYXXKFINYRXPGXAQDVXXSXXLAPKIFPLLQLVNDLHGLIXPXCXGDPLTLVLLGKSKNXLLXXFLFLNNXFWLGKTGISXNKEXXQTXIXWKIPXXXXXGPSXXXXXGLLTXXNXLKXLPSXKKNGXKNLRGXXTFINXPFXNNKXKSGXKGAXPVX

SEQ ID NO: 4688 - protein, 100 aa, Zea mays
YPVRSIPRSGPPRPAGLCHTTERLSNWESTGIKIIPVLSQPDDSWKGERGYVQDAFFRNKNIVNPSSTGAILCGPNEMQEELTLSLVADGVSRDKILTNY

SEQ ID NO: 4689 - protein, 254 aa, Zea mays
RGRPGKCFKAIEKNGGCNLVRCKCGQCMCWLCGGGTGQDHTWNSITGHSCNRYEEEICVETVHTGRQQMQRYKHYHDRFKIHGDSSYGVEKQKLGAAIEERVRLLESDRERPLAIRDGDWLTRAHRRLLVSRQVLSRSYVFAYYMFGGHELRTRPAERANLGVARNLFEHQQEQLERHVEHLSRSLAESADLAGAPDAEIVKQKQTAITLTKTVERLCGEMYKCIQDELLTLLVEPMSIAAYRPDGPDRAKPAI

SEQ ID NO: 4690 - protein, 188 aa, Pennisetum ciliare
MESAAPPAAAKPSLSKKPSPSFRLRNGSLNALRLRRVFDLFDRNGDGEITLDEMASALDTLGLGADRSGLEAAVGSYIPAGAAGLRFEDFESLHRALGDALFGPIPEEVPEEDDEGDMKEAFRVFDEDGDGYISAAELQAVLKKLGLPEARNLATVQEMICNVDADRDGRVDFGEFKNMMQGITVWGA

SEQ ID NO: 4691 - protein, 96 aa, Rhizobium leguminosarum bv. trifolii
MTKVRALVLERQHELALREIDLPLETGPGQVKIRIHTVGVCGSDVHYYTHGKIGPFVVNAPMVLGHEAAGTVVEVGAGVTHLKVGDRVCMEPGIPD

SEQ ID NO: 4692 - protein, 179 aa, Oryza sativa
  unsure (1)..(179): unsure at all Xaa locations
MNRKPGDWDCRACQHLNFSRRDLCQRCGEPRGAADRGSGGGGDYANFGGRGGSSFGGGFGPGSGVRPGDWYCNCGAHNFASRSSCFKCAAFKDDAAAVGGAGALXRWGHVALAGLRLXKAAPSAPXALSWKSGXDWICTRSGCNEHNFASRMECFRCNAPXDSGTGVXFAVRVRSIWIR

SEQ ID NO: 4693 - protein, 183 aa, Zea mays
MNRKPGDWDCRACQHLNFSRRDICQRCSEPRGVADRGGGGGGGGDYASFGGRGGSSFGGGFGAAGSDVRPGDWYCSCGAHNFASRSSCFKCSAYKEEAAVNSGAGGFDSDMSRSRGYGFGSGAAGAGAGAARTTNRPGWKSGDWICTRSGCNEHNFASRMECFRCNAPRDSGSAAMTYENYLH

SEQ ID NO: 4694 - protein, 401 aa, Triticum aestivum
  unsure (1)..(401): unsure at all Xaa locations
PRNLGSIRHSCGAALSARLPGSGRRSSAAAMAAIFSASGHRLLSTAAAAAEFPVPMARIRNLARAGHLXDIDAAVAPLVPTNPKAVISALSVVGLSDRAXSAILSTIXRPPTAEHLNALLAPLLRRRXRSPERVPALLDAHPSAPRDAFTWSILAKSLCINKGADHAVYLLHGEEPPSLHLYTAIIDSYYKQKKPHSAEELWREMVEERGIAPDAAAYNVRITYKSATGTVEEVQELIRAMGEDSGLRPDVISYNGLIRVLGRHKRVDEALEVYRSLQEKGAEGNTEAKSAPECATYACMVGALCSEGRLSEAEDVFYEGVKRKKVADLGTVRKLVVALKEAGKGRAARRVVVGLRKKFPDQFDGPWKELEKDAGLTPGASNEEEEVEEDEQQPEKTAAAA

SEQ ID NO: 4695 - protein, 537 aa, Gossypium hirsutum
MKRDHQEISGSGSNPAESSSIKGKLWEEDPDAGGMDDELLAVLGYKVRSSDMADVAQKLEMLEKVMGTAQEDGISQLGDTVHFNPSDLSGWVQNLLIEFNGSTTTPDPNFNDDSEYDLRAIPGVAAYPPVKSDPGLEITRKRAKTESSSSSSSTTTRPVVLIDSQEAGVRLVHTLMACAEAVQQDNLKLADALVKHIGLLASSQTGAMRKVATYFAEALARRIYRIFPPDSLDPSYNDKLQIPFYETCPYLKFAHFTANQAILEAFSMASRVHVIDFGLKQGMQWPALMQALALRPGGPPAFRLTGIGPPQPDNTDALQQVGWKLAQLAERIGIEFEFRGFVANSLADLEPEMLDIRPPEIEVVAVNAVFELHPLLARPGGIEKVVSSIKAMKPKIVTVVEQEANHNGPVFLDRFTEALHYYSTLFDSLEGSGVAPASQDLAMSELYLGRQICNVVACEGMDRVERHEPLTQWRTRMETAGVSPVHLGSNAYKQASMLLALFASGDGYRVEENNGCLMLGWHTRPLIAHLGLATRWY

SEQ ID NO: 4696 - protein, 230 aa, Pyrococcus furiosus DSM 3638
MWAYLAILAMAYVTYKTKALDIKGIIAALLLGVIIVTLGGIIPFIALLAFLVMGTLATKFRYREKRKMGLIDESIRSVGNVLGNGLAPLLFVIVEFIIKQDFGWAGVLSSIAVANADTLASEIGKVFGKNPRIITNLKPAKPGEEGAVSFAGEFAALLGAFVISLFGLSLTEYGIQMIVSVTLAGLIGANIDSLIGATFEKNGYFGNNMTNFIATLLGGLLGMALFLLLV

SEQ ID NO: 4697 - protein, 368 aa, Tropheryma whipplei TW08/27
MQRVIIVGSTGSIGTQAIDFILKNRDSFLVVGLAASTQTSLLREQAQVFGTKNTAQGASEAAELIEATEADVVLNAITGAAGLLSTYATLKTGKRLALANKESLIMGGKYFLDMTSFKGQITPVDSEHSAIAQAMKSGKFSEVNKLILTASGGPFYDRESLEGITLKDALDHPTWNMGPMISINSATMFNKGLEIIEAHLLFGIPYSQIDVVIHPQSIVHSMVEYKDGSVIAQASVADMTLPIGYALSWPNRALNAVRPLEWGARQRWDFLPPTENSMRSINLARRAGEAGGVYPAVLNASNECAVEAFMAGKISFARIIHVTETVFNLYTKQHTNRESAKNPIEVILEEDARTRELAKTVIENMSAD

SEQ ID NO: 4698 - protein, 97 aa, Triticum aestivum
SLKGDPSEEFSFSSFFPAILRPVLDPIATIFHRLLCGRSDRADRGQTLETSSLPGSDSTEANRRRERGQRALEQRLAEKLAAVKSTESTSLDASDKV

SEQ ID NO: 4699 - protein, 249 aa, Oryza sativa
  unsure (1)..(249): unsure at all Xaa locations
MGRGKIEIKRIENTTNRQVTFCKRRNGLLKKAYELSVLCDAEVALIVFSSRGRLYEYANNSVKSTVERYKKANSDTSNSGTVAEVNAQHYQQESSKLRQQISSLQNANSRTIVGDSINTMSLRDLKQVENRLEKGIAKIRARKNELLYAEVEYMQKREVELQNDNMYLRSKVVENERGQQPLNMMGAASTSEYDHMVNNPYDSRNFLQVNIMQQPQHYAHQLQPTTLQLGQXSRPSISFGVDTVRTHVR

SEQ ID NO: 4700 - protein, 276 aa, Auxenochlorella protothecoides
CFAYSFSSILVEIQDTLRQPPKAAKTMSKATNVSVTASFAFYFVVAIGGYASLGNDVPSYILGGLQGPEWVIFVANLCVLLHMWSAYQIYAHPMFDTLESHVKAFKLRQAKAKGDAELPAKVEELKRMSLAARQGSAAGTKTMDDTAPAAPPAANPLCRLSRVSAMAGEKLQRLSQNAAMYRVSTGFADTSVPSNDDHFVLPWWQRLITRRMYVVRTTLIAAIMPFFGAMAGLVGALAFFPLTSSSPSAAGAPCTSPLGGSITCCTSSSSAWRWCA

SEQ ID NO: 4701 - protein, 414 aa, Zea mays
MWESPRQTQAHTPFPSWIPYAGTFAAGVGMVAAADSSLPSERGPGPDCAWNQSAPSVGARDGGSGYRGNYFLSLLDSKNVTPEMFEDDVVVLPAASPSRDYLGVGGGAGAAASNMAGPAAAYGLLDPYYSPVVASRAPPVDHETASSPLVYSGDGVVRGTSMPCYDDHEEKRPTGGRQPQGFGAPAAAFLQEMMIPSRVETKLHSGLGYLGMVSQRLETSFGVVGSLPDAAGSFSDEYNSNRSSADFMSSNSNRSLEKRVGGSSSGRGAATRRKSDGGLGGNTKKSKQEASPKASSAPKQPQVPRVKIGEKITALQQIVSPFGKTDTSSVLFETIEYIKFLHEQIRMFSEPYMTKSSYKGHIGLRGEEEESGTGHDLRGRGLCLVPVSLTSQAYQEDDTLPDCWAPAYRGCLYR

SEQ ID NO: 4702 - protein, 635 aa, Zea mays
MALEAGSSGGGGRGWGGGFRSLMRRKQVDSDRVRAEGQPQLAKELNVPELVAIGVGSTVGPGVYVLVGTVAREHAGPALTISFLIAGIAAALSAFCYAELASRCPSAGSAYHYSYICVGEGVAWLIGWALVLEYTIGGSAVARGISPNLALFFGGQDSVPWILARHQLPWFDIIVDPCAAALVFVVTVLLCVGIKESSFAQGVVTVLNACVMIFVIVAGSYIGFQIGWVGYKVSDGYFPHGVNGMLAGSATVFFAYIGFDTVASTAEEVKNPQRDLPLGIGVALAICCALYMAVSVVIVGLVPYFAMDPDTPISSAFARHGMQWAMYVVTSGAVLALCSTLMGSLLPQPRILMAMARDGLLPSFFSDVNKQTQVPVKSTIVTGICAAALAFAMDVSQLAGMVSVGTLLAFTVVAVSILILRYVPPYEVPLPPSMQESFRLNQECDEERDRGLLGVGNCNLSQTKDVIVVVESVKDPLIDKRLHKGKMDETKRRKIASLSIGSVCVGVLILASSASATWLPFLPICIGCTIGVVLLLAGLSLLSWIDQDAGRHSFGHSGGFTCPFVPVLPVLCILINTYLLINLSGDTWMRVGIWLLLGVLVYAFYGRTHSSLIDVVYVPAAQADEIYRSSSGYVS

SEQ ID NO: 4703 - protein, 357 aa, Bradyrhizobium japonicum USDA 110
MFPRCFVIGFWRANVCRNASTGNAGWNDTARAREACVTSDRLQRFRDRLALPLIAAPMFLVSGVELMVAACQSGVIGSFPSANCRSAEQLDEWLREIEARLRRHEDQARRKAAPLCPNLIVHRSNARLEQDLAVLLRHRPEIVITSVGSPAPVLKPLHDAGALVLADVASIRHAERAAEAGADGLVLLTAGAGGQTGWLNPFAFVRAVRAFYDGIIVLAGGISDGRALHAAEVLGCDLGYMGTKFIATRESMADDRYKRMLVESSADDILLTTAFTGLQTSMLKPSIVAAGLDPDDLPARGAIDIAKDIDVNARENRPKRWRDIWSGGHSTSGVTDVLAVDDLVASTLAEYRAAGGR

SEQ ID NO: 4704 - protein, 764 aa, Pseudomonas syringae pv. syringae B728a
  unsure (1)..(764): unsure at all Xaa locations
MNKRKMMGAHSALALLALAVSQVHAADPTVQQGREDRAEKAAQKTLAKMTMEEKLAYIGGTGGWDVKPLTNYGVPQIHGADGGVGVRYTSEGNDQGVVYPSGPNLAATFNPRRAIDLGRALGYDTAVGGYQFITGPGVNLYRMPYGGRAFEYLSGEDPFLGASLAPGVINGIQSRGVWANAKHYAANDQESNRFNLNQTMPERVLREMSLPAFESSSKNGNVAMMMCAFQKVNGDFACESDHLIAQILKKEWGFKGFVQSDYNAVVHGFNAARAGTDLDMMGYQMNSSVLKPHLDAGDLSAATIDDKVRRILKQIYLYKFDSKTPLXXXXXXXXXXXXXXXXXXXXXXXXXXXXXXXXXXXXXXXXXXXXXXXXXXXXXXXXXXXXXXXXXXXXXXXXXXXXXXXXXXXXXXXXXXXXXXXXXXXXXXXXXXXXXXXXXXXXXXXXXXXXXXXXXXXXXXXXXXXXXXXXXXXXXXXXXXXXXXXXXXXXXXXXXXXXXXXXXXXXXXXXXXPWEGDDHIAASNSRGWDTIAPSAIAFGANLPKVPRAMTLDDIARVRQNFVDAARRARDAGFEWIELHFAHGYLGQSFFSEHSNQRTDEYGGSFDNRSRFLLETLAAVREVWPENLPLTARFGVIEYDGRDEQTLAESIELARRFKAGGLDLLSVSVGFSTPDANIPWGPAFMGPIAERVRREADIPVTSAWGFGEPKLAEEAVKSGQLDLVSIGRAHLADPHWAYFAAKELGVEKSAWTLPAPYAHWLERYR

SEQ ID NO: 4705 - protein, 366 aa, Desulfovibrio desulfuricans G20
MALSIGIVGLPNVGKSTLFNALTKAQNAESANYPFCTIEPNKATVPVPDARIDKLTAMARPQKTINATVDFIDIAGLVRGASKGEGLGNQFLANIRESAAILQVVRCFDDENITHVDGTVDPLRDIETIETELLLADVQSAERKLDRTRRQSKGDKSMTATVSAMERLVDHLNAGNPASTFAEKDSDAISALYKELGLLTAKKIIYCANVDEEGLAEDNRHVVTVREFAASRSCDVVKICAKVEEELQGLDEAEQLDFLASFGIPESGLTKVIHTGYHTLGLISYFTVGEKEVRAWTIKEGWKAPAAAGVIHSDFERGFIRAEVIGYDDYVKHGSEAACRTAGVLRVEGKEYVVSDGDIIHFLFNV

SEQ ID NO: 4706 - protein, 160 aa, Azotobacter vinelandii
MSAFHDLTLRGLDGQDLPLAQFRDKVVLVVNVASKCGLTPQYAGLEKLHLQYRERGFSVLGLPCNQFAGQEPDNEAQIREFCSLNYGVTFPLAAKLEVNGSGRHSLYRLLAGEGAEFPGDITWNFEKFLVGRDGRVLARFSPRTAPDDPALLQAIEKALG

SEQ ID NO: 4707 - protein, 250 aa, Glycine max
MTKNYPTVSADYQKAVEKAKKKLRGFIAEKRCAPLMLRLAWHSAGTYDVSSKTGGPFGTIKHPSELAHGANNILDIAVRLLEPLKAEFPILSYADFYQLAGVVAVEVTGGPEVPFHPGREDKPEPPPEGRLPDATKGSDHLRDVFGKAMGLSDRDIVALSGGHTIGAAHKERSGFEGPWTSNPLIFDNSYFKELLSGEKEGLLQLPSDKALLSDPVFRPLVEKYASDEDAFFADYAEAHQKLSELGFADA

SEQ ID NO: 4708 - protein, 203 aa, Escherichia coli
MERTLTTVSYYAFEGLIPVVHPTAFVHPSAVLIGDVIVGAGVYIGPLASLRGDYGRLIVQTGANIQDGCIMHGYCDTDTIVGENGHIGHGAILHGCVIGRDALVGMNSVIMDGAVIGEESIVAAMSFVKAGFHGEKRQLLMGTPARAVRSVSDDELHWKQLNTKEYQDLVGRCHASLHETQPLRQMEENRPRLQGTTDVTPKR

SEQ ID NO: 4709 - protein, 219 aa, Gossypium aridum
DIYYWECKGYTPLFPRILGHEASGIVESVGEGVNDLKPGDHVLPIFTGECKECRHCLSEESNNMCELLRINCDRGVMLADGKTRFSINGKPIYHFVGTSTFSQYTVVHVGQVAKISPTAPLDKVCPISCGICTGFGATVNVAKPKKGQTVAVFGLGAVGLAAAEGARVCGASRIIAVDVNPRRFEEAKRFGITEFVNPKDYDKPVQEVIVEMTGGGVDR

SEQ ID NO: 4710 - protein, 345 aa, Arabidopsis thaliana
MTATNKQVILKDYVSGFPTESDFDFTTTTVELRVPEGTNSVLVKNLYLSCDPYMRIRMGKPDPSTAALAQAYTPGQPIQGYGVSRIIESGHPDYKKGDLLWGIVAWEEYSVITPMTHAHFKIQHTDVPLSYYTGLLGMPGMTAYAGFYEVCSPKEGETVYVSAASGAVGQLVGQLAKMMGCYVVGSAGSKEKVDLLKTKFGFDDAFNYKEESDLTAALKRCFTNGIDIYFENVGGKMLDAVLVNMNMHGRIAVCGMISQYNLENQEGVHNLSNIIYKRIRIQGFVVSDFYDKYSKFLEFVLPHIREGKITYVEDVADGLEKAPEALVGLFHGKNVGKQVVVVARE

SEQ ID NO: 4711 - protein, 98 aa, Securigera parviflora
MSLLSDLINLNLSETTDKIIAEYIWIGGSGLDLRSKARTLPGPVSDPSELPKWNYDGSSTGRAPGEDSEVILYPQAIFKDPFRRGSNILVICDAYTPA

SEQ ID NO: 4712 - protein, 361 aa, Arabis stelleri
CKAAVAWEAGKPLVMEEVEVAPPQKHEVRIKILFTSLCHTDVYFWEAKGQTPLFPRIFGHEAGGIVESVGEGVTDLAPGDHVLPIFTGECGDCPHCHSEESNMCDLLRINTERGGMIHDGESRFSIDGKPIYHFAGTSTFSEYTVIHSGQVAKINPDAPLDKVCIVSCGLSTGLGATLNVAKPKKGQSVAIFGLGAVGLAAAEGARIAGASRIIGVDLNSKRFDEAKKFGVTEFVNPKDHDKPVQQVIAEMTDGGVDRSVECTGSVQAMIQAFECVHDGWGVAVLVGVPSKDDAFKTHPMNFLNERTLKGTFFGNYKPKTDIPGVVEQYMNKELEIEKFITHAVPFSEINKAFDYMLKGEG

SEQ ID NO: 4713 - protein, 380 aa, Actinidia chinensis
MGLPKSFVSMSLLFFSTLLILSLAFNAKNLTQRTNDEVKAMYESWLIKYGKSYNSLGEWERRFEIFKETLRFIDEHNADTNRSYKVGLNQFADLTDEEFRSTYLGFTSGSNKTKVSNRYEPRFGQVLPSYVDWRSAGAVVDIKSQGECGGCWAFSAIATVEGINKIVTGVLISLSEQELIDCGRTQNTRGCNGGYITDGFQFIINNGGINTEENYPYTAQDGECNLDLQNEKYVTIDTYENVPYNNEWALQTAVTYQPVSVALDAAGDAFKHYSSGIFTGPCGTAIDHAVTIVGYGTEGGIDYWIVKNSWDTTWGEEGYMRILRNVGGAGTCGIATMPSYPVKYNNQNHPKPYSSLINPPAFSMSKDGPVGVDDGQRYSA

SEQ ID NO: 4714 - protein, 184 aa, Zea mays
MNRKPGDWDCRACQHLNFSRRDICQRCSEPRGVADRGSGGGGGGDYASFGGRGGSSFGGGFGAAGSDVRPGDWYCSCGAHNFASRSSCFKCSAYKEEAAVNSGAGGFDGDMSRSRGYGFGSGAAAAAGAGAARTTNRPGWKSGDWICTRSGCNEHNFASRMECFRCNAPRDSGSAAMTYENYLH

SEQ ID NO: 4715 - protein, 357 aa, Oryza sativa
  unsure (1)..(357): unsure at all Xaa locations
LSSTPLFSSPLLSSHDGSRPPATPPAAPHPPARSLRPPPAAGAXSSSSSPQSRRPXSSDVRLSDFERISVLGHGNGGTVYKARHRRGCPAQQPLALKLFAAGDLSAAREAEILRLAADAPHVVRLHAVVPSAAGGVEDAALALELMPGGSLAGLLRRLGRPXWGERPIAAVARQALLGLEALHALRIVHRDLKPSNLLLGADGEVKIADFGAGKVLXGGGSTPAXSYVGTAAYMSPERFDPEAYSGDYDPYAADVWSLGVAILELYLGHFPLLPVGQRPDWAALMCAICFGEAPEMPAAASEEFRDFVSRCLEKKAGRRASVGELLEHPFIAERDAADAQRSARRXLVAEAEQSGDL

SEQ ID NO: 4716 - protein, 182 aa, Thermotoga maritima
MFEGKLVRLRAYRKEDIEKALEFANDPEVKKCLVPGIPFPWRKEDEEKWYQSLNPFSTDSYSFAIEKLSDGEYIGGCSINKIDWKNSVAEVGIFLGRPYWSQGYGTDAMRVLVRFIFNEMNMNKIKLHVFSFNERAKRVYEKIGFKVEGILRQELFREGRYHDVIVMGLLKSEWEDLTETDL

SEQ ID NO: 4717 - protein, 258 aa, Saccharomyces cerevisiae
MLEAKFEEASLFKRIIDGFKDCVQLVNFQCKEDGIIAQAVDDSRVLLVSLEIGVEAFQEYRCDHPVTLGMDLTSLSKILRCGNNTDTLTLIADNTPDSIILLFEDTKKDRIAEYSLKLMDIDADFLKIEELQYDSTLSLPSSEFSKIVRDLSQLSDSINIMITKETIKFVADGDIGSGSVIIKPFVDMEHPETSIKLEMDQPVDLTFGAKYLLDIIKGSSLSDRVGIRLSSEAPALFQFDLKSGFLQFFLAPKFNDEE

SEQ ID NO: 4718 - protein, 357 aa, SYNECHOCOCCUS SP. WH 8102
MAQHRVVLLPGDGIGPEITAVARQLLEAVSQRHGFELCFDGQLIGGSAIDACGEPLPASTLDACKAADAVLLAAIGSPRFDNLPRDKRPETGLLGLRSGMALFANLRPVKIVPALIGASSLRPEVIEGVDLMVVRELTGGIYFGQPKGRIQADGEERGFNTMTYSSSEVDRIARVAFDLARERRGNLCSVDKANVLDVSQLWRDRVDAMAPAYSDVEVSHMYVDNAAMQLVRSPRQFDVLLTGNLFGDILSDEAAMLTGSIGMLPSASLGSDCPGLFEPVHGSAPDIAGQDKANPMAMVLSAAMMLRIGLKQTEAAADLEAAVDKVLAAGFRTGDLMAEGCTALGCRAMGDALLKAL

SEQ ID NO: 4719 - protein, 537 aa, Marchantia polymorpha
MGASNVDAKGSEEEVPLKQSSSRKEAVNPADGNAAVSIKIRTRLPDFLNSVNLKYVKLGYHYVITHALYLLMVPLLMVVAAEFGRLGHEDFGQLWEQLQFNLVSVLVCSGTLVFGGTLYFMSRPHPVYLVDFACYKPIDERKVTREIFMECSRITGNFNEKSLEFQRKILERSGLGQDTYLPPAVLRVPPNPNMHEARLEAETVMFGALDELFEKTGVKPKEVGILVVNCSLFNPTPSLSAMIVNHYKMRGNIKSLNLGGMGCSAGVISIDLARDLLQVHNSTYAVVVSMENITLNWYMGNDRSKMLSNCIFRMGGAAILLSNKMKERRRAKYELVHTVRTHKGADPKCFSCVVQEEDDEGKIGVSLSRDLMGVAGDALKANITTLGPLVLPLSEQILFFATLVGRKLFKMKIKPYIPDFKLAFEHFCIHAGGRAVLDELEKNLNLTEWHMEPSRMTLYRFGNTSSSSLWYELAYTEAKGRVRRGDRLWQIAFGSGFKCNSAVWRALRTVKSPKQSPWADEIDSFPVEVPAFTSMLN

SEQ ID NO: 4720 - protein, 272 aa, Streptomyces violaceoruber
MTTATATATATPGTAAKPVALVTGATSGIGLAIARRLAALGARTFLCARDEERLAQTVKELRGEGFDVDGTVCDVADPAQIRAYVAAAVQRYGTVDILVNNAGRSGGGATAEIADELWLDVITTNLTSVFLMTKEVLNAGGMLAKKRGRIINIASTGGKQGVVHAVPYSASKHGVVGLTKALGLELARTGITVNAVCPGFVETPMAERVREHYAGIWQVSEEETFDRITNRVPLGRYVETREVAAMVEYLVADDAAAVTAQALNVCGGLGNY

SEQ ID NO: 4721 - protein, 353 aa, Arabidopsis thaliana
MANIGVVTTATNNQVIFRNYVNGFPKESDLYIAASTVDLRVPPGSMAVLVKNLYLSCDPHSRTRMGKPDPSSPASMAHAFTIGKPISGFGVAKAIDSGHPNYKTGDLLWGRVGWEEYSVITPTPSSHFKIHHTDVPLSFYTGLLGIPGLTAYIGFYEICSPKKGETVFVSAASGAVGQLVGQFAKMAGCYVVGSASSEEKVDLLKTKFGYDDAFNYKEEKDLSAALKRCFPEGIDIYFENVGGKMLEAVLENMRTHGRIAACGMISQYNLKKPEVLHNTATIVHKRIRVQGFAAVEFFDRYSKFLDFILPHVREGKLTYVEDISQGLENGPSALIGLFHGKNVGKQLVEVARV

SEQ ID NO: 4722 - protein, 350 aa, Oryza sativa
MSQRRVAGPMGVMSKQQQEAMAEEMMELRRGPWTLEEDNLLMNYIACHGEGRWNLLARCSGLKRTGKSCRLRWLNYLKPDIKRGNLTPEEQLLILELHSRWGNRWSRIAQHLPGRTDNEIKNYWRTRVQKQARQLKVDANSTVFRDAVRCYWMPRLLEKMAGAATDPTPPPPPPLHHHAAMATASSSPFDFDTHLQQAEAATACVVPNNVYHHHIDPSPSTSTSAGSTAAAAAFQPLPCFSELRWDQQMQSSGELDDGAAGVFVDSASALGSLSLDGLDLGPAEYYSDSTLLDYLNSSCTGSAMMTMMTASGNAGSYNYCGGAMDGGDTWRSDEVCQAAARKLGEWGGGI

SEQ ID NO: 4723 - protein, 197 aa, Oryza minuta
GQTPVFPRILGHEAGGIVESVGEGVTELAPGDHVLPVLTGECKECAHCKSEESNMCDLLRINVDRGVMIGDGQSRFTINGKPIFHFVGTSTFSEYTVIHVGCLAKINPEAPLDKVCILSCGISTGLGATLNVAKPKKGQTVAIFGLGAVGLAAMEGARLSGASRIIGVDLNPAKFEQAKKFGCTDFVNPKDHSKPVH

SEQ ID NO: 4724 - protein, 345 aa, Thermus thermophilus
MKVAVLPGDGIGPEVTEAALKVLRALDEAEGLGLAYEVFPFGGAAIDAFGEPFPEPTRKGVEEAEAVLLGSVGGPKWDGLPRKIRPETGLLSLRKSQDLFANLRPAKVFPGLERLSPLKEEIARGVDVLIVRELTGGIYFGEPRGMSEAEAWNTERYSKPEVERVARVAFELARKRRKHVVSVDKANVLEVGEFWRKTVEEVGRGYPDVALEHQYVDAMAMHLVRSPARFDVVVTGNIFGDILSDLASVLPGSLGLLPSASLGRGTPVFEPVHGSAPDIAGKGIANPTAAILSAAMMLEHAFGLVELARKVEDAVAKALLETPPPDLGGSAGTEAFTATVLRHLA

SEQ ID NO: 4725 - protein, 400 aa, Desulfovibrio desulfuricans G20
MTTFDELKQREESLLCRTYGRYPLAVASARGSVLTDFSGREYIDLLSGIAVTNLGHCHPALAEVMHAQAGRLVHLSNLFYQQEQLELAEKLLGTTHLGKAFFCNSGAEANEAAIKLARRYAQRVKERDAGTVITLTGAFHGRTLATVAATGQAKFQDGFAPIPQGFRQVEWGSLDALEAAMDDDVVAVLAEIVQGEGGIRPMTPEYAQGVQDICRRHGVLFMVDEVQSGMCRTGRFWAFQHYGLTPDVVTSAKALANGLPMGAMLATDEAAKGFEPGSHATTFGAGALVSAVAARVVDIMQQEKLAERADRVGGAFMADVRSLAARLPGTIQEVRGLGLMIGIVLTFPGREVWEELLRRGFVLNLTQERVLRLLPALTVPETYLQDFLTALEEILSERTV

SEQ ID NO: 4726 - protein, 91 aa, Oxalis cf. ptychoclada EE916
  unsure (1)..(91): unsure at all Xaa locations
XNIXGTNGEVMPGQWEYQVGPSVGIEAGDHIWASRYILERITEQAGVVLTLDPKPIDGDWNGAGCHTNYSTKSMRDEGGFEVIKKAILNLS

SEQ ID NO: 4727 - protein, 328 aa, Listeria innocua
MMSIVVLGGAGYIGSHAVDELINRGYEVVVVDNLRTGHKESIHKKAKFYEGDIRDKAFLSTVFEKESIDSVIHFAASSLVGESMEVPLEYLNNNVYGTQVLLEVMEQFGVKHIVFSSSAATYGEPERVPITEDMPTSPESTYGETKLIMEKMMKWCDKAYGMKFVALRYFNVAGAKADGSIGEDHKPETHLVPIILQVALGQREKLAIYGDDYNTPDGTCIRDYVQVEDLIDAHIRALEYLKKGGESNIFNLGSSNGFSVKEMLEAARIVTGKEIPAEVVPRRAGDPGTLVASSDKAREILGWQPTYTDVKDIIATAWNWHVSHPNGY

SEQ ID NO: 4728 - protein, 524 aa, Glycine max
  unsure (1)..(524): unsure at all Xaa locations
MTKYFSVLGLDILLLVAIFLFSFWFSSFVFFFVSHLSEDFSILVPGGTRNPDQINKPFFSSNFSEVSFFSPMATWILSECGLXPLAPVIPRPRTGAALSSTSRVEFLDTNKVVAGPKFQPLRCNLRERNWGLKVSAPLRVASIEEEQKSVDLTNGTNGVEHEKLPEFDPGAPPPFNLADIRAAIPKHCWVKDPWRSMSYVVRDVIAVFGLAAAAAYLNNWLVWPLYWAAQGTMFWALFVLGHDCGHGSFSNNSKLNSVVGHLLHSSILVPYHGWRISHRTHHQHHGHAENDESWHPLPEKLFRSLDTVTRMLRFTAPFPLLAFPVYLFSRSPGKTGSHFDPSSDLFVPNERKDVITSTACWAAMLGLLVGLGFVMGPIQLLKLYGXPYVIFVMWLDLVTYLHHHGHEDKLPWYRGKEWSYLRGGLTTLDRDYGWINNIHHDIGTHVIHHLFPQIPHYHLVEATEAAKPVFGKYYREPKKSAAPLPFHLIGEIIRSFKTDHFVSDTGDVVYYQTDSKINGSSKLE

SEQ ID NO: 4729 - protein, 175 aa, Zea mays
PRVRTKMTGMEYLLSEVMEPHLFVIRKQKRESPEKSSPMLAYYILDGSIYQAPQLCNVFASRISRAMHHISKAFTIACSKLEKIGNVETEPDAVASESKTQKEAIDLKELKRIDHILSSLKRKIGAAPPPPPYPEGYVPPSAEQEKAPDDVAASEAPPQLDPIIDQGPSKRPRFQ

SEQ ID NO: 4730 - protein, 481 aa, Elaeis guineensis
LTFVDLSRNNLSGEIPAEIAGIRILNYLNVSRNHLEGSIPPSIATMQSLTAVDFSYNNLSGLVPSTGQFSYFNVTSFVGNAELCGPYLGPCGFTNSSGSTHARGPLSASFKLLLGHWSPPLFHCLRHRRHHQKLGSFEEGRARPGHGSLTAFQRLDFTCDDVLDWLKEENIIGKGGAGIVFQGCDAQRRTVAVKKLPAINPGSSHEHGFSAEIQTLGRIRHRHIVRLLGFCSNHETNLLVYEYMPNGSLGEVLHGKKGGHLRWDTRYKIAVEAAKGLCYLHHDCSPLILHRDVKSNNILLDSDFEAHVADFGLAKFLQDSGTSECISAIAGSYGYIAPEYATLKVDEKSDVYSFGVVLLELVTGRKPVGEFGDGVDIVQWVRKVTDTNKEGILKIIDPRLSSVPLHEAMHVFYVAMLCVEEQSVERPTMREVVQILTELPGTPAKQGEDPPPPPPVGGETPPRESKPRQEQQSPPPDLLSI

SEQ ID NO: 4731 - protein, 460 aa, Clostridium perfringens str. 13
MEIFKKQSLKRILSEANENKERTLSALDLTLMSVGSVIGTGVMVLTGIVAAKQSGPATSIAFIGGGIAAAIIVLCYAEFSSSIPSAGGSYSFTYVSLGEIIAYISGLCIVIGYTLSTATVASGWGAYLLSLLDILGIKLPKTFTAIPSEGGIVNLPAMISILFIVFVISLGTKESKKVNDIMVFIKIVVIALFIGVGAFHVNTSNWHPFAPFGVKGIVTGTASLFFAYCGFDATASAAEEVKNPQKSLPLGLISSLVICTIIYIAVSLVLTGVTSYTNLNVGDALSYALKLVGQRGVAFVVSLGTVIGILAVIFAGNFTTSHILLAMSRDGLLPKFFSKVDKKDVPYTALWTVGIIGALLAGFFNLGQLANFANIAFLLTYTLVCISLIAFRKKYPHVKRGFKTPLVPFIPLLGAFSCLFLMSNLSEETWKIFIVVLVLLITSYLVYGRKHSLINKNNDN

SEQ ID NO: 4732 - protein, 95 aa, Glycine max
MLEGKAVIEDTDMPDKMQIQAMASASEALDLYDVFDCTSIAAHIKKEFDTKYGSGWQCVVGSSFGCFFTHSKGTFVYFTLETLNFLIFKGASYLI

SEQ ID NO: 4733 - protein, 105 aa, Glycine max
SSQLRKCPPPLTYTTFGAFAYGMYQVGQGNKVRRALKEEKIAARSAILPMLQAEEDERFVKEWKKCLEEEARIMKDVPGWKVGESVYNSGKWMPPATGELRPEVW

SEQ ID NO: 4734 - protein, 325 aa, Chlamydophila pneumoniae CWL029
MHSELPNYQNIVESVVTEITTQLLNYRSEHRLVPFWEKSDGSFITAADYGSQYYLKQQLAKAFPNIPFIGEETLYPDQDNEKIPEILKFTRLLTSSVSRDDLISTLVPPPSPTSLFWLVDPIDGTAGFIRHRAFAVAISLIYEYRPILSVMACPAYNQTFKLYSAAKGHGLSIVHSQNLDRRFVYADRKQTKQFCEASLAALNQQHHATRKLSLGLPNTPSPRRVESQYKYALVAEGAVDFFIRYPFIDSPARAWDHVPGAFLVEEAGGRVTDALGAPLEYRKESLVLNNHAVILASGDQETHETTLAALQNQLNVVPTDKLIAL

SEQ ID NO: 4735 - protein, 334 aa, Mycoplasma hyopneumoniae
MANSDKIALNNIGAVTNALDLMMEKDSRVVLWGEDAGFEGGVFRATEGLQKKYGIERVWDSPIAEASICGVGVGAAIAGLRPVVEMQFQGFSYPAFQQLFVHAARYRNRSRSRFSVPMVMRMPMAGGVRALEHHSEAIEALFAHIPGLKVVMPSTPYDTKGLLIAAINDPDPVVFLEPKKIYRAFKQEVPAGIYEVPIGKANVIKEGSDLTLVTYGAQVHEAIAAIQQLPNTKGLEEVDVELIDLRTIKPLDTETIIESVKKTGRILIVHEAVKSFSVSAEIISRVNEKAFEYLESAPARLTGYDITVPLAKGENFHSITKEKIIDKIRKIMES

SEQ ID NO: 4736 - protein, 172 aa, Rhodopseudomonas palustris
MILRALLCTGALLGVTTAAMAADSAKATLKNAEGTEIGTATLTESSKGVTIKLALKGLPPGEHAFHIHAVGKCEPPFTSAGGHFNPENKKHGKMAEGGAHAGDMPNLDVPASGALSIDVVNDAVTLAKGKPNSVFKDGGTALVIHAKADDYKSDPAGNAGDRIACGVIEEAK

SEQ ID NO: 4737 - protein, 188 aa, Glycine max
  unsure (1)..(188): unsure at all Xaa locations
MKEGEQQRVPLRERAEWSDVTPLAQNDGPNPVVPIQYTEDFSQVMDYFRAVYLADERSPRALALTAEAVQFNSGNYTVWHFRRLLLESLKVDLNAELDXVERMAAGNSKNYQMWXMEKRWVAEKLGPEARKNELEFTKKILSVDAKHYHAWSHRQWVLQALGGWEDELNYCTELLKEDIFNNSAWNQR

SEQ ID NO: 4738 - protein, 337 aa, Shewanella oneidensis MR-1
MTILVTGGAGYIGTHTVVELLNAGSEVIVLDNLSNSSIEALDRVERITGKSVTFYQGDILNKALLQKVFSDHSIDAVIHFAGLKAVGESVAKPLKYYENNVTGTLILCQVMAEFKVKNLVFSSSATVYGDPASLPITEDFPTGATNPYGQSKLMVEHILADLHHSDPSWNIARLRYFNPVGAHASGLIGEDPNDIPNNLMPFIAQVAVGKREALSVFGNDYPTHDGTGVRDYIHVVDLAIGHLKALEKLATKPGLVTYNLGTGQGYSVLDMVKAFEKACGKSIAYLIAPRRPGDIAACYADPDHAKTDLDWQATHSLEDMANSSWHWQSTNPNGYKG

SEQ ID NO: 4739 - protein, 184 aa, Glycine max
  unsure (1)..(184): unsure at all Xaa locations
ARGVLQLQAYFLVLDDIMDNSHTRRGQPCWFRVPKVGMIAANDGVLLRNHIPRILKKHFRGKPYYVDLLDLFNEVEFQTASGQMIDLITTLEGEKDLSKYTLTLHRRIVQYKTAYYSFYLPVACALLMAGEXLDNHVDVKNILVEMGTYFQVQDDYLDCFGDPHTTGKVSISDNGFGNINFSLL

SEQ ID NO: 4740 - protein, 468 aa, Corynebacterium glutamicum ATCC 13032
MNASPAPTRSFKGLRARHIHFIALGSAIGTGLFYGSAGAIQAAGPSVLLVYLLGGAVVYFMLRALGEMAVHHPVRGSFAVYTRAHLGGWAGYITGWMFAFEMLIVCLADLTAIGIYMNFWFPGTPQWTWVVATLLIVGGANLASVRWFGELEFIFTIIKVTAVVAMIVGGAAILAFGLGANAEVAGVSNLWEHGGFFPNGVEGMIAAFILVLFAFGGTEIIGVAGSEAEDPEKSIPKAVNTVPVRILLFYVGAILVILALNPWPSITGEESPFVQIFDTLGVNWAAGLLNAVVITAALSAINADLFGAGRVLTGLAKENLAPKAMGKIAKNGVPVMTTTIMIIVLIVGVILNAVLPERVFEIVASLATFATVYVWLMILLAQVGSRRNMPADEVKSLKFPVPFYPFGQYFAILFIAFTFGIMVWYDNYHLPLAVGVGFLVLMTILYYATGRPKAIAPIDYEELDPRRD

SEQ ID NO: 4741 - protein, 186 aa, Zea mays
MNRKPGDWDCRACQHLNFSRRDICQRCSEPRGVADRGSGGGGGGGGGDYASFGGRGGSSFGGGFGAAGSDVRPGDWYCSCGAHNFASRSSCFKCSAYKEEAAVNSGAGGFDGDMSRSRGYGFGSGAAGAGAGAARTTNRPGWKSGDWICTRSGCNEHNFASRMECFRCNAPRDSGSAAMTYENYLH

SEQ ID NO: 4742 - protein, 341 aa, Escherichia coli O157:H7 EDL933
MKALSKLKAEEGIWMTDVPVPELGHNDLLIKIRKTAICGTDVHIYNWDEWSQKTIPVPMVVGHEYVGEVVGIGQEVKGFKIGDRVSGEGHITCGHCRNCRGGRTHLCRNTIGVGVNRPGCFAEYLVIPAFNAFKIPDNISDDLASIFDPFGNAVHTALSFDLVGEDVLVSGAGPIGIMAAAVAKHVGARNVVITDVNEYRLELARKMGITRAVNVAKENLNDVMAELGMTEGFDVGLEMSGAPPAFRTMLDTMNHGGRIAMLGIPPSDMSIDWTKVIFKGLFIKGIYGREMFETWYKMAALIQSGLDLSPIITHRFSIDDFQKGFDAMCSGQSGKVILSWD

SEQ ID NO: 4743 - protein, 347 aa, Guillardia theta
MKLLLYDDLKTLFNYKIKKKNNTIVHFLYLLYENVHESLNINNTRNFLWCFMIKFSVEIKKRIKFDYKSCHINFYSFFDNLLEAGNVLNFEKLILNILFNFRKIQFLYIPFTNVMKVQTEINKNMRKILIDWIIDVHHKFKLLSKTLFLTINIIDRFLCLKKIGKQKLQLLGITSMFIASKYEEIYAPEIRDFIYICDNAYSKEDIIKMEQLICFVLRFKFNLPSPQSFLSLWMKILCLKLDSIFFSNKCLELCLIEINTLRYNFEIISLSCIFLSLKFSGNISLKILMNIFRIDSKKNFSLVKSCGLIGSLLLLYQSSYCGQNHLHFKYSSNKHKEFMSRRFHIYF

SEQ ID NO: 4744 - protein, 497 aa, Glycine max
MDTGGNSLPSAPDGVKRKVCYFYDPEVGNYYYGQGHPMKPHRIRMTHALLAHYGLLQHMQVHKPFPARDRDLCRFHADDYVAFLRSITPETQQDHLRQLKRFNVGEDCPVFDGLYSFCQTYAGGSVGGAVKLNHDQCDIAVNWAGGLHHAKKCEASGFCYVNDIVLAILELLKQHERVLYVDIDIHHGDGVEEAFYTTDRVMTVSFHKFGDYFPGTGDVRDIGYGKGKYYSLNVPLDDGIDDESYHFLFKPIIGKVMEVFRPGAVVLQCGADSLSGDRLGCFNLSIRGHAECVKYMRSFNVPLLLLGGGGYTIRNVARCWCYETGVALGIEVDDKMPQHEYYEYFGPDYTLHVAPSNMENKNSRHLLEEIRSKLLENLSKLQHAPSVQFQERPPDSDLGEADEDHDDGDEPWDPDSDMDVDVERELVSSKVKKEIAEPQPNDLEDQRSGEHLRDSDTAVAETCMKALDISSQKADEDNVKVEQNTVNDLAKETDLKG

SEQ ID NO: 4745 - protein, 442 aa, Oryza sativa (japonica cultivar-group)
MAGWYEEAVGLLRRPAVAEMAVDVLLCAVPIWAAVMIGLVIGWAWRPRWTGLLYLGFRSRLRLLYVPPGLGARRLWLACTALSAFSVAPRLLSTAFGSRGKHQRKDAALADDDDAADASGDAGDCVDGRTFFEGGHHVVTEKDLEHLVQLLDNKESGDTTWQHLMERTTSNMTYKAWRREPEVGPIMYCSRTIFEDATPELVRDFFWDDEFRLKWDPMLAYFKILEEFPQNGTMIIHWIKKFPFFCSDREYIFGRRIWESGKTYYCVTKGVPYPALPKKEKPRRVELYFSSWRIRAVQSPKQDGQQSACEVTLVHYEDMGIPKDVAKVGVRHGMWGAVKKFQSGFRAYQQMRDTENTLSRSAIMARVTTKTSIASSSCPLDQEPSNAAKTIDESENSRAVQPGFDWKWVVFGGAVAAVCVLNTGLVGKALLIGAASRRQAKK

SEQ ID NO: 4746 - protein, 287 aa, Triticum aestivum
MATAVTASATAATRFTRLAGVALRRSSCRPRTAVRFQRPGLTTTALLRPTELKPKDQGQPETLDYRVFLVDGADRKVSPWHDVPLRAGDGAFHFIVEIPKESSAKMEVATDEAYTPIKQDTKKGNLRYYPYNINWNYGLLPQTWEDPTAANADVEGALGDNDPVDVVEIGERRANIGDVLRVKPLAALAMIDEGELDWKIVAISLDDPKASLVNDVDDVEEHFPGTLTAIRDWFRDYKIPDGKPANRFGLGNKPTSKEYALKVIEETNESWEKLVKRKIPAGELSLA

SEQ ID NO: 4747 - protein, 347 aa, Neurospora crassa
MAKTTTLKEFESVFPKLEEALLEYAKAYKLPEQMLSWYKQSLEVNTLGGKCNRGMSVPDSASILLGRPLTEEEYFQAATLGWMTELLQAFFLVSDDIMDSSITRRGKPCWYRQEGVGMVAINDAFMLESAIYTRLKKYFRSHPRYVDFLELFHEVTFQTEMGQLCDLLTAPEDKVDLDNFSMDKYTFIVIYKTAYYSFYLPVALAMYMLDIATPENLKQAEDILIPLGEYFQVQDDYLDNFGLPEHIGKIGTDIQDNKCSWLVNKALSIVTPEQRKTLEENYGRKDKAKEAVIKQLYDDLKLEDHYKQYEEERVGEIRKMNDAIDESKGLKKQVFEAFLGKIYKRSK

SEQ ID NO: 4748 - protein, 370 aa, Celastrus scandens
ALSIAGAVQSQKLAVRAISRLQSLPGGDIKLLCDTVVESVRDLTSYDRVMVYKFHEDEHGEVVAESKRPDLEPYFGLHYPSTDIPQASRFLFKQNRVRMIADCRASPVGVIQDDGLMQPLCLVGSTLRAPHGCHAQYMENMGSKSSLAMAVIINGTDEEVIGGRNATRLWGLVVCHHTSARCIPFPLRYACEFLMQAFGLQLNMELQLAAQLSEKHVLKTQTLLCDMLLRDSPTGIVTQSPSIMDLVKCDGAALYYQGKYYPIGVTPVEAQIKDIVEWLLTFHGDSTGLSTDSLADAGYPGAALLGDAVCGMAVAYITKKDFLFWFRSHTTKEIKWGGAKHHPEDKDDGQRMHPRSSFKAFLEVVKSRSL

SEQ ID NO: 4749 - protein, 398 aa, Zea mays
MERSQRQSPPPPSPSSSSSCVSADTVLVPPGKRRRRAATAKAGAEPNKRARKDPSDPPPAAGERSSVYRGVTRHRWTGRFEAHLWDKHCLAALHNKKKGRQVYLGAYDSEEAAARAYDLAALKYWGPETLLNFPVEDYSSEMPEMEAVSREEYLASLRRRSSGFSRGVSKYRGVARHHHNGRWEARIGRVFGNKYLYLGTFDTQEEAAKAYDLAAIEYRGVNAVTNFDISCYLDHPLFLAQLQQEPQVVPALNQEPQPDQSETGTTEQEPESSEAKTPDGSAEPDENAVPDDTAEPLTTVDDSIEEGLWSPCMDYELDTMSRPNFGSSINLSEWFADADFDCNIGCLFDGCSAADEGSKDGVGLADFSLFEAGDVQLKDVLSDMEEGIQPPAMISVCN

SEQ ID NO: 4750 - protein, 343 aa, Artemisia annua
MSSIDLKSKFLKVYDTLKSELINDPAFEFDDDSRQWIEKMLDYNVPGGKLNRGLSVVDSYQLLKGGELSDDEIFLSSALGWCIEWLQAYFLVLDDIMDESHTRRGQPCWFRLLKVGMIAANDGILLRNHVPRILKKHFRGKPYYVDLVDLFNEGVIQTASGQMIDLIPTLVGEKDLSKYSLSIHRRIVQYKTAYYSFYLPVACALLMFGEDLDKHVEVKNMLVEMGTYFQVQDDYLDCFGAPEVIGKIGTDIEDFKCSWLVVKALELANEEQKKVLHENYGKKDPASVAKVKEVYHTLNLQAVFEDYEATSYKKLITSIENRPSKAVQAVLKSFLGKIYKRQK

SEQ ID NO: 4751 - protein, 222 aa, Picea abies
MGRGKIEIKRIENTTNRQVTFCKRRNGLLKKAYELSVLCDAEVALIVFSSRGRLYEFANHSVKRTIERYKKTCVDNNHGGVISESNSQYWQQEAGKLRQQIEILQNANRHLMGDGLTALNIKELKQLEVRLEKGIGRVRSKKNEMLLEEIDIMQRREHILIQENEILRSKIAECQNSHNTNMLSAPEYDALPAFDSRNFLHANLIDAAHHYAHQEQTTLQLG

SEQ ID NO: 4752 - protein, 142 aa, Glycine max
MASPDVEYRCFVGGLAWATDDRALETAFSQFGDVLDSKIINDRETGRSRGFGFVTFKDEKSMKDAIEGMNGQDLDGRSITVNEAQSRGSGGGGGGRGGGGGGYRSGGGGGYGGGGGGYGGGGGRREGGYSGGGGGGYSSRGG

SEQ ID NO: 4753 - protein, 255 aa, Mycobacterium avium
MTDTATENTTESAADYGRPAFVSRSVLVTGGNRGIGLAIAQRLAAEAHKVAVTHRGSGAPDGLFGVECDVTDNDAVDRAFTEVEEHQGPVEVLVSNAGISKDAFLIRMTEERFTEVINANLTGAFRVTQRAARSMQKKRFGRIIYIGSVSGMWGIGNQANYAAAKAGLIGMARSISRELSKAGVTANVVAPGYIDTEMTRALDERIQAGALEFIPAKRVGTAAEVPGAVSFLASEDASYIAGAVIPVDGGMGMGH

SEQ ID NO: 4754 - protein, 466 aa, Corynebacterium glutamicum ATCC 13032
MKNKRVAIIGAGPSGIAQLRAFESAEKQGHEIPELVCFEKQDTWGGQWNYSWRTGTDSYGEPVHSSMYRNLWSNGPKEVLEFAEYSFDEHFGKPISSYPPREVLWDYIAGRAKKSNVEKYIKFAHVVRWVSFDEATKLFTVTVENLRTGETSSDTYDNVIVGAGHFSFPNVPHFDGVETFPGQIMHAHEFRGAEAVADKDILLIGASYSAEDIGTQAYKMGARSVTFSYRSNPMGYEWPEEMTELPLVERFDGSEVHFVNGEKRKVDIVVFCTGYLHHYPFMPSELTLSSPNNLYPDTLYRGVVSEANNQLFWLGAQDQWLTFNMFDAQAWYVRDVILGRVALPSKEAQRNHMDKWLSRFEGLKSENDQIDFQCDYVEDLIDQTDYPSFDLKEVANILKGWVKSKEEDILNYRDYTYTSVMTGTTSVEHHTPWMIELDDSLERYLSEPQEDEARQVYRGKKVRDKA

SEQ ID NO: 4755 - protein, 357 aa, Thermotoga maritima
MGIVGLPNAGKSSFFNFLTDNSVPAESFPFCTIEPNVGILVVPDERIEILAKNEGSKKVVHPFVEVVDIAGLVKGASKGEGLGNQFLDHISKVDVIAHVVRLFEDGRVSHPYQNVDPKRDIEIVETELILKDLETVQKRLEKRMKVARTGDKEAKREVELLQNLREFLSQGKKASKFPRHDRFEEEVIESLFLLTDKPQILVFNVDELDEEKRKLIEEIVKEKDEEYIIINVKLEEELKFLPEEEAEVFRREYNLFGDKRKEFFEKVLKLLNLIRFLTATQNEARSWTIKKGSTAYEAAGLIHSDIQKGFIKVEVIPFERYVEFGSLKKAREAGAVETHGKDYIVREGDVIHFLFRA

SEQ ID NO: 4756 - protein, 398 aa, Zea mays
WALRVSAPTRLTSAVEEDKRSSPLGEGDEHVAASGAAGGEFDPGAPPPFGLAEIRAAIPKHCWVKDPWRSMAYVLRDVVVVLGLAAAAARLDSWLVWPLYWAAQGPSVWAPCVLGHDCGHGSFSNNPKLNSVVGHILHSSILVPYHGWRISHRTHHQNHGHVEKDESWHPLPERLYKSLDFMTRKLRFTMPFPLLAFPLYLFARSPGKSGSHFNPSSDLFQPTEKNDIITSTASWLAMVGVLAGLTFLMGPVPMLKLYGVPYLVFVAWLDMVTYLHHHGHEDKLPWYRGKEWSYLRGGLTTLDRDYGWINNIHHDIGTHVIHHLFPQIPHYHLIEATEAAKPVLGKYYKEPKKSGALPWHLFRVLAQSLKQDHYVSDTGDVVYYQADSKTSTSAQKSD

SEQ ID NO: 4757 - protein, 392 aa, Ralstonia metallidurans
MQRITILGATGSIGESTLDVVRRHPDRYSVHALSAHRQVDKLAAACVEFRPARAVVGSAEAARELEAKLRAAGVPTEVSYGETALESIAEDAGTDAVMAAIVGAAGLRSSLAAARAGKRVLLANKESLVMSGGIFMDAVREHGATLLPIDSEHNAIFQCLPTSDPRYGAGVSKVLLTASGGPFRTRDPSTLHDITPDQACAHPKWVMGRKISVDSATMMNKGLEVIEAHWLFGAPAEKIEVLIHPQSIVHSMVAYADGSVLAQLGNPDMRTPIAYGMAYPERIDSGVTPLDLTVAGGLHFETPDLERFPCLGLAFDALRAGGVAPAVLNAANEVAVEAFLNGKIRFTDIARVVATVLEQPADGSADTLEGVLAADSAARRGAQAQLGSLAGR

SEQ ID NO: 4758 - protein, 404 aa, Prochlorococcus marinus subsp. pastoris str. CCMP1378
MLGSTGSIGTQTLEIVSELPDKFKVVALSAGRNIDLLTEQVSQHKPEVIAIEDENLLTDLKNNINNLGISNPPIVLGGREAINSVAAWDSADTVITGIVGCAGLIPTMSAIKAGKNIALANKETLIAAGSVVIPALKESKSRLLPADSEHSAIFQCIQGLPNYENADFSTGQIPNGLKAIHLTASGGAFRDWEVEDLKNVTVEDATSHPNWSMGRKITVDSATLMNKGLEVIEAHYLFGTSYENIEIAIHPQSIIHSMIEMEDSSVLAQLGWPDMKLPILYAMSWPERFKTNWKRFNLTEIGQLTFKKPDEVKYPCMGLAYSAGKCSGTMPAVLNAANEMAVDQFLKEKISFQEIPIFINKTCESHLNKINLNPKLEDILEVDNWARIFVQEEIKKGKKYINVG

SEQ ID NO: 4759 - protein, 309 aa, Mycoplasma pneumoniae
MTLYDLLELPQTATLQEIKTAYKRLAKRYHPDINKQGADTFVKINNAYAVLSDTTQKAEYDAMLRFSEFEDRVKRLDFSIKWHEQFMEELQFHHNWDFDFIRNREYTQPTPTNNKYSSFLDKDVSLAFYQLYSKGKLDFDLEDTLLRRHSIKQAFLKGKKLNDVLKEQYNYLGWLEAKRYFNIDVEIELTPKEVREGGVVNLPLKIKVISNNYPGQMWYELNKNYSFRLLWDIKNGEVAEFFGKGNRALGWRGDLIVRMRIVDKIKKRLRIFSSHFEQDKTKLWFLVPQDKQDNPNKWVFDYKTHEFIV

SEQ ID NO: 4760 - protein, 750 aa, Geobacillus stearothermophilus
MENQNRQNAAQCPFHGSVTNQSSNRTTNKDWWPNQLNLSILHQHDRKTNPHDEEFNYAEEFQKLDYWALKEDLRKLMTESQDWWPADYGHYGPLFIRMAWHSAGTYRIGDGRGGASTGTQRFAPLNSWPDNANLDKARRLLWPIKKKYGNKISWADLFILAGNVAIESMGGKTIGFGGGRVDVWHPEEDVYWGSEKEWLASERYSGDRELENPLAAVQMGLIYVNPEGPDGKPDPKAAARDIRETFRRMGMNDEETVALIAGGHTFGKAHGAGPATHVGPEPEAAPIEAQGLGWISSYGKGKGSDTITSGIEGAWTPTPTQWDTSYFDMLFGYDWWLTKSPAGAWQWMAVDPDEKDLAPDAEDPSKKVPTMMMTTDLALRFDPEYEKIARRFHQNPEEFAEAFARAWFKLTHRDMGPKTRYLGPEVPKEDFIWQDPIPEVDYELTEAEIEEIKAKILNSGLTVSELVKTAWASASTFRNSDKRGGANGARIRLAPQKDWEVNEPERLAKVLSVYEDIQRELPKKVSIADLIVLGGSAAVEKAARDAGFDVKVPFFPGRGDATQEQTDVESFAVLEPFADGFRNYQKQEYSVPPEELLVDKAQLLGLTAPEMTVLVGGLRVLGANYRDLPHGVFTDRIGVLTNDFFVNLLDMNYEWVPTDSGIYEIRDRKTGEVRWTATRVDLIFGSNSILRSYAEFYAQDDNQEKFVRDFINAWVKVMNADRFDLVKKARESVTALQFFLNRSKSIAVLQ

SEQ ID NO: 4761 - protein, 493 aa, Mentha x piperita
MAALLVFFSVSLILLAVLFHKRKSSLSSRKRPPPSPLRLPVIGHFHLIGALSHRSFTSLSKRYGEVMLLHFGSAPVLVASSAAAAREIMKNQDVIFASRPRLSIFDRLMYSGKGVAFAPYGEHWRNARSMCMLQLLSAKRVQSFGGIREEETSAMIEKIRRSKPTTVVNLSEMFMALTNGVIHRAVLGRKGDGGDDFNRILIKVIKLLGSFNVGDYVPWLSWINRINGVDAEVEKVGTKLDGSMEGILRKYRRKKVGDDETNFVDTLLQFQRESKDTDPVEDDVIKALIFDMVSAGTDTTFAALEWTMAELIKNPRTLKTLQNEVREVSRNKGGITEDDVDKMPYLKAVSKEILRLHPPFAILLPRELTQDANMLGYDIPRGTVVLVNNWAISRDPSLWENPEEFRPERFLETSIDYKGLHFEMLPFGSGRRGCPGSTFAMALYELALSKLVNEFDFRLGNGDRAEDLDMTEAPGFVVHKKSPLLVLATPRQS

SEQ ID NO: 4762 - protein, 301 aa, Zea mays
MHQQGMDMAGCTTPRYTYGADHHQMKEGGDQQQELASPAMASFLQQLSSNAGGGGGVGMHAASMDYSGTGGGLDRICHESRALEAGPFGMRSLPDLSSFGGYSRSTTAESTSSAQPYLQRSSSLAESSRQQEPDIVSARSSSSGSGAASEQRKKRASEERTSTVKKSKQEGSKPSPPKQQQVPKVKIGEKITALQQIVSPFGKTDTASVLFETIKYIKFLHEQVQLLSEPYTNSSRSKGNNHFPWGDHRAAAETSKQGDEAEHDLSDRGLCLVPVSWTPQVYRDGTAMDYWTPAYRGCLYR

SEQ ID NO: 4763 - protein, 349 aa, Bacillus cereus
MKALLWHNQRDVRVEEVPEPTVKPGAVKIKVKWCGICGTDLHEYLAGPIFIPTEEHPLTHVKAPVILGHEFSGEVVEIGEGVTSHKVGDRVVVEPIYSCGKCEACKHGHYNVCEQLVFHGLGGEGGGFSEYTVVPEDMVHHIPDEMTYEQGALVEPAAVAVHAVRQSKLKEGEAVAVFGCGPIGLLVIQAAKAAGATPVIAVELSKERQELAKLAGADYVLNPATQDVLAEIRNLTNGLGVNVSFEVTGVEVVLRQAIESTSFEGQTVIVSVWEKDATITPNNLVLKEKEVVGILGYRHIFPAVIKLISSGQIQAEKLITKKITVDQVVEEGFEALVKDKTQVKISCFT

SEQ ID NO: 4764 - protein, 214 aa, Zea mays
TTSRQVTFCKRRNGLLKKAYELSVLCDAEVALVVFSSRGRLYEYANNSVKSTIERYKKANSDSSNSGTVAEVNAQYYQQESSKLRQMIHSLQNANTRNIVGDSIHTMGLRDLKQMEGKLEKAIIKIRARKNELLYAEVDYMQKREMDLQTDNMYLRSKIAESNETGQPAMHMTMGAPPTSEYDHMAPFDSRNFLQVSMPQHYSHQLQPTTLQLG

SEQ ID NO: 4765 - protein, 326 aa, Burkholderia fungorum
MRNCPPASGEPCVDAERSRENRLFRRDLAEALHRGEVSTRTESRTRARPGCRERGSVAARTRAARRRNHVNTLQSTLTGQHAVVTGGGSGIGAAVAQALLHAGARVTLMGRNAERLDAQREKCQTLGEVACISVDVTQEDSVESAFREAGAVDILINNAGQAQAAPFTHTDLALWQRMLDVNLTGVFLGTRAVLPGMLERGHGRIVNVASTAGQIGYAYVAAYCAAKHGVIGLTRSLALEVATKGVTVNAVCPGYTETELLHASLEQITSKTSRTEQQARETLLRSNPQHRFVSPDQVANAVLWLCQPGSDAVTGQSISISGGEVM

SEQ ID NO: 4766 - protein, 199 aa, Oryza sativa
  unsure (1)..(199): unsure at all Xaa locations
XTVKHYVPNANQIEEYDTYDDEVHFLVQLPFLWSRTKIIEIVAAKDVIFALAQSGLCGAFNRDEVIRSLFYNKNNESLITVSVYESDRFSSLKCRTTPIEYIRRGQLNDGFPLFETESLKYPGFVEFDDVNGKVLTFSAQDSTYKVFDLKNYNFLYSICDKNIQEIKISPGIMLVIYQKSANHVPLKILSIEDGTPLKX

SEQ ID NO: 4767 - protein, 492 aa, Coxiella burnetii RSA 493
MLNYIPLVTQGLLMKQPRALTPLFLTEMWERFGFYVTQSLLILYITSVLNFSDSRAYMILGEFTALVYIAPLAGGFFADRVLGPRYAIFLGAIFLGLGYFFLGFAGQKLLFLSLSILVVGNGLLKPNISSFLGQFYYENDPRRDAGFTLFYIGINLGGLLALGSAGFIQEKLGWGAAFLSAGVGMLIATVTFCFGFKKYENRGLPIPPDQIRPSFLRMTRHKLSIIFLILLTILIAYLLLSSTGIANLLQLVLGISILVTLLFVSSRFEKRIRNKFLVLIILILASIVFWGILFQAFASVNLFTQRVVDRHIVGLLIPSPAFISLETIFIILLGPFLAALWQRLHIKKLDPTPGAKFSFAMFSAAIAMTLLVLAVHWTETSGLIHPIWVVLFYLFLTLGEMLLSPIGLSMVTELSPPHLTGLMMGIWFMALGFGGQLSGFLAEQAGVPKYIVDIHAANEIYGHAFMNNAILSFVIGLILLILSPWLKRLMKN

SEQ ID NO: 4768 - protein, 452 aa, Neurospora crassa
MAPLADTASNGGSTLSLDHLITGSDKYHAAATNVAIAAENEYAAHNYHPLPVVFAKAQGVHVWDPEGKHYLDFLSAYSAVNQGHCHPELVKALTEQASRLTLSSRAFHNDVFPVWAAKVRSVFGYDMVLPMNTGAEAVETAIKIARKWAYKVKGVPHDKALVFSAADNFHGRTMTAISLSVDPESRDNYGPYVPQIGAVSPSTGKTIRYNNIADLEEVLEAHGKETAAFIVEPIQGEAGVVVPDEDYLQKVSALCKKHNVLFICDEIQTGIARTGRMLCSDWANIKPDIITLGKAISGGMYPVSAVLADKEIMLVVEPGTHGSTYGGNPLGCAVSLRALELVEEEGLVEKAEKLGQIFREGVEAFKSPIVKLVRGKGLLNAVVIDESAAAGRTAWDLCILLKEKGVLAKPTHGNIIRFAPPLVITEEELRGAIKTFGEALQELPTVTKSEGH

SEQ ID NO: 4769 - protein, 460 aa, Bradyrhizobium japonicum USDA 110
MSMLPNSQEARDVAYQLHPYTNARAHQQAGPLVIERGEGPYVFDASGKRYFEAMAGLWSVGLGFNEKRLVEAAHKQMLALPFYHTFSAKSHGPSIDLAEKLVALAPVPMSKVFFTNSGSEANDTVLKLIAYRSNALGQPQRKKVISRMRAYHGVTIASASLTGLPNNHRSFDLPLPNILHTGSPHFYKDGAPGESEEAFATRRAEELDALIQKEGPDTIAAFFGEPVMGAGGVIVPPATYWDKIQAVLKKYDILLVADEVICGFGRTGKMFGCETYGIKPDAIVVSKQITSSYFPLSAILMNDRMFEPIADESNKIGVLGHGFTAGGHPVGSAIALENLKIIEERGLVAHAAELGGYMQGKLRELAGHPLVGEVRGVGMIAALELVLDKQRKTAAATPGAVGGIASRMLQERGVISRNMLDAIAICPPLIVNKTQIDELVAAISGVLEDMKAEVAKLTPA

SEQ ID NO: 4770 - protein, 225 aa, Bacillus anthracis str. A2012
MIGFLCLLLTLFTYWISKKMYQRWNWSLLSPLLVCPIILIALLLGLDTSYETYETGGQWLTELLKPATVAFAWPIYKYFDLLKKHGMAILLNVIVGSFLSVITSALLANYFQIDSSLEHSLAPHIVTTPIAMAISEMIGGMSQLTAVFVVLTALTGALLGPSLIRICRIKTAIAKGIMLGTSANGTGTSKAFEIGPVEGTIASLSMLLTAGASLVIVPLFLSWIH

SEQ ID NO: 4771 - protein, 320 aa, Clostridium tetani E88
MKNRRSRMKENAFCNMIGLDYPIIQGAMAWIANSSLASAVSNAGGLGIIASGNQPVDIVKEEIRKTKELTNKPFGVNIMLLSDNAEELAKLICEENIKVVTTGAGNPGKYIDMWKKSGVKVIPVVASVALAKRMERAGADALIVEGCEAGGHIGELTTMALLPQVVDAVNIPVIAAGGIGDKRGVLATFALGAIAVQVGTRFLVAKECNIHRNYKEKVLKAKDIDTVVTGRNTGHPVRVLRNRLTRKYQILEKENAPMEEFEKITKGALIKAVKEGDIQTGSLMAGQIAGLISKEQSCKEIIKEMFDFKEVIKRLENFYE

SEQ ID NO: 4772 - protein, 249 aa, Rhodopseudomonas palustris
MNTIDLNHRCAVVTGGAQGIGRAIAERFVASGAKVALWDHDVALAERTAKEIGDDATIAVAVDVTDPAAVDRARDATLQAFGKIDILVNNAGIAGVNKTVWETDYAEWQRVLKLNLDGPFLCCKSVVPSMIAHKYGRIVNIASIAGKEGNPNAAHYSASKAGVIALTKSLGKELAAYDIAVNAVTPAAARTAIFDQMTQQHIDFMLSKIPKGRFVLVEEVAALVAWLASEDCAFSTGAVFDISGGRATY

SEQ ID NO: 4773 - protein, 149 aa, Haloarcula marismortui
MTDLSAQKRLAADVLDVGKNRVWFNPERQGDIADAITREDVRELVDEGAIQAKDKKGNSRGRARERQKKRAYGHQKGAGSRKGKAGARQNSKEDWESRIRAQRTKLRELRDEGTLSSSQYRDLYDKAGGGEFDSVADLERYIDANHGDA

SEQ ID NO: 4774 - protein, 89 aa, Glycine max
  unsure (1)..(89): unsure at all Xaa locations
MKKIFGAKKNKDPPPTIQDATDRITKRXDTVDEKIKKLDAELARYKEQIKKTRPGPAQEAVKARAMRVLKQRRMYEGQXDMLYNQTYNL

SEQ ID NO: 4775 - protein, 198 aa, Oryza australiensis
GQTPMFPRIFGHEAGGIVESVGEGVTDLAPGDHVLPVFTGECKECPHCKSPESNMCDLLRINTDRGVMIGDGKSRFSINGKPIYHFVGTSTFSEYTVMHVGCVAKINPEAPLDKVCVLSCGISTGLGATINVAKPPKGSTVAIFGLGAVGLAAAEGARIAGASRIIGIDLNANRFEEARKFGCTEFVNPKDHDKPVQQ

SEQ ID NO: 4776 - protein, 276 aa, Zea mays
  unsure (1)..(276): unsure at all Xaa locations
RAPASAAASAASPPPCGSSASGWLTTTALLKTADLQPKEQGKPETLDYRVFLVDGGGRKVSPWHDVPLAXGDGVFHFVVEIPKXESSAKMEVATDEAFTPIKQDTQEGXTLRYYPYNINWNYGLLPQTWEDPTSANSEVEGAFGDNDPVDVVEIGERRANVGDVLKVKPLXAALAMIDEGELDWKIVAISLXDDPKASLVNDVDDVEKHFPGTLTAIRDWFRDYKIPDGKPXANKFGLGNKPAXKEYDPXRVIQETNESWEKLVKRNIPAGELSLA

SEQ ID NO: 4777 - protein, 394 aa, Zea mays subsp. mays
LGAERRARLPPGEMGWPLVGGMWAFLRAFKSGKPDAFIASFVRRFGRTGVYRSFMFSSPTVLVTTAEGCKQVLMDDDAFVTGWPKATVALVGPRSFVAMPHDEHRRIRKLTAAPINGFDALTGYLPFIDSTVTSSLRAWADHGGSVEFLTELRRMTFKIIVQIFLGGADQATTRALERSYTELNYGMRAMAINLPGFAYRGALRARRRLVAVLQGVLDERRAARAKGVSGGGVDMMDRLIEAQDERGRRLDDDEIIDVLVMYLNAGHESSGHITMWATVFLQENPDMFARAKAEQEAIMRSIPSSQQGLTLRDFRKMEYLSQVIDETLRLVNISFVSFRQATRDVFVNGYLIPKGWKVQLWYRSVHMDPHVYPDPTKFDPSRWEGHSPRAGTFL

SEQ ID NO: 4778 - protein, 533 aa, Ralstonia metallidurans
MALFFSRPAFLSYDAAHLHGRQPMSNTNTTPAVPVPGLRRELRARHLTMIAIGGSIGTGLFVASGATIAQAGPGGALAAYILIGAMVYFLMTSLGELAAYMPVSGSFATYGALYVDEGFGFALGWNYWYNWAVTIAVELAAAQLVMQYWFPDTPGVLWSALFLGLMFALNAISVRGFGEAEYWCALIKVLTVIAFIVIGTLMIFGIMRGDFSHAGGLANLTTGDAPFVGGLPAMIGVAMIAGFSFQGTELIGVAAGESDEPAKNIPRAVRQVFWRILLFYVLAILIIGILIPYTDPSLLKTDVETVGVSPFTLVFRHAGLAFAAGVMNAVILTAVLSAGNSGMYASTRMLYNLATEGRAPRIFAQLTRNGVPLVALLATTAVGGLCFLTSLFESKSVYLWLLNLSGMTGFIAWLGIAVSHYRFRRGFMAQSLDLNRLPYRSPFFPYGPIFAFVLCMIVTLGQNYQAFSEGKIDWVAVTATYVGIPIFLLIWLGYRLVRKSRFVPYAEMKFPALPEIEKDDSPVTRPLAPASAE

SEQ ID NO: 4779 - protein, 204 aa, Agrobacterium tumefaciens str. C58 (Cereon)
MPEQVPIDETHRQAPINPYGRTKWVVEQALKDYSTYEGLRSVMLRYFNAAGADFEGRIGEWHKPETHAIPLAIEAALGRRQGFKVFGTDYDTRDGTCVRDYIHILDLADAHVRAVDYLLDGGETVELNLGTGTGTTVKELLAAISEVSGRPFPVEYTGRRDGDSTTLVANNDKAREVLGWEPRYSLSDIIKSAWAWHSSRNAGD

SEQ ID NO: 4780 - protein, 190 aa, Candida rugosa
SIQTGIARTGKMLCFEHSGIKPDVVLLGKAISGGVMPVSAVLSSKEIMLTLEPGSHGSTYGGNPLACAVAIAALEVVREEGLVERAEKLGATLRAELEKLKAESNGVISEVRGVGLLSAVVIDDTKTNGRSAWDLCLLMRDHGVLAKPTHDHIIRLAPPLVISEEDLLKGVESIRASLKDLPNAPKGNGH

SEQ ID NO: 4781 - protein, 197 aa, Rhynchoryza subulata
GQTPVFPRILGHEAGGIVESVGEGVTELAPGDHVLPVFTGECKECAHCKSEESNMCDLLRINVDRGVMIGDGQSRFTINGKPIFHFVGTSTFSEYTVIHVGCLAKINPEAPLDKVCVLSCGISTGLGATLNVAKPTKGSTVAIFGLGAVGLSAMEGARLSGASRIIGVDLNPAKYEQAKKFGCTDFVNPKDYNKPVQ

SEQ ID NO: 4782 - protein, 166 aa, Zea mays
GFFASLPSAPPLPSPTSPLLLAKYRRRPGPPMQHRGPPPMARLRPEPIDREKTCPLLLRVFTRVAGHHQNEEFAVRGKEPKDEVQIYTWKDATLRELTDLVKEVALPARKRNARLSFAFVYPDKNGRFVVRQVGSTFAYGHGRGDDAKTLAELGFQIGDYLSVAIM

SEQ ID NO: 4783 - protein, 55 aa, Oryza sativa
  unsure (1)..(55): unsure at all Xaa locations
MGYVGQHGVATLRRYKYSGVDHSLVAKYILQPFWSRFVNLFPLWFPXNISTXSFA

SEQ ID NO: 4784 - protein, 176 aa, Neisseria meningitidis Z2491
MNAIRTFQNRTPEIHESCMIDEACVVIGEVSLAEDVSVWPCAVLRGDVNSITVGARSNIQDGSVLHVSHKTAAKPEGSPLVIGEDVTVGHKVMLHGCRIGNRVLVGMGTTVLDDAVIEDEVMIGAGSLVPPRKRLAGGYLYVGSPVRQVRVLTDEEKAFLKYSAAHYVKLSKQYGM

SEQ ID NO: 4785 - protein, 394 aa, Ammophila arenaria
EPASTEDPAVSIAGAVQSQKLAVRAISRLQALPGGDVNLLCDTVVEHVRELTGYDRVMVYKFHDDEHGEVLAESRRADLEPYLGLHYPATDIPQASRFLFRQNRVRMIADCHAAPVRVIQDPAMPQPLCLVGSTLRSPHGCHAQYMANMGSIASLVMAVIISSGGEDEHSMGRGAVPSAMKLWGLVVCHHTSPRCIPFPLRYACEFLMQAFGLQLNMELQLAHQLSEKHILRTQTLLCDMLLRDSPTGIVTQSPSIMDLVKCDGAALYYHGKYYPLGITPTEAQIKDIIEWLTVCHGETTGLSTDSLADAGYPGATALGDAVCGVAVAYITPSDYLFWFRSHTAKEIKWGGAKHHPEDKDDGQRMHPRSSFKAFLEVVKSRSLPWENAEMDAIH

SEQ ID NO: 4786 - protein, 456 aa, Pseudomonas fluorescens PfO-1
MRRTLETVMSQPWSPDSWRALPIQQQPQYPDAAHLRQVEQTLASYPPLVFAGEARELRRQFAEVTQGRAFLLQGGDCAESFAEFSAAKIRDTFKVLLQMAIVMTFAAGCPVVKVGRMAGQFAKPRSANDETIDGVTLPAYRGDIVNGIGFDSASRVPDPERLLQSYHQSTATLNLLRAFAQGGFADLHQVHKWNLDFIANSALAEKYSHLADRIDETLAFMRACGMDSSPQLRETSFFTAHEALLLNYEEAFVRRDSLTNDYYDCSAHMLWIGDRTRQLDGAHVEFLRGVNNPIGVKVGPSMNPDDLIRLIDVLNPDNDPGRLNLIARMGANKVGVHLPALIRAVQREGKQVLWSSDPMHGNTIKASSGYKTRDFAQILGEVKQFFQVHEAEGSYAGGIHIEMTGQNVTECIGGARPITEDGLSDRYHTHCDPRMNADQSLELAFLIAETLKQVKR

SEQ ID NO: 4787 - protein, 351 aa, Triticum aestivum
MYSWEMLSFNIHDGFLEAIVRGNRSGLLTQADYNNLCQCETLDDIKMHLSATEYGPYLQNEPSPLHTTTIVEKCTLKLVDEYKHMLCQANEPLSTFLQYITYGHMIDNVVLIVTGTLHERDVNELLEKCHPLGMFDSIASLAVAQNMRELYRLVLVDTPLAPYFSECITSEDLDDMNIEIMRNTLYKAYLEDFYKFCAKLGGATAEIMCNLLSFEADRRAVNITINSIGTELTRDDRRKLYSNFGLLFPYGHEDLAVCEDVDQVRGVMEKYPPYQSIFAKISYGESQMLDKAFYEEEVKRLCLSFEQQFHYAVFFAYMRLREQEIRNLMWISECVAQNQKNRVHDSVVPIF

SEQ ID NO: 4788 - protein, 363 aa, Zea mays
MKPMATNGMAPSFYPANFLLQMQQALPHHYQQQEQHHEGHDDEDHEAAHHLLAPPPAALVSPFLHDFGGAMAAAPPPPMLAGGFGGKRMYPDVGGMAGDDSHHLHAEPQQQQEQQASDDEEEGSAAVGGGERKRRLSVDQVRTLERSFEVANKLEPERKAQLARALGLQPRQVAIWFQNRRARWKTKQLEKDYDALRRQLDAARAENDALLSHNKKLQAEIMALKGGGGGGGRQEAASELINLNVRETEASCSENNSSEINGLDVSRPDPAAGESPAMNSYRGGLPFYASAAARADIHHQLLHSGGQPSPAAAAPPKMELAPGSPPATAGGGGGTFGSLLCGAAVDEQPPFWSWADGHHTCFQ

SEQ ID NO: 4789 - protein, 744 aa, Geobacillus stearothermophilus
MENQNRQNAAQCPFHGSVTNQSSNRTTNKDWWPNQLNLSILHQHDRKTNPHDEEFNYAEEFQKLDYWALKEDLRKLMTESQDWWPADYGHYGPLFIRMAWHSAGTYRIGDGRGGASTGTQRFAPLNSWPDNANLDKARRLLWPIKKKYGNKISWADLFILAGNVAIESMGGKTIGFGGGRVDVWHPEEDVYWGSEKEWLASERYSGDRELENPLAAVQMGLIYVNPEGPDGKPDPKAAARDIRETFRRMGMNDEETVALIAGGHTFGKAHGAGPATHVGPEPEAAPIEAQGLGWISSYGKGKGSDTITSGIEGAWTPTPTQWDTSYFDMLFGYDWWLTKSPAGAWQWMAVDPDEKDLAPDAEDPSKKVPTMMMTTDLALRFDPEYEKIARRFHQNPEEFAEAFARAWFKLTHRDMGPKTRYLGPEVPKEDFIWQDPIPEVDYELTEAEIEEIKAKILNSGLTVSELVKTAWASASTFRNSDKRGGANGARIRLAPQKDWEVNEPERLAKVLSVYEDIQRELPKKVSIADLIVLGGSAAVEKAARDAGFDVKVPFFPGRGDATQEQTDVESFAVLEPFADGFRNYQKQEYSVPPEELLVDKAQLLGLTAPEMTVLVGGLRVLGANYRDLPHGVFTDRIGVLTNDFFVNLLDMNYEWVPTDSGIYEIRDRKTGEVRWTATRVDLIFGSNSILRSYAEFYAQDDNQEKFVRDFINAWVKVMNADRFDLVKKARESVTALQCVLATDL

SEQ ID NO: 4790 - protein, 176 aa, Bradyrhizobium japonicum USDA 110
MAIYELDGQAPDLPADGNYFIAETATVIGRVRLKPGASVWFGAVLRGDNEWIEIGEGANVQDGSTCHTDLGFPLVIGKNCTVGHNVILHGCTIEEGALIGMGSIVMNGAKIGRNSIVGAGSVITEGKEFPERSLIIGSPARVMRTLDDAQVQRMGSAAKFYVANGPRFTKGLKRIG

SEQ ID NO: 4791 - protein, 968 aa, Lycopersicon esculentum
MMMVTSKVFSSLQFFTVFYLFTVAFASTEEATALLKWKATFKNQNNSFLASWTTSSNACKDWYGVVCLNGRVNTLNITNASVIGTLYAFPFSSLPFLENLDLSNNNISGTIPPEIGNLTNLVYLDLNTNQISGTIPPQIGSLAKLQIIRIFNNHLNGFIPEEIGYLRSLTKLSLGINFLSGSIPASLGNMTNLSFLFLYENQLSGFIPEEIGYLRSLTKLSLDINFLSGSIPASLGNLNNLSFLYLYNNQLSGSIPEEIGYLRSLTKLSLGINFLSGSIPASLGNLNNLSRLDLYNNKLSGSIPEEIGYLRSLTYLDLGENALNGSIPSSLGNLNNLSRLDLYNNKLSGSIPEEIGYLRSLTYLDLGENALNGSIPASLGNLNNLFMLYLYNNQLSGSIPEEIGYLSSLTELYLGNNSLNGSIPASLGNLNNLFMLYLYNNQLSGSIPEEIGYLSSLTELFLGNNSLNGSIPASLGNLNNLSRLYLYNNQLSGSIPASFGNMRNLQTLFLSDNDLIGEIPSFVCNLTSLEVLYMSRNNLKGKVPQCLGNISDLHILSMSSNSFRGELPSSISNLTSLKILDFGRNNLEGAIPQFFGNISSLQVFDMQNNKLSGTLPTNFSIGCSLISLNLHGNELADEIPRSLDNCKKLQVLDLGDNQLNDTFPMWLGTLPELRVLRLTSNKLHGPIRSSGAEIMFPDLRIIDLSRNAFSQDLPTSLFEHLKGMRTVDKTMEEPSYESYYDDSVVVVTKGLELEIVRILSLYTIIDLSSNKFEGHIPSVLGDLIAIRVLNVSHNALQGYIPSSLGSLSILESLDLSFNQLSGEIPQQLASLTFLEVLNLSHNYLQGCIPQGPQFRTFESNSYEGNDGLRGYPVSKGCGKDPVSEKNYTVSALEDQESNSEFFNDFWKAALMGYGSGLCIGISIIYILISTGNLRWLARIIEELEHKIIVQRRKKQRGQRNYRRRNNRF

SEQ ID NO: 4792 - protein, 311 aa, Glycine max
MSEPPKTRAVICVGDIHGFITKLQSLWKNLEGSLDRSEFETATLIFLGDYCDRGPATRQVIDFLISLPSRYPRQKHVFLCGNHDLAFAAFLRLLPAPADGCGFSEGWREYEASEEREGWFKGEGYEDMHLQGRRWSGKIKVKFNTVKGTEYQGSIYDAGPTFESYGVPHGSADLVKAVPDDHKKFFADLVWVHEEDDVFVNTDDGVKCCKLIAVHAGLEKGKDVKEQLKLLKARDTRVPKVEALSGRKSVWDIPEELTASPAIVVSGHHAKLHVEGLRLIIDEGGGYKDRPVAAIILPSMKIIRDTDELAK

SEQ ID NO: 4793 - protein, 166 aa, Pyrococcus furiosus DSM 3638
MKILFLSANEFEDVELIYPYHRLKEEGHEVYIASFEKGVITGKHGYSVKVDLTFDEVNPDEFDALVLPGGRAPERVRLNEKAVEIARKMFTEGKPVATICHGPQILISAGVLKGRKGTSYIGIRDDMINAGVEWIDREVVVDGNWVSSRHPGDLYAWMREFVKLLK

SEQ ID NO: 4794 - protein, 199 aa, Chlamydomonas reinhardtii
HMAKATTIKDAIRIFEERKSVVATEAEKVELHGMIPPIEKMDATLSTLKACKHLALSTNNIEKISSLSGMENLRILSLGRNLIKKIENLDAVADTLEELWISYNQIASLSGIEKLVNLRVLYMSNNKITNWGEIDKLAALDKLEDLLLAGNPLYNDYKENNATSEYRIEVVKRLPNLKKLDGMPVDVDEREQANVARGG

SEQ ID NO: 4795 - protein, 279 aa, Oryza sativa
SCFSIVNYRCGITPNTVGNEMIAKLCIIPVLCILEILFDKVRYSRNTKLSIVLVLVGVAVCTVTDVSVNSKGLLAAVIAVWSTALQQHYVHHLQKKYSLGSFNLLGHTAPAQAASLLILGPFVDFWLTNRRVDTFNYTTIVTFFIVLSCTIAVGTNLSQFICIGRFTAVSFQVLGHMKTILVLTLGFLFFGKEGLNFHVVLGMMLAVIGMIWYGNASSKPGGKERQIYSVPSEKTQKSSQSELDQKPYAAMDCIQVIADIKPHTTLLTGQYVNNTTQQH

SEQ ID NO: 4796 - protein, 427 aa, Coxiella burnetii
MTELTGVSIVTYQHIKVPSEGEKITVNKAVLEAPDRPIIPFIEGDGIGIDITPVMKNVVDAAVEKSYAGKRKIEWMEIYAGEKATKVYGKDNWLPDETLEAIKEYQVAIKGPLTTPVGGGIRSLNVALRQQLDLYVCLRPVRYFTGVPSPVKTPEKVNMVIFRENSEDIYAGIEWPAGSPEAVKLINFLQNEMGVKKIRFPETAGIGIKPVSKEGTSRLVRRAIQYAIDNDRDSVTLVHKGNIMKFTEGAFKDWGYEVAVKEFGAKPLDGGPWHVFENPKTGQKITIKDVIADAFLQQILLRPAEYSVIATLNLNGDYISDALAAEVGGIGIAPGANLSDTVGLFEATHGTAPKYAGQDKVNPGSLILSAEMMLRYLGWKEAADLVVQGIEGAIESKTVTYDFARLMTGAKEVSASQFAKAIIKHIL

SEQ ID NO: 4797 - protein, 471 aa, Pseudomonas aeruginosa PAO1
MSSVGEQKVQDGSLKRELGERHIRLMALGACIGVGLFLGSAKAIQMAGPAIMISYILGGLAILVIMRALGEMAVHNPVAGSFSQYAKDYLGPLAGFITGWNYWFLWLVTCVAEITAVAVYMGIWFPDVPRWIWALAALASMGTINLIAVRAFGEFEFWFALIKIVTILAMVVVGIGMIAFGFGNDGIATGISNLWAHGGFMPNGIQGVLMSLQMVMFAYLGVEMIGLTAGEARNPTKTIPSAINSVFWRILLFYVGSLFVIMSLYPWNEIGTQGSPFVMTFERMGIKTAAGIINFVVITAALSSCNGGIFSTGRMLYSLAQHRQAPAFFGKASRSGVPRRALILSILALLLGVLLNYLVPEKVFVWVTSIATFGAIWTWAMILLAQLRFRKTLSPAECDKLQYRMWLYPVSSYLALAFLVMVVVLMAFFEDTRIALYIGPPFILLLTVLYYAFNLAPKEPAGTGSVSRAAS

SEQ ID NO: 4798 - protein, 244 aa, Vibrio cholerae
MNLEGKVALVTGASRGIGKAIAELLAERGAKVIGTATSESGAQAISDYLGDNGKGMALNVTNPESIEAVLKAITDEFGGVDILVNNAGITRDNLLMRMKEEEWSDIMETNLTSIFRLSKAVLRGMMKKRQGRIINVGSVVGTMGNAGQANYAAAKAGVIGFTKSMAREVASRGVTVNTVAPGFIETDMTKALNDEQRTATLAQVPAGRLGDPREIASAVAFLASPEAAYITGETLHVNGGMYMI

SEQ ID NO: 4799 - protein, 225 aa, Vibrio vulnificus CMCP6
MWLLVTIAVFLFARWLAIKINNPLANPLLISIAILIPMLTVLKIPFETYYADNQWISYMLQPAVVALAYPLYEQLPQIKANWRIIALACTLGSVMSMLTAMLIAVAFKADISLIASLLGKSVTTPIAMEISSHLGGEAAVAAILVLLVGLFGAILAYPIYNLLGIKHPIARGLTMGTVSHALGTATCVEKAPGDAAFSSLALVLCGIITSILAPSFFALAVWLYG

SEQ ID NO: 4800 - protein, 320 aa, Oenococcus oeni MCW
MKQIELGQSGLNASQIALGVMRIDRKNAQEAAKTVSTAFDAGINYYDTADIYGAGKSSTIFGQALKDAGIDRNKIYIQTKIGIILKNGQINGDGLTGLRYDFSREHLLSAVDIELQRLQTDHIDFLLLHRPDTLMEPEEIADAFSQLEASGKVLHFGVSNFTPYDIELVQQAVSQRLEVNQLQFALTHANMISENIQMNIDGSPDSDTHVRTFDILTYMRLHKMTIQAWSPFQYGMFAGVFIDNPKFKELNDQLQTLADKYHSNKSAVAVAWILKHPANIQTILGSTSPEHIKQMTEVDDVHLSNQEWYDLYQAAGYKIP

SEQ ID NO: 4801 - protein, 134 aa, Phyllostachys acuta
KKHVMSERRRREKLNEMFLILKSLVPSIHKVDKASILAETIAYLKELEQRVEELESNREPSRPSETRGRRRHEIAGISGAKRKASSEPGGRDVERERLWALSMDGPSNVNVTVMDKEVLLEVQCGWKEMLMTRV

SEQ ID NO: 4802 - protein, 411 aa, Xylella fastidiosa 9a5c
MSAVSESVLSLSRYYLPVYRPCQVVLVRGQGSRVWDEQGRDYLDLAAGIAVCCLGHCDPDLVAALVEQAGRLWHTSNVFYSEPSLRLAQELVDVSRFAERVFLCSSGTEANEAAIKLVRKWAAAQGRLPEHRTIVTFHGSFHGRTLAAVTATAQPKYQEGYEPLPGGFRYVDFNHIEALEAAMVGGDVAAVMLEPIQGEGGVMPVVSGYLAQVRALCDRYGALLVLDEIQCGMGRTGTLFAYWQEEVVPDIVTLAKGLGGGFPIGAMLAGPKVAEVMQFGAHGTTFGGNPMAAAVARVALRKLASVEIAANVQRQSVALRAGLEEISEAFGGVFTQVRGRGLMLGAVLAPLYAGQASAILEVAVEHGVLLLQAGPDVLRFVPALNVSDEELADGLVRLRAALGDYVSRFGG

SEQ ID NO: 4803 - protein, 140 aa, Oryza sativa
  unsure (1)..(140): unsure at all Xaa locations
XPGCRNSARERMDAQNETPKDMYVKGGSSDEHEFYIKRDLALTSQTIKAMLSGPGQYAENETNVIHFRSISSQTLACICSYFAYKSRYSNSTIEIPDFPIPPDQALELXMAANFLDCKHSGFFSFLNRDRQWSNLKLYDK

SEQ ID NO: 4804 - protein, 378 aa, Zea mays
MLSLARHHSRQAMAGTVTVPGSSKPSTPLLKDELDIVIPTIRNLDFLEMWRPFFQPYHLIIVQDGDPTKTIKVPEGFDYELYNRNDINRILGPKASCISFKDSACRCFGYMVSKKKYIYTIDDDKKCFVAKDPSGKDINALEQHIKNLLSPSTPFFFNTLYDPYREGADFVRGYPFSLREGAHTAVSHGLWLNIPDYDAPTQLVKPKERNERYVDAVMTIPKGTLFPMCGMNLAFDRDLIGPAMYFGLMGDGQPIGRYDDMWAGWCVKVICDHLSLGVKTGLPYIWHSKASNPFVNLKKEYKGIFWQEDIIPFFQNVTIPKDCDTVQKCYIYLSGQVKEKLGKIDPYFAKLGDAMVTWIEAWDELNPAGPAAGKDKAK

SEQ ID NO: 4805 - protein, 206 aa, Solanum tuberosum
  unsure (1)..(206): unsure at all Xaa locations
MNRLFGSKPTGPKPTLNGAITNLDTRIASLDTKVKALNGELAAYQEKLSRMREGPGKQAIKQKALKVLQRRKAYEGEKENLESQVWNMEQAQNMQDNLKNVMTQVDAMKTTNKELRKQYGKIDIDKIERLQDEMADLMDVGXEIQDSLARSYDIPDEVDESELDAELEALGMEVELEQEMGGAVPGFLXDEVVPEFVDEPPXTEXR

SEQ ID NO: 4806 - protein, 81 aa, Zea mays
  unsure (1)..(81): unsure at all Xaa locations
AKMEVSTNHXLTPIKQDTNGVVLPYYGYSINWNYGILPYTWEDPTSANSEVEGASGDNDPVDVNAIGVRTANTQHRLMTLT

SEQ ID NO: 4807 - protein, 319 aa, Streptomyces antibioticus
MRVAVTGGAGFIGSNFVRDLVGERFAALDVQHVVVLDNLTYAGTLDNLTGVLDDVEFHRTDICDTQAVTRQIVGCDAVVHFAAESHVDRSISSGLPFMRSNVLGTQSVLEAAAAAGAARFVHISTDEVYGSIPVGATGEDAPLAPNSPYAASKAGSDLVALAFARTHGLPVTVTRCSNNYGPYQNPEKAIPHFVTTLLRGGDIPLYGAGTNVRDWLHVGDHGKAVALLLAGTPKEQVYNIGGGHQITNLQLAHIILDELGLDADRVSFVPDRKAHDARYCVDDSRLREEFGYRPERDFAEAIRETISWYSDNRSWWTHD

SEQ ID NO: 4808 - protein, 391 aa, Saururus cernuus
DLEPVNPSDVPVTAAGALKSYKLAAKAISRLQSLPSGNISLLCDVLVREVSDLTGYDRVMAYKFHEDEHGEVVSECKRADLEPYLGLHYPATDIPQASRFLFMKNKVRMICDCLAQPVKVIQDKRLAQPLSLAGSTLRAPHGCHAQYMANMGSIASLVMSVMVSEGDDDSNEEKTGRKLWGLVVCHHTSPRFIPFPLRYACEFLIQVFAIQLSKEVELAAQMREKHILRMQTVLCDMLLRDAPMGIMTQSPNVMDLVKCDGAALYYRYQCCLLGTTPTENQIRDITEWLLQYHNSSTGLSTDSLVEAGYPGAHELSDAVCGMAAIRITSKDFLFWFRSHTAKEIKWGGEKHDPLDKDAFESKMNPRTSFKTFLEVVKRRSLPWEDVEMDAI

SEQ ID NO: 4809 - protein, 320 aa, Ralstonia solanacearum
MPTPILAIHGGAGTITRAAMDADKEAAYRQALDGILLAGQRILAGGGSALDAVTEAVRLLEACPLFNAGKGSVLTRAGTYELDASIMDGTTLAAGAVTCVKRLRHPVLAARAVMEHSEHVLFTSEGAEAFAASQGLEFVEPDYYYTEARYAQWQRARQHAGMALLDHDAASLLAQAPEPIDPDSKFGTVGAVACDAQGRLAAATSTGGVTNKQVGRVGDTPLIGAGCYANRAAAVSCTGTGEMFIRAVAAYDVAAQMEYAGKPLAEACDDVVMRKLVAIGGRGGLIAVDAHSNVALPFNTEGMYRGFARGDAAPEVSIYR

SEQ ID NO: 4810 - protein, 380 aa, Phaseolus acutifolius
MSSTAGQVIKCKAAVAWEAGKPLVMEEVEVAPPKAGEVRLKILYTSLCHTDVYFWEAKGQTPLFPRIFGHEAGGIVESVGEGVTHLKPGDHALPVFTGECGECAHCKSEESNMCDLLRINTDRGVMIHDSQTRFSIKGQPIYHFVGTSTFSEYTVVHAGCVAKVNPAAPLDKICVLSCGICTGLGATVNVAKPKPGSSVAIFGLGAVGLAAAEGARISGASRIIGVDLVSSRFEEAKKFGVNEFVNPKDHDKPVQEVIAEMTNGGVDRAVECTGSIQAMISAFECVHDGWGVAVLVGVPNKDDAFKTHPVNFLNERTLKGTFYGNYKPRTDLPLVVEQYMNGELELDKFITHTVPFSEINKAFDYMLKGESIRCIIRMGE

SEQ ID NO: 4811 - protein, 71 aa, Malus x domestica
MDPSAMNNPELLNFINQEKERAMVNEMVGKLTNVCWDKCITGTPGSKFSSSESACLANCARRYLDMSMIIM

SEQ ID NO: 4812 - protein, 211 aa, Glycine max
MGNRAMLTLLLFFFSTKLFPSALAIWLSLPTTGTKCVSEEIQHNIVVLADYVVIPSDHTHNPTIAVKVTSPYGNNLHHKENTTHGSIAFTTQEAGNYLACFWVDSPSQGVGEVNVNLDWKIGIAAKDWDSVARKEKIEGVELELRKLEGAVEAIHENLLYLKGREAEMRIVSEKTNGRVAWFSIMSLAMCIAVSGLQLWYLKRYFQKKKLI

SEQ ID NO: 4813 - protein, 496 aa, Neurospora crassa
MSGLATKQQSLKLFEKLKAKPANKICFDCGQKNPTWTSVPFGIYLCLDCSANHRNLGVHISFVRSTNLDQWQWDQLRIMKVGGNESATKFFQQNGGSAALNSKDPKTKYQSAAATKYKEELKKRAARDAREYPEEVVITDGDDATSSNTPAGEPDDDFFSSWDKPAIKKPTPPISRTSTPPVIGRTASPLLGNGKDIQRTSSPLSKTDSDAPTPAPAASRITTSAALRKTTPGSSTTGGPRKVGGGILGAKKPAAKLGVKKISADLIDFDEAEKKAKEEAERIEKLGYDPEAEEEKAAKKAETKTNNIITPAAAPVSSSSSRSAAQEKSAAEVERLGMGVRKLGFGMVGKPGGAGAAAGAGGAAAAKKNAGGFGSVGPIKASEADEEQYARNKFANQKAISSDEFFNKGNYDPSVKAETKARLQGFEGAQAISSNAYFGRPEDDAPAEDYGDLESAAKDFIRKFGITASDDLENLTQMVGEGAGRLQGAIRAYLGS

SEQ ID NO: 4814 - protein, 743 aa, Listeria monocytogenes
KTVLGKTNVTDTVSQTDLDQVTTLQADRLGIKSIDGLEYLNNLTQINFSNNQLTDITPLKDLTKLVDILMNNNQIADITPLANLTNLTGLTLFNNQITDIDPLKNLTNLNRLELSSNTISDISALSGLTNLQQLSFGNQVTDLKPLANLTTLERLDISSNKVSDISVLAKLTNLESLIATNNQISDITPLGILTNLDELSLNGNQLKDIGTLASLTNLTDLDLANNQISNLAPLSGLTKLTELKLGANQISNISPLAGLTALTNLELNENQLEDISPISNLKNLTYLTLYFNNISDISPVSSLTKLQRLFFYNNKVSDVSSLANLTNINWLSAGHNQISDLTPLANLTRITQLGLNDQAWTNAPVNYKANVSIPNTVKNVTGALIAPATISDGGSYAEPDITWNLPSYTNEVSYTFSQPVTIGKGTTTFSGTVTQPLKAIFNAKFHVDGKETTKEVEAGNLLTEPAKPVKEGHTFVGWFDAQTGGTKWNFSTDKMPTNDINLYAQFSINSYTATFENDGVTTSQTVDYQGLLQEPTPPTKEGYTFKGWYDAKTGGDKWDFATSKMPAKNITLYAQYSANSYTATFDVDGKSTTQAVDYQGLLKEPKAPTKAGYTFKGWYDEKTDGKKWDFATDKMPANDITLYAQFTKNPVAPPTTGGNTPPTTNNGGNTTPPSANIPGSDTSNTSTGNSASTTSTMNAYDPYNSKEASLPTTGDSDNALYLLLGLLAVGTAMALTKKARASK

SEQ ID NO: 4815 - protein, 524 aa, Oryza sativa (japonica cultivar-group)
MGVVEAEALHGAVEALAGSLQPHVATAFFVFSACTVALAALLAVVRLRPPWWCDCTVCEAFLTASWAGEFDNLCDWYAHLLRTSPAQTVHVHVLRNVLTANPVTVDHVLRARFDNYPKGAPFSAILADFLGRGIFNVDGDAWLFQRKLAAAELASPALRAFAARVVASELRCRLIPLLHSASREGNGKVLDLQDMFRRFAFDSICKISFGLDPGCLELSMPVSTLVEAFDTASTLSARRATVPMQIIWRLKRFLNVGDERKLRDAVRLVDALAAEVIRQRRKLGGAATGSDLLSRFMGSIDDDKYLRDIVVSFMLAGRDTIASALTAFFLLLSDHPEVATAIRDEVARVTGDGNRTMAATFDKLKDMHYVHAAMYESMRLFPPVQFDSKFAAGDDTLPDGTVVAKGTRVTYHAYAMGRMESVWGPDCAEFRPERWLRDGRFVPESPYRYPVFQAGVRVCIGKELALMEMKAVIVAVVRSFDIEAIARSSRRPKFAPGLTATFAGGLPVRVRRRRARASGHNPPI

SEQ ID NO: 4816 - protein, 201 aa, Glycine max
PDWYVIWNHQLWKVLRISCRFYYLVASSACFVHIMKIQVLAEREQKIQTEVQEIRKVFYCDLCNKQYKLAMEFEAHLSSYDHNHRKRFKQMKEMHGGSSRDDRQKREQLRQEREMAKFAQIADAQKQQQLQLQQESGSATVPSESKTATALTDQEQRNTLKFGFSSKGSASKITFGAKKQNVAKKQNVPISSIFSNDSDEE

SEQ ID NO: 4817 - protein, 211 aa, Gossypium robinsonii
AKGQTPLFPRIFGHEAGGIVESVGEGVAHLKPGDHVLPVFTGECGNCRHCKSKESNMCDLLRINTDRGVMLSDGKTRFSINGKPIYHFVGTSTFSEYTVAHVGSVAKINPAAPLDKVCILSCGISTGLGATLNVAKPTKGSTVAIFGLGAVGLAAAEGARIAGASRIIGVDLNPNRFEEAKKFGCTEFVNPKDHNKPVQKVLAEMTNGGVD

SEQ ID NO: 4818 - protein, 326 aa, Leuconostoc mesenteroides subsp. mesenteroides ATCC 8293
MAVKSYIDAIREAMDLALEKDDDVIIFGEDVGKNGGVFRATDGLQAKYGEDRVFNTPLAESGIGGMAIGLTTQDYRPIMEIQFFGFVFEVMDSIAGQMARNRFRFNGTRNMPIVVRSPYGGGTKTPEMHADNLEGMVAQIPGIRVVMPANPADAKGLLLSSIASNDPVVFLENLHLYRSLKGEVPEGYYTTPLDKAAIAREGDDVSIISYGGGVPVALKAAEELSKNGISAEVLDLRTVSPLDIQSIGETVAKTGRVVVVQEAQRMAGIGAAIMSEISERFILSLKAPIGRVAAPDSVYPFGQAENDWMIKSDDVVAKVVEVVNYD

SEQ ID NO: 4819 - protein, 157 aa, Oryza sativa
  unsure (1)..(157): unsure at all Xaa locations
XRLRKEREEKRAERDRFHRRAEAQAAYDKAKRKEQXXSSRSSGGASPRGGFPGGMPGGGFPGGMPGGGFPGGMPGGGFPGGMPGGFPGGAMPGGVPGNVDMSKILNDPDLMAAFGDPEVMAALQDVMNNPASFARHQANPKVGPIIAKMMAKFNGSQ

SEQ ID NO: 4820 - protein, 379 aa, Oryza sativa (indica cultivar-group)
MQLVSIPEQRERPIKVIKPTASADPARLLQLARPHPSFTLHRTAPHRALATTARRAPDAPGRRSRVAPRRAPTAPGHVLPGTLFLAVGAWHVWAAAARFAADPRGFRLRAWNPVDVGGGGAPAWLPAHLELYVIAGGAFLHMCVEVLYSTHLHIFADGGINPAHLNDLEHGGMLLMFFLFGILALLSQKTRYLPLPEGALCLVASTAFMAELLLFYFHSTTHQGLEGYYHYLLVVVVALCVATTVLGALLPASFPVDIASGAAIALQGLWFYQTAFTLYGPSLPAGCRRDADGHIDCHTHAAQERAEQLANFQLFGLVFLVCAYALGCFAVAAARHGHPDLATMHAKHVAAMEAQLAGAGAGEGDRFVGSALPLEDTAI

SEQ ID NO: 4821 - protein, 355 aa, Spirulina platensis
MTQNYRITLLSGDGIGPEIMAVAVDVLKAVGKQLDLNFEFKEALMGGVAIDATGEPLPEESLQACRDSDAVLLAAIGGYKWDNLPRPERPETGLLALRAGLGLFANRARLLFCPHVLDASSLKREVVEGVDIMVVRELTGGIYFGQPKGIFETETGKNEGSNTMAYGESEIDRIGRVGFETAKKRQGRLCSVDKANVLDVSQLWRDRIMALAADYPEVELSHLYVDNAAMQLVRWPKQFDTIVTGNLFGDILSDAAAMLTGSIGMLPSASLGASGPGVFEPVHGSAPDIAGQDKANPLAQVLSAAMMLRYGLDEPAASDPVEKAVLKVLDWGYPTGDIMSEGMKAVGCRKWGICY

SEQ ID NO: 4822 - protein, 950 aa, Bacteroides thetaiotaomicron VPI-5482
MKWILAVGLLSCSVAMAQQQSDILSVSASANAENAALAFDRNVKTMWTIPSQALKAEQWLMFTIQQPGDVCELDLQMQGINKNELKEVLDIFVTYDPMNLGTPVNYRIEGSDKQMKVKFTPKYGAHVKLNFKSGKLDKPFSLKEISVLVAEKVLTDSQGKVTDRRYMDASLPVEERVESLLAVMTPEDKMELIREGWGIPGIPHLYVPPITKVEAVHGFSYGSGATIFPQALAMGATWNRKLTEEVAMVIGDETVAANTKQAWSPVLDVAQDARWGRCEETFGEDPVLVSQIGGAWIKGYQSRGLFTTPKHFGGHGAPLGGRDSHDIGLSEREMREIHLVPFRHAIRNYDCQSLMMAYSDYMGVPVAKSKELLQQILRQEWGFNGFIVSDCGAIGNLTARKHYTAKDKIEAANQALAAGIATNCGDTYNNKEVIQAAKDGRINMEDLDNVCRTMLGTMFRNELFEKNPCKPLDWKKIYPGWNSDSHKEMARQAARESIVMLENKDNLLPLSKTLRTIAVLGPGADDLQPGDYTPKLLPGQLKSVLTGIKGAVGKQTKVLYEQGCDFTNPDETNIPKAVKAASQSDVVIMVLGDCSTSEATNDVRKTCGENNDWATLILPGKQQELLEAVCATGKPVILILQAGRPYDILKASEMCKAILVNWLPGQEGGPAMADVLFGDYNPAGRLPMTFPRHVGQLPLYYNFKTSGRRYEYVDMEYYPLYRFGFGLSYTSFEYSNLKIQEKANGNVEVQATVKNVGSRAGDEVAQLYVTDMYASVKTRVMELKDFARIHLQPGESKTVSFEMTPYDISLLNDRMDRVVEKGEFKIMVGGMSPDYVAKNEIKHSVGYSDNKKGVTGMLNYTHEFGANFDLAVSKVEENLVKNQKTVWVSVKNTGTLMDIGKVEMFVDGKKVGDAVHYELGAGEEKLIPFKLAKENKQPVAFTTKYKMVSM

SEQ ID NO: 4823 - protein, 175 aa, Mesorhizobium loti
MPLYAIDGAEPSFADAGSNWIAPDATLIGDIRVGRNAGFWFGVVIRGDNEPIIVGADTNVQEHTVMHTDPGFPLTIGEGCTIGHRAMLHGCTIGDNSLIGMGAIVLNGARIGKNSLVGAGALVTEGKEFPDNSLIVGSPAKAIRVLDDAAVERLRGSAAHYVANGKRFKAGLKKV

SEQ ID NO: 4824 - protein, 338 aa, Streptococcus mutans UA159
MTKILVTGGAGYLGSHTCVELLNQDYRLVVVDNLLHSSFKSLTAIKEITGKDFTFYQADIRDKKSLEAIFEKEAITAVIHFAGLKIVNESTSIPLDYYANNFSGTITLLQVMQQFSCKNFIFSSSASVYGNKAPAPVSEEAPRSVMTPYGRTKMMIEDVLMDVSVSDSAWNIVILRYFNPIGAHSSGELGEDPQGLPTNLLPYISQVALGKLDRVRVFGGDYDTKDGTGIRDYIHVVDLARGHVAALQKLVAGSGLSIYNLGTGKGTSVLELIQEMGEIVGHPIPYKIVGRRAGDIAVSYADVSKAEKELNWHARYDLKRMCQDSWRWQKKYPNGFRE

SEQ ID NO: 4825 - protein, 250 aa, Fragaria x ananassa
MGKCYPTVSEEYKKAIDKAKRKLRGLIAEKNCAPLMLRLAWHSAGTYDVKTKTGGPFGTMKQSAELAHGANNGLDIAVRLLEPIKEQFPILSYADFYQLAGVVAVEVTGGPDVPFHPGREDKPEPPPEGRLPDAGKGSDHLREVFGKTMGLSDQDIVALSGGHTLGRAHKERSGFEGPWTPNPLIFDNSYFTVLLSGEKEGLLQLPTDKALLSDPVFRPLVEKYAADEDAFFADYALAHQRLSELGFAEA

SEQ ID NO: 4826 - protein, 341 aa, Yersinia pestis CO92
MKALSKLKAEEGIWMTDVPQPELGHNDIMIKIRKTAICGTDVHIYNWDEWSQKTIPVPMVVGHEYVGEVVAIGQEVKGFNIGDRVSGEGHITCGHCRNCRGGRTHLCRNTVGVGVNRPGSFAEYLVIPAFNAFKIPDNISDELAAIFDPFGNAVHTALSFDLVGEDVLVSGAGPIGIMAAAVCKHVGARHVVIADVNEYRLDLARKMGVTRAVNVSKENLNDVMTELGMTEGFDVGLEMSGAPPAFRSLLNSMNHGGRIAMLGIPPSDMSIDWNQVIFKGLFIKGIYGREMFETWYKMAALIQSGLDLTPIITHRFPIDEFQQGFDAMRSGKSGKVVLSWD

SEQ ID NO: 4827 - protein, 739 aa, Gluconacetobacter xylinus
MMMSRKLMLLSAVAFGGIVALSPGAQAREGQDAPATTADSRARDLLSHMTLQDKLSMVFTIDGGGTMGNAPIPPGGLGSAAYLKTPAGLPPLQISDAGLGLRNPSHVRPHGQAVGLPSGLATASTWDPDMARQGGAMIGAEAWRQGFNVLLAGGADLTRDPRGGRNFEYAGEDPLLTGRVVGATIAGIQSQHVISTLKHFAMNDLETSRMTMSADIDTAAMRESDLLGFEIAMEVGHPGSVMCSYNRVNDIYACENPYLLTKVLKQDWKYPGFVMSDWGATHSSARSALAGLDQESSGDDADARPFFREILARDVREGRVPTSRVDDMAQRIVRSMYDVGLVDHPPVMQPLDVVTDILTAQRDEEEGAVLLKNSGNLLPLSPTAHVAVIGGHADVGVISGGGSSQVDPIGAPAIGVVKGPGKKDWPGDPVYFPSSPYRMMQAEAPSARLTYTSGADIARAADAARRADVAVVFVTQFSYEGMDTANAMTLDGNQDALVAAVARANPRTVVVMETGNPVMMPWLDNVGAVMEAWYPGSGGGAAIARLLYGKVAPSGRLPMTFPASPVQLAHPDIAGVTANSVFEMQFHTDQELVYDEGSEVGYRWFDHTHATPLFAFGHGLTYTTFAHDGLRVAHHGDDVVATFTVRNMGTRVGVDVPQLYVRLPDGGGRRLAGWQRVTLAPGESRELSVVLEPRVLAHFDEKHDRWNVPSGEYRIWLGSSAVDESQQVTFHLAGRNMAP

SEQ ID NO: 4828 - protein, 342 aa, Parthenium argentatum
MSSDLKSRFLQVYDTLKSELINDPAFEFDDDSRQWVEKMLDYNVPGGKLNRGLSVIDSYQLLKGGELTDNEIFLAAALGWCIEWLQAYFLVLDDIMDESHTRRGQPCWFRLPKVGMIAANDGIILRNNVPRILKKHFRGKPYYVDLLDLFNEVEFQTASGQMIDLITTLVGEKDLSKYSLSIHRRIVQYKTAYYSFYLPVACALLMFGEDLEKHEEVKNVLVEMGTYFQVQDDYLDCFGAPEVIGKIGTDIEDFKCSWLVVKALELSNEEQKKILHENYGKKDPSSVAKVKELYHTLNLQGVFEDYENTSYKKLITSIEGHPSKAVQAVLKSFLGKIYKRQK

SEQ ID NO: 4829 - protein, 350 aa, Bacillus cereus ATCC 14579
MKALLWHNQRDVRVEEVPEPTVKPGTVKIKVKWCGICGTDLHEYLAGPIFIPTEEHPLTHVKAPVILGHEFSGEVIEIGEGVTSHKVGDRVVVEPIYSCGKCEACKHGHYNVCEQLVFHGLGGEGGGFSEYTVVPEDMVHHIPDEMTYEQGALVEPAAVAVHAVRQSKLKEGEAVAVFGCGPIGLLVIQAAKAAGATPVIAVELSKERQELAKLAGADYVLNPATQDVLAEIRNLTNGLGVNVSFEVTGVEVVLRQAIESTSFEGQTVIVSVWEKDATITPNNLVLKEKEVIGILGYRHIFPAVIKLISSGQIQAEKLITKKITVDQVVEEGFEALVKDKTQVKILVSPK

SEQ ID NO: 4830 - protein, 327 aa, Streptococcus mutans UA159
MRNKQTLESILKINYPILQGAMANISDSSLVSAVSEAGGLGILASGNMKPEEVREEIRKTKSKTSYPFGVNIIISNKFCDQIIDVLHEEKVDIVITGNGDPGKFFPKFNAWNMKVIPVVSSYMMAKRMEKLGAIAVIAEGMEAGGHIGSITTMCLLPNITKDISIPVIAAGGIASGYSMMAAFNLGAQGVQIGTRFLLAKECNIHTNYKKRVIDSNDFDSVVIKNMINKPIRSLRNKLTNLIGRLELEYLKNRSTSIEDIDLKTINALSNAVKNGDVQNGLVMAGQISAVLTKEETCKEIMCSILNEWNSCTEKTYSKYDLPQVGNT

SEQ ID NO: 4831 - protein, 431 aa, Pyrobaculum aerophilum str. IM2
MANELSRQWLRRRLGVFDIYALVHSDIQSTYYFLVGFIALAAGQWGFVGALYGVLLMAAIALTYGEMGSRFPETGGSYLYVKYAFGSKIAFLSAWILAFDQIIMVAYGTIDASKILAKLFPALGAWEVIVAIALSTALFLLTTLGIRESANLAKFVAILDMVIIPSLILLSLFYYPATPPFFNWSNVEGVSLLFAFSLLSRGFTGIDAIGQLAGEAREPLVQVPRATLLVVAMGTFYGIGLMAAVMSALTPEEIGDPAVAPLYLAEKIHPLFLYLVAFDIFTVMMVAALAGYISFSRMTYILADEKLLPAFFHRLHKKFRTPYISLAITYVVSLLLISAGGVETILAIYAIGSLINYIMIAIALAKASRSGTLHSAFKTPLIAGIPLSAWIALALLPVGLGLTLIEKYPYLWMWILWIAAGALFYYIKRHA

SEQ ID NO: 4832 - protein, 152 aa, Zea mays
MVKAVAVLGSSEGVKGTIFFTQEGDGPTTVTGSVSGLKPGLHGFHVHALGDTTNGCMSTGPHYNPASKEHGAPEDENRHAGDLGNVTAGADGVANINVTDSQIPLTGPNSIIGRAVVVHADPDDLGKGGHELSKSTGNAGGRVACGIIGLQG

SEQ ID NO: 4833 - protein, 146 aa, Zea mays
  unsure (1)..(146): unsure at all Xaa locations
MAAAENGGGGESKAAFARIYDALKAELLRDPAFEYTESSHEWIDRMLDYNVLGGKCNRGLSVVDSYKLLKGVDVLSEEEMFLASTLGWCIEWLQAFFLVLDDIMDDTHTRRGQPCWFRVSRVGLIAVXDGILLRNHISRMLRLHFK

SEQ ID NO: 4834 - protein, 852 aa, Zea mays
TRPGKSKGLMDINESLRVLAKLREASWTPPESVHHARLSYDAPRFSYDGKEATSKLREVPRLSLDIKEGHLWNREIDSRLDPSLSSADRNSNTVTGSNAAFETQQEQPACKRLPSVVAKLMGLEELPEHNQSTASSHACNTVQENKQDAMLNSLSISYQYEHAPQQGGHPGPAGRNLPNSKFPVQTAPWKQQERIVLPRKLPKGSKGAHGREPAAPWNQLKDLDFQQPNKDLRALKQILDSAKGLLENKKREEAFMPKLYNGNHDDQEMASANMRLNRNTNNMWMPEESNAESSFKSPIVIMKPSKSANLYSKVDSSVFPLGGSSDLPQPQTSNSTDRRKASTINRTAKGQYAKLSPRVPTSQPLVSCDRRSYGRNDDSSNNQKSSSLLVTESSTRRQQLPRNSSVSMQKNKNSTSPKLLQRKLDPERRARPPIPSAESNKSERQSGDRNNSETVSPRSKFRRKLVRPQGDDGMPIGLNNRTRSLYQHDNDMSIRSDGSISVASELDIISNDRSTGVNISNFEQGIGTPSGRNPQKVKTSYDANMDVPSVDPSAAISERPSPVSVLDSSFDQEDLFPTSRTPNSLAVDDERETLEEPWKPSVAIQSKNNKLANVASLLEKLQQLSVNKDEDAPPVDHIAFLCETESPDHRYVSEILLASGLLMKDLGSGQTGLQLHSSGRAINPDLFHVLEQRKAGWASIPDGIHQSSRSGAKSDPKRAHRKLVFDTANELLLQKFEKETTVYAVSSSTGAKDHPPAKALSGQQLLKFVSSEIEGMGTERSSTCQMEGGVIPDAEILQRLQGWTSFSRELPGMVLEIERSVFKELVDEVVHGESADGPEMKAAGRRRRRLFA

SEQ ID NO: 4835 - protein, 186 aa, Zea mays
  unsure (1)..(186): unsure at all Xaa locations
RPTALLSAPLGKAEIPPAHRTAYPISRSPPLLNPLLPPSRARPRSRARSRRPWRLEWVVLGYAAGAGGRSCLLLLTLPGLDGLRRGMIXVVRSALKPXMSVVPFCLFLLMDIYWKYETRPTCDDEHACTPSEHLRHQKSIMKSQRNALLIAAALLLYWILFSXVTQLVVRLEQMQQRVDKLRKRDD

SEQ ID NO: 4836 - protein, 59 aa, Oryza sativa
DQDKIADFEMKLMDIDSEHLGIPDSEYQAIVRMPSSEKTRICKDLSSIGDTGVCDYPPV

SEQ ID NO: 4837 - protein, 393 aa, Capillipedium parviflorum
EPARTEDPALSIAGAVQSQKLAVRAISRLQALPGGDVKLLCDTVVEHVRELTGYDRVMVYRFHEGEHGEVVAESRRDNLEPYLGLHYPATDIPQASRFLFRQNRVRMIADCHATPVRVIQDPGLSQPLCLVGSTLRAPHGCHAQYMANMGSIASLVMAVIISSGGDDEQTGRGGISSAMKLWGLVVCHHTSPRCIPFPLRYACEFLMQAFGLQLNMELQLAHQLSEKHILRTQTLLCDMLLRDSPTGIVTQSPSIMDLVKCDGAALYYHGKYYPLGVTPTESQIKDIIEWLTVCHGDSTGLSTDSLADAGYLGAAALGDAVCGMAVAYITPSDYLFWFRSHTAKEIKWGGAKHHPEDKDDGQRMHPRSSFKAFLEVVKSRSLPWENAEMDAIH

SEQ ID NO: 4838 - protein, 101 aa, Glycine max
  unsure (1)..(101): unsure at all Xaa locations
MNITLTIADGNALSLNNLIFCHSKTTYTCIAIYSPLIVITEQSLPNTIDYTVIYVDKSGIKVSPWHDIPLQLSDDIFNFIVXIPTESSAKMEVATDESFTP

SEQ ID NO: 4839 - protein, 481 aa, Neurospora crassa
MSQQTTPNAPGWAPDSWRSKPIKQCPEYPDKAALEKATNELKTLPPIVLPNEIIRLREHLRDVAQGKAFLLQGGDCAELFSYCQQDVIESKIKLLLQMSLVLLWGADKPVVRIGRMAGQYAKPRSSPVETINGKEVPSFRGDILNGFHPDERELDPNRLVRAYQYSSATLNYIRGAIGSGIADLHGPLDWGLGHVRDPALKSKYQETVDRIQEMLRFMHTIGADQNEKLSTVELFTSHEGLLLEYEEPLTRLLNHPSVRSYPPDSTTPPKKEYYNTSAHFLWIGDRTRQIDHAHVEYFRGIANPIGVKIGPSTPTSDLLPMLRTLNPNREPGKVTLITRYGADKVASLLPAHIRTVESSEYARTVVWQCDPMHGNTQSVSGGIKTRKFSDIFSELQQTLRIHKEEKSYLGGMHLELTGDAVTECLGGGAGLDEDDLSTNYTSFCDPRLNEKQALELAFLVADHYRQERKEKEAERRKSSVV

SEQ ID NO: 4840 - protein, 483 aa, Zea mays
MRRQSLATVLLLLVAAAALAAPAVGHSESSCPFYDHGGHGEPHERHDHGHSCGGGADHEHHHHHHHGHGHGEIQRLLPEEMAEEADLELESFGYEDHDHGHHHHHHHHHSHGDMETSPMGVWLSAMGCSLLVSMASLVCLVLLPVIFFKGKPSKAIVDSLAVFGAGAMLGDSFLHQLPHAFGGGHSHSHDHEGHDHAHAHEHAHAHSLQDLSVGLSVLFGIVLFFIVEKIVRYVEDNSQNGAHSMGHGHHHHNHKRHDSSDKAKLNYQKSDTDGKDIDHAEEEPSVNDTTGKISDGHESEATIRKRSSSKATDGEATNSGRDPAPEKAPSISNSNLVFGYLNLFSDGVHNFTDGMALGSAFLLHGSVGGWSRTLFLLAHELPQEVGDFGILVRSGFTVSKALFFNFLSALVALAGTALALSLGKDPGHSSLIEGFTAGGFIYIAVAGVLPQMNDQKTTIKSSVAQLISLAMGMLVALGISLVE

SEQ ID NO: 4841 - protein, 66 aa, Zea mays
MTESLVRNKPGMASIKEMPVLQDGPPPGGFAPVRYARRISTSGPSATGIFLTALGALGIGMSQVGK

SEQ ID NO: 4842 - protein, 317 aa, Glycine max
MGVKGFVEGGIASIIAGCSTHPLDLIKVRMQLQGENNLPKPVQNLRPALAFQTGSTLHVAAAVPPPRVGPISVGVRLVQQEGLAALFSGVSATVLRQTLYSTTRMGLYDVLKTKWTDSVTGTMPLGKKIEAGLIAGGIGAAVGNPADVAMVRMQADGRLPPAQRRNYKSVVDAITRMAKQEGVTSLWRGSSLTVNRAMLVTASQLASYDQFKEMILENGVMRDGLGTHVTASFAAGFVAAVASNPIDVIKTRVMNMRVEPGEAPPYAGALDCALKTVRAEGPMALYKGFIPTISRQGPFTVVLFVTLEQVRKLLKDF

SEQ ID NO: 4843 - protein, 345 aa, Thermus thermophilus
MKVAVLPGDGIGPEVTEAALKVLRALDEAEGLGLAYEVFPFGGAAIDAFGEPFPEPTRKGVEEAEAVLLGSVGGPKWDGLPRKIRPETGLLSLRKSQDLFANLRPAKVFPGLERLSPLKEEIARGVDVLIVRELTGGIYFGEPRGMSEAEAWNTERYSKPEVERVARVAFEGARKRRKHVVSVDKANVLEVGEFWRKTVEEVGRGYPDVALEHQYVDAMAMHLVRSPARFDVVVTGNIFGDILSDLASVLPGSLGLLPSASLGRGTPVFEPVHGSAPDIAGKGIANPTAAILSAAMMLEHAFGLVELARKVEDAVAKALLETPPPDLGGSAGTEAFTATVLRHLA

SEQ ID NO: 4844 - protein, 392 aa, Eupomatia laurina
PYEVPMTAAGALQSYKLAAKAIARLQALPSGSLEKLIDTVVQEVFELTGYDRAMAYKFHDDDHGEVISEITKPGLEPYLGLHYPATDIPQAARFLFMKNKVRMICDCYAKPVNVYQDEKLAFDLTLCGSTLRAPHSCHLQYMENMGSIASLVMAVVINDGEDEDESTGSGLQPPLLKKKRLWGLVVCHNTTPRFVPFPLRYACEFLMQVFAIHVNKELELENQICEKNILRTQTLLCDMLLRDAPLGIVTQNPNIMDLVKCDGVALLYDNKFWRLGLTPTESQMRDISAWLSEYHMDSTGLSTDSLYDAGYPGALALGDVVCGMAAVRITSKDMLFWFRSHTAAEVRWGGAKHDPNDKDDGRRMHPRSSFKAFLEAVKTRSLPWKDYEMDAI

SEQ ID NO: 4845 - protein, 511 aa, Gerbera hybrid cultivar
MNTLQLIFLLFFFPTLLFLYCLPYKRNQNHRRLPPSPPSFPIIGHLHHLGPLIHQSFHALSTRYGSLIHLRLGSVPCVVVSTPDLAKDFLKTNELAFSSRKHSLAIDHITYGVAFAFAPYGTYWKFIKKLFTVELLGTQNLSHFLPIRTHEIRELLRTLMVKSRAKERVNLTEELLKLTNNVISQMMMSIRCSGTNSEADEAKNLVREVTKIFGQFNVSDFIWFCKNIDLQGFKKRYEGTHRRYDALLERIIMGREENRRRGKIKDGEGKDFLDMLLDVLEDGKAEIKITRDHIKALILDFLTAGTDTTAIAIEWALVELINNPNALEKARQEIDQVIGDERLVQESDTPNLPYIQAIIKEALRLHPPIPMLIRKSTENVIVQGYDIPAGTLLFVNIWSIGRNPQCWETPLEFKPHRFLDGGDLKSSLDIKGHNFQLLPFGTGRRGCPGVNLAMRELSVVIANLIQCFDWDVVGERLLNTDERAGLTAPRAVDFVCVPLERGNTLKILGSN

SEQ ID NO: 4846 - protein, 130 aa, Triticum aestivum
MALEWVVLGYAAAAEAIMIVLLTMPGLDGLRKGLVAVTRNLLKPFLSIVPFCLFLLMDIYWKYETMPSCDGDSCTPSEHLRHQKSMMKSQRNAILIAAALVFYWILFSVTHLVVKIEQLSQRVERLKNKD

SEQ ID NO: 4847 - protein, 221 aa, Oryza sativa
TRIFTTADEEVLLDFWPSPFGMRVRIALAEKGIKYESKEEDLQNKSPLLLKMNPVHKKIPVLIHNGKPICESLVAVQYIEEVWNDRNPLLPSDPYQRAQARFWADFVDNKIFDLGRKIWTSKGEEKEAAKKEFIEALKLLEEQLGDKTYFGGDDLGFVDIALIPFDTWFKTFGSLNIESECPKFVACAKRCLQKDSVAKSLPDQHKVYEFIMDIRKKFDIE

SEQ ID NO: 4848 - protein, 374 aa, Thermobifida fusca
MTSPTTNPTPRRTMPTTLAAVVRAPGEPVRIEEVALPELGPGLVRVRMAAAGVCHSDLSLASGKLAHPMPAVLGHEGVGHVVDVGAGVSDLSVGDTVLLNWNPPCRSCWHCTHGEPYLCANAADASRRVWGTLADGTDVHPCLGVAAFAQETVVPASACVAIPADIPPTEAALLGCAVLTGVGAVRNAAQVRPGQSVAVIGLGGVGLAAVQGARLAGAAMVIAVDPVEEKEELARSLGATHFLTPSDDLSRRIRALADGRGVDHAIECVGRAATIRAAWSCTRRGGTATVVGFGAATDTLTLNALEIPHFARTLQGCLYGSSDPATDVPELLKLYRDGELDLSSLVSRTIGLDDVPDALAELHAGRGARSLVEF

SEQ ID NO: 4849 - protein, 287 aa, Ralstonia metallidurans
MAPHRHRIGGFHLGGHRGHGAGHARADAQASCRHSCRHVGGHGSTAMMSPRLNEIWVYLAASPLIGLTATLIAYVFAFRIYERARFSPLANPVMISVAILVTVLTVTGTPYKTYFDGAQFVHFLLGPATVALAVPLYTQLPKLRTNVFPLLCGLVAGSFAAVVSAVGIAYALGATPDVIRSLAPKSVTIPIAMGVSEKIGGLPSLTAVLVMATGIIGAVTATGLLNLLRVRDYTVRGFATGVAAHGIGTARAFQVSQEAGAFSALGMGLNGVLTAIMVPVLAAWMPH

SEQ ID NO: 4850 - protein, 262 aa, Leuconostoc mesenteroides subsp. mesenteroides ATCC 8293
VPFIPAHKAGTDFGGWSGIFAGASQIFLAYIGFDSIAASSAEAKDPKKTMPRGIIGSLIVATILFVTVALVLVGMFHYTEYKDNAAPAAWALLHSGHEFTSNLLSVVALIGMFTAIIGMMLAGSRLLYAFGRDGLLPSFLGKVNDKGLPNNALLVLSVIAILIGSVFSFTELAGLISAGTLIAFIIVSLGIYALRPREGKDIQEPGFKMPFYPVMPALAALGSGFIFYELDNQAKIYAFGWFVVGIIIYAVYGSKHSKLSQK

SEQ ID NO: 4851 - protein, 846 aa, Brassica rapa
MKGVRNIYHHSYTLSFLLVFLVMILFRPAFSINTLSPTESLTISSNRTLVSPGDVFELGFFRTNSRWYLGMWYKKVSERTYVWVANRDNPISNSIGSLKILGNNLVLRGNSNKSVWSTNITRRNERSLVLAELLGNGNFVMRDSNNKDASEYLWQSFDYPTDTLLPEMKLGFQPKTGLNRFLTSWRSSDDPSSGDFSYKLEAQRLPEFYLWNKELFRVHRSGPWNGIRFSGIPEDQKLSYMVYNFTENSEEVAYTFLLTNSSIYSRLIVSSEGYIERQTWNPTLGMWNVFWSFPLDSQCESYRMCGPYSYCDVNTSPVCNCIQGFNPSNVEQWDLRSWSGGCIRRTRVSCSGDGFTRMKNMKLPETTMATVDRSIGVKECEKKCLSDCNCTAFANADIRNGGTGCVIWTGRLDDMRNYVADHGQDLYVRLAAADLVKKRNADGKIISSTVAVSVLLLLIMFCLWKRKQKRAKASATSIANRQRNQNLSMNGMVLLSKREFSVKNKIEELELPLIELEAVVKATDNFSNCNKLGQGGFGIVYKGRLLDGQEIAVKRLSETSVQGTDEFMNEVTLIARLQHINLVQILGCCIEADEKMLIYEYLENLSLDSYLFGKTQRSKLNWKERFDITNGVARGLLYLHQDSRFRIIHRDLKVSNILLDKNMIPKISDFGMARIFARDETEANTMKVVGTYGYMSPEYAMNGIFSEKSDVFSFGVIVLEIVTGKRNRGYNFLSYAWSHWKEGRTLELVDPVIVDSSLPSTFQPEEVLKCIQIGLLCVQELAEHRPTMSSVVWMLGSEATEIPHPKPPGCCIGRSPYELEPSSSRQCDEDESWTVNQYTCSVIDAR

SEQ ID NO: 4852 - protein, 197 aa, Glycine max
  unsure (1)..(197): unsure at all Xaa locations
MMALNISSPAEVKSIXFADYFKSNCITAKFTGGFAFKRKERGAASGGRVCCSVLAPPPPAWPGRAVPEQGRKTWDGPKPISIVGCTGSIGTQTLDIVAENPDKFKVVALAAGSNVTLLADQVKRFKPQLVAVRNESLIAELEEALHDVEEKPEIIPGEQGIVEVARHPDAVSVVTGIICCARLKPTIAAIEARKDIS

SEQ ID NO: 4853 - protein, 157 aa, Zea mays
  unsure (1)..(157): unsure at all Xaa locations
SCLGCFLAGTDSIHHGMSTSFPRENSLKGIPSLSGQHNQHPRSVSCWAASLASFSYPELTSKPRWWWRTLACVPYLLPLHNMWSYADVIYQLHTYLQGFSLLYTFIDTMTLCPXWLFLVIFMTVYFFVVRRKWSPHFLRXHVILAILLDTGSQAVGT

SEQ ID NO: 4854 - protein, 180 aa, Rhizobium etli bv. phaseoli
EFDAFPTLEQLPLWGFDGSSTMQAEGRSSDCVLKPVAIYPDPARTNGVLVMCEVMMPDGVTPHPSNARATILDDEDAWFGFEQEYFFYQNGRPLGFPEQGYPAPQGPYYTGVGYSNVGDVAREIVEEHLDLCLAAGINHEGINAEVAKGQWEFQIFGKGSKKAADQIWMARYLLQRLTEK

SEQ ID NO: 4855 - protein, 1124 aa, Nicotiana tabacum
MSSSRPSQSSTTSARSKHSARIIAQTTIDAKLHADFEESGDSFDYSSSVRVTSVAGDERKPKSDRVTTAYLNQIQKGKFIQPFGCLLALDEKTFKVIAFSENAPEMLTMVSHAVPSVGELPALGIGTDIRTIFTGPSAAALQKALGFGEVSLLNPVLVHCKTSGKPYYAIVHRVTGSLIIDFEPVKPYEVPMTAAGALQSYKLAAKAITRLQALPSGSMERLCDTMVQEVFELTGYDRVMTYKFHDDDHGEVVAEITKPGLDPYLGLHYPATDIPQAARFLFMKNKVRMICDCRAKHVKVVQDEKLPFDLTLCGSTLRAPHYCHLQYMENMSSIASLVMAVVVNDGDEEGESSDSTQSQKRKRLWGLVVCHNTTPRFVPFPLRYACEFLAQVFAIHVNKELELESQILEKNILRTQTLLCDMLMRVAPLGIVSQSPNIMDLVKCDGAALLYKNKIHRLGMTPSDFQLHDIVSWLSEYHTDSTGLSTDSLYDAGFPGALALGDVVCGMAAVRISDKGWLFWYRSHTAAEVRWGGAKHEPGEKDDGRKMHPRSSFKAFLEVVKTRSVPWKDYEMDAIHSLQLILRNASKDADAMDSNTNIIHTKLNDLKIDGLQELEAVTAEMVRLIETASVPIFAVDVDGQLNGWNTKIAELTGLPVDEAIGNHLLTLVEDSSVDTVSKMLELALQGKEERNVEFEIKTHGPSGDSSPISLIVNACASRDVGDSVVGVCFIAQDITGQKNIMDKFTRIEGDYRAIIQNPHPLIPPIFGTDQFGWCSEWNSAMTKLTGWRRDDVIDKMLLGEVFGTQAACCRLKNQEAFVNFGVVLNNAMTGQECAKISFGFFARNGKYVECLLCVSKRLDREGAVTGLFCFLQLASHELQQALHIQRLSEQTALKRLKVLAYIRRQIRNPLSGIIFSRKMLEGTNLGEEQKNILRTSSQCQRQLNKILDDTDLDSIIDGYLDLEMLEFKLHEVLVASISQIMMKSNGKNIMIVNDMVEDLLNETLYGDSPRLQQVLANFLLVCVNSTPSGGQLSISGTLTKDRIGESVQLALLEVRISHTGGGVPEELLSQMFGTEAEASEEGISLLISRKLVKLMNGEVQYLREAGRSTFIISVELAVATKSSC

SEQ ID NO: 4856 - protein, 347 aa, Escherichia coli CFT073
MELVRSKVMKSILIEKPNQLSIIEREIPTPSAGEVRVKVKLAGICGSDSHIYRGHNPFAKYPRVIGHEFFGVIDAVGEGVESARVGERVAVDPVVSCGHCYPCSIGKPNVCTTLAVLGVHADGGFSEYAVVPAKNAWKIPEAVADQYAVMIEPFTIAANVTGHGQPTENDTVLVYGAGPIGLTIVQVLKGVYNVKNVIVADRIDERLEKAKESGADWAINNSQTPLGESFAEKGIKPTLIIDAACHPSILKEAVTLASPAARIVLMGFSSEPSEVIQQGITGKELSIFSSRLNANKFPVVIDWLSKGLIKPEKLITHTFDFQHVADAISLFELDQKHCCKVLLTFSE

SEQ ID NO: 4857 - protein, 279 aa, Pyrococcus abyssi
MVWKMAKVSDFKRIGDDKVTAIGMGTWGIGGKEFPDYSKDRESIEALRYGLELGINLIDTAEFYGAGHSEELVGKAIEGFNREEIFIVSKVWPTHFGYESAKKAARASAKRLGTYIDLYLLHWPGDTWKKIEETLHALEELVDEGLIRYIGVSNFDLELLRRSQEAMRKYEIVVNQVKYSLMDRTPEETGLLDYMKREGITLMAYTPLEKGILARNKCLAEIGKRYGKTSAQVALNYLIWEENVVAIPKASNKDHIKENFGAMGWRLSREDRERAKLCV

SEQ ID NO: 4858 - protein, 120 aa, Triticum aestivum
  unsure (1)..(120): unsure at all Xaa locations
GNWASTTRSWAHDWREALEXTLAWLGPMAHNMMRWXADRSFEXQHXMEVQLXGGNGNGNVLLLQTLYFADRDKTEAVLCELLVGLNYICRYXAXSRARCSTAPAXVDFDDCTVDWHASMQ

SEQ ID NO: 4859 - protein, 167 aa, Neurospora crassa
MSSATTIYDFKPLDKKGSELPLSTYQGKVVLIVNVASKCGFTPQYAGLEKVYKEIKEKYPDDFEILAFPCNQFGGQEPGTEEEIQSFCQLNYGVSFPIMKKVEVNGDNADPLYEWMKNEKPGLMGLKRIKWNFEKFLIGKDGKVKGRWASTTKPESLKEAILKELGE

SEQ ID NO: 4860 - protein, 496 aa, Oryza sativa
  unsure (1)..(496): unsure at all Xaa locations
XCXGREGSRRLPLRRRGGSHAADALLRALTTAAGEQPLTASAAKTRLRREHDPDRVVSLFEAIDDASLSASSTRHALSLAARRLSRSRRFADAEALLSSHIPASPTEPQLAAVLCSYAAASLPEKALAAFRSAAPFPSPISPLPFNAVLSVFLRCRRHRRVPVLFDELSKEFSITPDASSYGILVKAYCMLSKDAKAHEVLDQMRGQGFTPTNSIYTTMIDSMYKQKKMEQAERLWKQMLESGRKPDQAVYNTKIMHHSLHGKTEDVLEVIAEMEEAGVKPDTITYNFLMTSYCKHGKMETAKELYRSLGEKGCSANAATYKHMMAQLCAHGDLDGALVIFKESYRSNKVPDFRTMSGLVEGLTKAGRVAEAKNIVAKMKKKFPEQLLSGWMKLEKELGLNSDSGDAGTRAECISEETPSEAEAAMPKTLELEDPSSDETEYFRRRFAVHQQQGRHGKRPKAMKQVAGATSMLREHSLIPAHGDPRFAGIIVPRIR

SEQ ID NO: 4861 - protein, 524 aa, Oryza sativa (japonica cultivar-group)
MDSRELLRTVTQAARNHARTLYHRLVGRHLPRILAVTLLLAAARAGGAATTTLDALARENARALVAVAWCCAAAAYAYAMSRPRPVYLVDLAGYKPAASHEATRAESIRRFGLAGDFTGESMAFQRRMMERSGLGEATHFPASLFALPVDMCLRTAREESEAVVFGAVDELLAKTGVPPADVGVVIVNSSLFSPTPSFTSLVVNRYRLRHDVVTHNLSGMGCSAGIIAIDLAKHLLQVHAETYALVVSTENITLNAYMGNYRPMLVTNTLFRMGGAAVLLSNRRAERRRAKYQLMHTVRTHRGGASDRSYACVTQEEDGAGNVGVSLSKELMSVAGDALRTNITTLGPLVLPLSEQLRFLATVVLRRVFGHAAGVKPYLPDFTAALDHFCIHAGGRGVLDELERSLKLSAWHMEPSRMTLYRFGNTSSSSLWYELSYCEAKGRIRRGDRVWQIAFGSGFKCNSAVWKALRTVDGGAGRDAGAWAQDIDALPVHVPKVVPIVDDDDGANGGDGDRHDAASHVRPE

SEQ ID NO: 4862 - protein, 193 aa, Triticum aestivum
LVAGSRSTSQPRPAAGSTPKLVASFPAITYAEARALRDKDGDDTAVLECAVCLSEFEDGDQLRLLPKCSHAFHPDCIGEWLAGHVTCPVCRCSLAPEEPAPAAAEENSAGAEEQRAPEVAIDMDPEGDGAAHEERMREAAELERIGSLRRAVRSRSGRPFSRAHSTGHSLSARFDGDLERFTLRLPEHVRRDM

SEQ ID NO: 4863 - protein, 151 aa, Brassica oleracea var. capitata
AKGVAVLNSSEGVKGTIFFTHEGNGATTVTGTVSGLRPGLHGFHVHALGDNTNGCMSTGPHFNPDGKTHGAPEDANRHAGDLGNIIVGDDGTATFTITDSQIPLSGPNSIVGRAIVVHADPDDLGKGGHELSLSTGNAGGRVACGIIGLQG

SEQ ID NO: 4864 - protein, 751 aa, Nostoc sp. PCC 7120
MNINDITIPFQVDLSNCSKEPIHIPGLIQPHGVLLVLQEVDLTILQVSNNTFNILGRHPEQLLNQHLSCLLEAEQLSLLKDCLAQEDLQIINPLEFIIKSHNESISFDVIAHRSNNLLILELEANLSDKTHSFFRFYHLVKLAMLKLQGTATTTEISQILAQEVRKITGFDRVMVYRFDEQWNGKVIAEVKPEYLTSYLGLNYPASDIPQQARKLYSQNWLRLIPDAKYQPVPIVPINNPLNDQPLDLSRSVLRSVSPLHIEYMQNMGVTASMSISIMKNQKLWGLIACHHQSPKYIPYEIRSACEFLGQMTSVEMSAKEDSEDTEDKIQVKSVHSKLVQYMSAENDFINALIDHQPNILDLVKAQGAAVCFNGNSCTVGQVPPMPDIQVLVEWMSQNIHEEIFATDSLATVYPDAEKLRDVASGLIALSISRSQKNYILWFRPEVVRTVDWGGNPHKPVEVIANGEIRLSPRKSFDLWKETVLLKSQPWKSHEVNAALELRSAIIGIVLQKADELAQLNIELERSNQELDAFAYIASHDLKEPLRGIHNYSNFLMEDYGEIIDAPGKEKLLTLIRLTQRMEDLIDSLLHFSRLGRVDLSMQDTDLNEIVHRILDMLSGRIEETGVEIRILQLLPVVYCDRIQIGEVFSNLIANSIKYNDKANKWIEIGYIDNPPLPPTFYVRDNGIGIREKHFETIFRIFKRLHSPSKYGGGTGAGLTIAKKIVERHGGKIWVESTYGEGSTFYFTLQDV

SEQ ID NO: 4865 - protein, 404 aa, Buchnera aphidicola str. Sg (Schizaphis graminum)
MIGKIKLITRDSFNKLILPVYNPAFFIPVKGKGSRLWDQKGKEYIDFSGGIAVTSLGHCHPVLNKVLRQQSKKLWHISNIFTNEPALRLADKLISSSFASRVFFANSGAEANEAAFKLARYYSSKIYNLKKNKIISFYNSFHGRTFFTVSVGGQAKYSDFFGPKPPAIMHAKFNEINSVKSIIDDNTCAVVMELIQGEGGIVPADVAFVREIRDLCYKYNALLIFDEIQTGIGRTSKLYAYEHYEVQPDILTIAKSLGSGFPISATLTTNGIASVIKPGIHGTTYGGNPLACSIAESVVNIVNTKKFLLGVEKKSKKIISELNIINKRFGLFTEIRGKGLLIGIVLRPELSEEIHNILNALFLEGVIVLTAGKNVIRLAPSLIISKRDIVEGMKRFYCALEKCL

SEQ ID NO: 4866 - protein, 365 aa, Pseudomonas putida
MPAHSFRIAAIPGDGIGLEVLPEGIRVLEAAALKHGLALEFDTFEWASCDYYLQHGKMMPDDWAEQLKQYDAIYFGAVDWPDKVPDHISLWGSLLKFRREFDQYVNIRPVRLFPGVPCALANRKVGDIDFVVVRENTEGEYSSLGGIMFENTENEIVIQESIFTRRGVDRILKYAFDLAEKRERKHVTSATKSNGMAISMPYWDKRTEAMAAHYPHVSWDKQHIDILCARFVLQPERFDVVVVASNLFGDILSDLGPACAGTIGIAPSANLNPERNFPSLFEPVHGSAPDIFGKNIANPIAMIWSGALMLEFLGQGDERYQRAHDDMLNAIERVIADGSVTPDMGGTLSTQQVGAAISDTLARLD

SEQ ID NO: 4867 - protein, 462 aa, Brucella suis 1330
MTKNWTPQSWRSKPIRQVPFYPDAQALNDVEARLRTYPPLVFAGEARKLKEQLAAVAGGKAFLLQGGDCAESFAEHGADNIRDFFRVFLQMAIVLTFGASKPVVKVGRIAGQFAKPRSSDMETKDGVELPSYRGDIINGIEFDESSRIPDPQRQDMAYRQAAATLNLLRAFAQGGYANLENVHQWMLGFVGKSPQAERYAALAQRISETMNFMRAIGITAESNQALRETDFYTSHEALLLGYEEALTRIDSTSGDWYGTSGHMIWIGDRTRQPDHAHIEYCRGIKNPLGLKCGPSLQPDDLIRLIDLLNPENEAGRLTLIARFGYDKVGDHLPQLIRAVERVGRTVVWSCDPMHGNTITAGGYKTRPFDRILKEVESFFAIHRAEGTHPGGIHIEMTGKNVTECTGGARAISAEDLHDRYHTHCDPRLNADQALELAFLLAELLKRSVMPEWKSGPQSPECN

SEQ ID NO: 4868 - protein, 326 aa, Oryza sativa
MQYKNLGRSGLRVSQLSYGAWVTFGNQLDVKEAKALLQACRDAGVNFFDNAEVYANGRAEEIMGQAMRDLGWRRSDVVSPPSSSWECRAQRQGPLPEAHRRGPPRLAQGPRHGLRDVVYCHRPDATTPVEETVRAMNWVIDTAWLLLGHLRVVAQQITEAWSVANRLDLVGPIVEQPEYNLFSRHKVESEFLPLYSTYGLGLTTWSPLASGVLTGKYAKGNIPADSRFALENYKNLANRSLVDDTLRKVNGLKPIASELGVSLAQLAIAWCASNPNVSSVITGATKENQIVENMKALDVIPLLTPEVVDKIEAVVQSKPKRTESYR

SEQ ID NO: 4869 - protein, 168 aa, Zea mays
MAASSTATSVHDFIVKDASGKDVDLSTYKGKVLLIVNVASQCGLTNSNYTELAQLYEKYKDQGFEILAFPCNQFGGQEPGTNEEIVQFACTRFKAEYPIFDKVDVNGNNAAPIYKFLKSSKGGLFGDSIKWNFSKFLVDKEGRVVDRYAPTTSPLSIEKDIKKLLGSS

SEQ ID NO: 4870 - protein, 96 aa, Glycine falcata
LYAGINISGTNGEVMPGQWEYQVGPSVGIEAGDHIWASRYILERITEQVGVVLSLDPKPIEGDWNGAGCHTNYSTKSMREDGGFEVIKKAILNLSL

SEQ ID NO: 4871 - protein, 324 aa, Arthrobacter keyseri
MRLPPTGLGCMSLSHAYGVPPSRDEGLTMLRAALDEGIGMLDTATLYGGGRNEELVGAAIAGRRDEVFLASKCGMASVDGVKVIDGRPDTLRAQVDASLSRLGVDYIDLYYLHRWDKKVPIGDSVGALAEMVAAGKIGAIGLSEVSVGRLREAQAITPIAAVQNEYSLWSRNAELGMLDATREDGVTLVAFSPVARGFLADAIKDPGQLDPKDIRRGMPRFQLEHWGANAALLSSWRELAAEAGCTPAQLALAWLLSRGDHVLPIPGTTSVAHLRENMAAADITVDGALLARAGVLIGTDTISGARYAPASAAEVDAETFEDAA

SEQ ID NO: 4872 - protein, 278 aa, Nicotiana tabacum
MVRAPCCEKMGLKKGPWIPEEDQILISFIQTNGHGNWRALPKQAGLLRCGKSCRLRWTNYLRPDIKRGNFTKEEEETIIQLHEMLGNRWSAIAAKLPGRTDNEIKNVWHTHLKKKLKDYKPPQNSKRHSKSKNHDSKGPTTSESSNNSDLTIINTQKHIDSPVLAPNSPQISSSTEMSTVTLVDDHQMVVIKQEVMESSEYFPEIDESFWTDELTTDNNWSSTDHVMVAANQELQVQLPFSSFKEENVDILATKMEDDMDFWYNVFIKTDDLPELPEF

SEQ ID NO: 4873 - protein, 93 aa, Zea mays
MLEGKAVVEDTDMPAKMQAQAMSAASRALDRFDVLDCRSIASHIKKEFDAIHGPGWQCVVGSGFGCYFTHSKGSFIYFRLESLRFLVFKGAAA

SEQ ID NO: 4874 - protein, 494 aa, Glycine max
  unsure (1)..(494): unsure at all Xaa locations
MALGRNKTVQLALLLLCLDLGIAHQHQGHSPSHSGFCASDAHNHCGDDHHHDHGHAHDHNKDKIDARSKLLPEELAEEEDMKLYGFGFPHHHHHDHDIEAAELSGLGLWLNALGCSFLVSMASLVCLIILPVIFVQGKPSKAVVDSLALFGAGAMLGDAFLHQLPHAFGGEHSHSHGDHXDHDHHDSSGHDHAHSLADLSIGISILAGIVLFLLVEKLVRYVEENSGRANSWTHGHHHHHHNSKEKLKDDNSSTANFQSESNNAKEERLIDERKEDDQVSLDSLKGDNPSQSESSLRKRIGSNVTKGDNLDDNTVDSATYNVKSSNVKEPVRSPTSLVFGYLNLFSDGVHNFTDGMALGSAFLLYGSVGGWSRTMFLLAHELPQEIGDFGILIRSGFSIPKALFFNFLSALVALAGTALALLWGKDPGQSSLIEQXICLLFDXGFTAGGFIYIAIAGVLAEMNNGGNTTLRSTVVQIISLTIGMAVALGISLVE

SEQ ID NO: 4875 - protein, 213 aa, Zea mays
YDQLAELEWLSNYLGEDNFPTEDLKKLQLITGIPPAATAMAPAPAPAAAQAQPAAGVLPQEAPVLGKARSKRSRVAPCSWASRVVVLPPPPSPGSPPSAAISPSESGSGTAALAFPARKPSKPAKKKEAPSPSPPPVPNNAAAAGAGEGRRCLHCETDKTPQWRTGPLGPKTLCNACGVRYKSGRLVPEYRPAASPTFVVSKHSNSHRKVLEL

SEQ ID NO: 4876 - protein, 187 aa, Haemophilus parainfluenzae
MMKMKTLLALAISGICAAGVANAHDHMAKPAGPSIEVKVQQLDPANGNKDVGTVTITESNYGLVFTPNLQGLAEGLHGFHIHENPSCDPKEKDGKLTSGLAAGGHWDPKGAKQHGYPWQDDAHLGDLPALTVLHDGTATNPVLAPRLKKLDEVRGHSIMIHAGGDNHSDHPAPLGGGGPRMACGVIK

SEQ ID NO: 4877 - protein, 174 aa, Triticum aestivum
  unsure (1)..(174): unsure at all Xaa locations
LLLLSSHLTTHRSPSKIARRPWRTKPSSAGAKTAAAPPVTVHSALVTYTSMLALLSLCPPFVILLWYTMVHADGSVVRTYEHLRDHGVLEGLKAIWPMPTLVAWKIIFGFGLFEAVLQLLLPGKRFEGPISPAGNVPVYKANGLQAYAVNLXTYLGLWWFGIFXPAIVYDHFGE

SEQ ID NO: 4878 - protein, 358 aa, Agrobacterium vitis
MREYKIAAIPADGIGPEVIAAGLQVLEALEQRSGDFKIHTETFDWGSDYYKKHGVMMPADGLDKLKKFDAIFFGAVGAPDVPDHITLWGLRLPICQGFDQYANVRPTKILPGITPPLRNCGPGDLDWVIVRENSEGEYSGHGGRAHRGLPEEVGTEVAIFTRVGVTRIMRYAFKLAQARPRKLLTVVTKSNAQRHGMVMWDEIAAEVATEFPDVTWDKMLVDAMTVRMTLKPETLDTIVATNLHADILSDLAGALAGSLGVAPTANIDPERRFPSMFEPIHGSAFDITGKGIANPIATFWTAAQMLEHLGERDAAARLMSAVERVTEAGILTPDVGGTANTSQVTEAVCNAIAGSNII

SEQ ID NO: 4879 - protein, 233 aa, Papaver somniferum
MAGSGSEEVKILGGWPSPFVMRPRIALNIKSVKYYLLEETFGSKSELLLKSNPIYKKMPVLIHGDKPICESMIIVQYIDDVWASAGHSIIPSDPYDASIARFWATYIDDKFFPSLMGIAKSKDAEEKKAAIEQAIAAFGILEEAYQKTSKGKDFFGGEKIGYVDIAFGCYVGWIRVTEKMNGIKLFDEEKVPGLTKWAEKFCADETVKSVMPETDALMEFAKKIFGSKPPPSN

SEQ ID NO: 4880 - protein, 383 aa, Daucus carota
VFLFSILVAHSHVSASSQTCDFPAIFNFGDANSDTGAFAAWFFGNPPFFGQSYFNGSAGRVSDGRLLIDFMATDLGLPFLHPYMDSLGANFSHGANFANILSTIALPTSNIIPGVRPPRGLNPVNLDIQVAQFAQFVNRSQTQGEAFDNFMPKQDYFSQALYTLDIGQIDITQEFLTNKTDDEIKAVVPGLISSLSSNIQILYSLGGRSFWIHNLGPNGCLPILWTLAPVPDDQIDSAGCAKRYNDLTQYFNSELKKGVDQLRTDLPLAAVTYVDVYTAKYSLYQEPAKYGFTHPLETCCGFGGRYNYGEFSLCGSTITVNGTQLAVGPCENPAEYINYEGQTYTQAADQITFNKISTGELSDPPNSLKTACPKLSLPRVSDI

SEQ ID NO: 4881 - protein, 108 aa, Glycine max
MATKAIEQPAGVGFDFSNYARNQFLGDRLNGQPKATSTGTTIVGLKFGGGNSGEEEGICLGADTRATGGPIVADKNCEKIHYLAPHMRCCGAGTAADTEFVTNLISSN

SEQ ID NO: 4882 - protein, 802 aa, Phanerochaete chrysosporium
QSGLYQQCGGIGWTGATTCVSGATCTVLNPYYSQCLPGAATTSVSSSHSSSSSVSSHSSSASSSSISSTSTSPPAPSQTVANVSPEWAAAYVKAQAAVAKLSVTDMVNLATGVQWEKGPCVGNTPAISSIPGFTGLCLQDSPVGVRYADGTSVFPPEINVAATWNRTLMRQRGAAMGAEFKGKGVHVALGPMMNLMRVPAAGRNWEGGGGDPFLSGELAFETITGIQSSGAQACAKHFINNEQEHFRDSSSSNVDDRTEHELYGHPFLRSVQANVASVMCSYNQINGTFSCENEKTLSGLLKGEYGFQGYVMSDWWATHSGAPAVNAGLDMTMPGDETTNSGTTYFGQNLVNAVNSGQVSQARIKDMATRILAAWYLLGQDQNFPAVNFNSWNSGQGQHVNVSGNHASLIRTIGAASQILLKNVNGALPLKKPKTIGIIGNGAGSNPSGPNAFSDRAGDVGVLALGWGSGTANFPYLVAPVDAITARASQDGTTVSSSLSDTDLTGAANTATGKDVAMVFITADSGEGYLTVEGNAGDRNDLQAWHGGDALVQQVASHNKNTIVVINSVGPINMEAWVNHPNVTAIVWSGLPGQEAGNAVTDVLFGAVNPGGKLPFTIGKSISDYSAQIITTGSGIVPIPYNEGLFIDYRHFDQAGIAPRFEFGFGLSYTTFDYSNLVITGSTAGGTRQPPGPGSSLDPWLHDSVVTVSFTLTNNGTVDGTEVPQLYLSPPTSAKSAPQNLKGFDSGFLPAGASTTVSFELSRYSFSVWDVVSQSWQIPAGVTGISVGASSRDLRLKGSITN

SEQ ID NO: 4883 - protein, 494 aa, Staphylococcus aureus subsp. aureus Mu50
MEKKNKQIDRGDLKQNLSEKFVWAIAYGSCIGWGAFILPGDWIKQSGPIAASIGIVIGALLMILIAVSYGALVERFPVSGGAFAFSFLSFGRYVSFFSSWFLTFGYVCVVALNATAFSLLVKFLLPDVLNNGKLYTIAGWDVYITEIIIATVLLLVFMLVTIRGASVSGSLQYYFCVAMVIVVLLMFFGSFFGNNFALENLQPLAEPSKGWLVSIVVIVSVAPWAYVGFDNIPQTAEEFNFAPNKTFKLIVYSLLAASLTYVVMILYTGWLSTSHQSLNGQLWLTGAVTQTAFGYIGLGVLAIAIMMGIFTGLNGFLMSSSRLLFSMGRSGIMPTMFSKLHSKYKTPYVAIIFLVGVSLIAPWLGRTALTWIVDMSSTGVSIAYFITCLSAAKLFSYNKQSNTYAPVYKTFAIIGSFVSFIFLALLLVPGSPAALTAPSYIALLGWLIIGLIFFVIRYPKLKNMDNDELSRLILNRSENEVDDMIEEPEKEKTK

SEQ ID NO: 4884 - protein, 467 aa, Glycine max
MAATRPVQCLLRRVCRGSRTIGVATEVNASSSSQKIIDKEYEHSAHNYHPLPIVFAQAKGTSVWDPEGNKYLDFLSGYSAVNQGHCHPKILKALQEQAERLTVSSRAFYNDRFPDFAEYVTNMFGYDMVLPMNTGAEGVETALKLARKWGYEKKRIPKDEAIIVSCCGCFHGRTLGVISLSCDNEATRGFGPLLPGNLKVDFGDAEALEQIFKEKGEHIAAFILEPVQGEAGVIFPPDGYLKAVRDLCSKYNVLMIADEIQTGLARTGKMLACEWEEVRPDVLILGKALGGGVIPVSAVLADKDVMLCIQPGQHGSTFGGNPMASAVAIASLEVIKNERLVERSAQMGEELTGQLLKIQQQYPDYVKEVRGRGLFIGVEFNSKKLFPVSGYELCKKLKYRGVLAKPTHDAIIRFTPPLCISVDEIQQGSKALADVLEIDLPKLQKTKPIDAAPVATSACDRCGRVLY

SEQ ID NO: 4885 - protein, 637 aa, Gaeumannomyces graminis
LGEGPRYAGQLGRDSPPTSYLAGVMAEQTARGCRVGVQACTKHFIGNEQEEQRNPTAVDGKTVEAISSNIDDRTMHEAYLWPFYNAVRAGTTSIMCSYQRINGSCGCQNSKTLNGLLKTELGFQGFVVSDWAATHSGVASIEAGLDMNMPGPLNFFAPTFESYFGKNITTAVNNGTLSSRRVDEMIERIMTPYFALGQDKNYPPVDGSTVSVGFSQPGFWSHEFPLGPTVDVRRNHHEHVRELGSAGSVLLKNEKGALPLKKPMNIGVFGNDAADVTRGPYMAGGPFGGVGGDCDIGTLPLGGGSGTGRYTYVVSPLEDIKARGRSYGALVQYITSNEVITSGGLVTIFPVPEVCLVFLKSWATEGEDRISLEAQWNAAVVVEKTAALRNNNIVVHGGAPVVMSWRNNPNVTAILAAHMPGQETGTRSSTRLGRREPVGQPPYTLAGPGDRTQQNLVNESTDPDAWQADFLEGQLIDYQDFDAHNKTPAYEFGFGLSYTTFELSGVQVEVQASNPSRLPDPSAPIRAGGNVQLWETLATVKATVKKTGDREGATVAHLYLSLPGTEPGKDTPVRNLRGFEKVKIAPGASAEVEIALMRRDLSFWDTTAQSWRLPEGAIGRRVGFSSRDLKLKSEIKI

SEQ ID NO: 4886 - protein, 336 aa, Streptomyces avermitilis MA-4680
MRYIKLGTTGLEVSAITLGCMSFGEPDRGGEPWSLGADASRDIIKQALEGGVNFLDTANGYSAGSSEEIVGQAVKDFTRREEVVLSTKVWMRMRPGPNGAGLSRKAIFAELDASLKRLGTDYIDLYQIHRWDYDTPIEETLEALHDAVKSGKVRYIGASSMYAWQFAKALYLADLNGWTRFASMQDHYNLIHREAEREMIPLCADQGIGVIPWSPLARGRLTRARDTATARAETDAGGKILYRDEDQAVAERVHEIAGKRGLSPAQVALAWVMRNPAVTSPIVGVTKPAQLADAVAAVDVELDEDEAAYLEEPYQPHEAAYLEESFYKRQPVAGSR

SEQ ID NO: 4887 - protein, 444 aa, Zea mays
TRRKRRRRAARPRRRRRDLAQRRPCWSSASSSGAIATRPGADEDEDATPSPPPRHRHQHQQQLVTRELFPAGAGPPAPTPRHWAELGFFRADLQQQQAPGPRIVPHPHAAPPPAKKSRRGPRSRSSQYRGVTFYRRTGRWESHIWDCGKQVYLGGFDTAHAAARAYDRAAIKFRGVDADINFNLSDYEDDMKQMGSLSKEEFVHVLRRQSTGFSRGSSRYRGVTLHKCGRWEARMGQFLGKKYIYLGLFDSEVEAARAYDKAAIKCNGREAVTNFEPSTYHGELPTEVADVDLNLSISQPSPQRDKNSCLGLQLHHGPFEGSELKKTKIDDAPSELPGRPRQLSPLVAEHPPAWPAQPPHPFFVFTNHEMSASGDLHRRPAGAVPSWAWQVAAAAPPPAALPSSAAASSGFSNTATTAATTAPSASSLRYCPPPPPPSSHHHPR

SEQ ID NO: 4888 - protein, 181 aa, Bacillus cereus ATCC 14579
MNVPYVQLRELTLDDVEDRYQWSLDRDVTKHLVLPDQYPPFTRGDTRNWIEACISRKNGYEQRAIVTETGIHIGWVDLKNFDKTNKNAELGIAIGNKDYWGKGFGMAALNSMLQIGFSQFELEKIWLRVDEDNTKAKKSYESAGFVCEGLMRNDRLRQGKFIHRYRYSILKEEYESKINNL

SEQ ID NO: 4889 - protein, 1123 aa, Solanum tuberosum
MSSSRPSQSSTTSSRSKHSARIIAQTSIDAKLHADFEESGDSFDYSSSVRVTNVAEGEQRPKSDKVTTAYLHQIQKGKFIQPFGCLLALDEKTLKVIAFSENAPEMLTMVSHAVPSVGEHPVLGIGIDIRTIFTGPSGAALQKALGFGEVSLLNPVLVHCKNSGKPFYAIVHRVTGSLIIDFEPVKPYEVPMTAAGALQSYKLAAKAITRLQSLPSGSMERLCDTMVQEVFELTGYDRVMGYKFHDDDHGEVVSEITKPGLEPYLGLHYPATDIPQAARFLFMKNKVRMICDCRAKHVKVVQDEKLPFDLTLCGSTLRAPHYCHLQYMENMNSIASLVMAVVVNDGDEEGESSDSSQSQKRKRLWGLVVSHNTTPRFAPFPLRYACEFLAQVFAILVNKELELENQFLEKNILRTQTLLCDMLMRDAPLGIVSQSPNIMDLIKCDGAALLYKNKIHRLGMNPSDFQLHDIVSWLCEYHTDSTGLSTDSLYDAQFPGALALGDAVCGMAAVRISDKDWLFWYRSHTAAEVRWGGAKHEPGEKDDGRKMHPRSSFKQFLEVVKTRSIPWKDYEMDRIHSLQLILRNAFKDADAVNSNTISIHTKLNDLKIDGMQELEAVTAEMVRLIETASVPIFAVDVDQGVNGWNTKVAELTGLPVDEAIGKHLLTLVEDSSVDTVNKMLELALQGQEERNVEFEIKTHGPSRDSSPISLIVNACASKDVRDSVVGVCFIAQDITGQKSIMDKFTRIEGDYRAIIQNPHPLIPPIFGTDQFGWCSEWNSAMTMLTGWRRDDVMDKMLLGEVFGTQAACCRLKNQEAFVNFGVILNNAITGQESEKIPFGFFARYGKYVECLLCVSKRLDKEGAVTGLFCFLQLASHELQQALHVQRLSEQTALKRLKVLAYIRRQIRNPLSGIIFSRKMLEGTSLGEEQKNILHTSAQCQRQLDKILDDTDLDSIIEGYLDLEMLEFKLHEVLVASISQVMMKSNGKNIMISNDMVEDLLNETLYGDSPRLQQVLANFLLVSVNSTPSGGKLSISQKLTKDRIGESVQLALLEFRIRHTGGGVPEELLSQMFGSEADASEEGISLLVSRKLVKLMNGEVQYLREAGRSTFIISVELAVATKSS

SEQ ID NO: 4890 - protein, 247 aa, Acinetobacter sp. NCIMB9871
MSNKFNNKVALITGAGSGIGKSTALLLAQQGVSVVVSDINLEAAQKVVDEIVALGGKAAANKANTAEPEDMKAAVEFAVSTFGALHLAFNNAGILGEVNSTEELSIEGWRRVIDVNLNAVFYSMHYEVPAILAAGGGAIVNTASIAGLIGIQNISGYVAAKHGVTGLTKAAALEYADKGIRINSVHPGYIKTPLIAEFEEAEMVKLHPIGRLGQPEEVAQVVAFLLSDDASFVTGSQYVVDGAYTSK

SEQ ID NO: 4891 - protein, 143 aa, Zea mays; identical to SEQ ID NO: 2031

SEQ ID NO: 4892 - protein, 341 aa, Oryza glaberrima
MDHRELWPYGLRVLVIDDDCSYLSVMEDLLLKCSYKVTTYKNVREAVPFILDNPQIVDLVISDAFFPTEDGLLILQEVTSKFGIPTVIMASSGDTNTVMKYVANGASDFLLKPVRIEELSNIWQHIFRKQMQDHKNNNMVGNLEKPGHPPSILAMARATPATTKSTATEALLAPLENEVRDDMVNYNGEITDIRDLRKSRLTWTTQLHRQFIAAVNHLGEDKAVPKKILGIMKVKHLTREQVASHLQKYRMQLKKSIPTTSKHGATLSSTALDKTQDHPSRSQYFNQDGCMEIMDYSLPRDDLSSGSECMLEEQNDYSSEGFQDFRWDSDKQEYGPCFWNF

SEQ ID NO: 4893 - protein, 244 aa, Wigglesworthia glossinidia endosymbiont of Glossina brevipalpis
MNFNKKISLVTGANRGIGKSIAKELLKRNSIVIGTSTSKEGVDIINNYVKKQGKGIVLNLLDKNSIKLCIEKIKKNFGDVDILINNAGTNKDELLIRMKENSLNHVININLISVFIISKIVIKGMIKKRYGRIINIGSVSGFTGNIGQTNYSASKSGLTGFTKSLAREVAKKGITVNMVSPGFIKTDMTKSLSENNKKNILSNIPVNRFGSTKDVANAVIFFASDLSSYITGETMHVNGGIYMK

SEQ ID NO: 4894 - protein, 241 aa, Rhodospirillum rubrum
MTNVRRSRSANGTATRLGCYAIRGDPKPPLSPIKDQVGHAARRDRVMEQASKGSGGGDWLIRGVFSLGLALASFGGPASAQAAGAHDYSFPAIDGGTLPLAAWAGHPVLVVNTASECGFTAQYEGLEALWKAYRAKGLIVLGVPSNDFGGQEPGSAAEIKDFCESTFAVDFPLTDKTAVSGARAHPFYAWAKASRPDLSAPRWNFHKYLIAPDGSLAASFSALTDPKDRDLTDAIDKLLEK

SEQ ID NO: 4895 - protein, 367 aa, Triticum aestivum
  unsure (1)..(367): unsure at all Xaa locations
MAGAAPDRAALTVGPGMDMPIMHDSDRYELVRDIGSGNFGVARLMRDRRTMELVAVKYIERGEKIDENVQREIINHRSLKHPNIIRFKEVILTPTHLAIVMEYASGGELFERICKNIRFSEDEARYFFQQLISGVSYCHSMQVCHRDLKLENTLLDGSPAPRLKICDFGYSKXSSVLHSQPKSTVGTPAYIAPEVLLKKEYDGKIADVWSCGVTLYVMVVGAYPFEDPEEPKNFRKTIQRILSVQYSIPDNVDISPECRHLISRIFVGDPALRITIPEIRSHNWFLKNLPADLMDDDSMSSQYEEPEQRMQTMDEIMQILTEATIPPACSRINHILTDGFDMDDDMDDLESDSDLDIDSSGEIVYAM

SEQ ID NO: 4896 - protein, 463 aa, Streptococcus pyogenes MGAS315
MTIFRKKKKYSNKTEMQRHFKVIDLIFLGLGSMVGTGIFTVTGIGAAKYAGPALTISIIISAIAIGILALFYAEFASRMPSNGGAYSYVYATLGEFPAWLVGWYIIMEFLTAISSVAVGWGSYLKGLLANYNIVLPNALNGTFNLKNGTYIDILPVLVMFFVTGIVLMNSKLALRFNSFLVILKFSALALFIFVGIFFIDHNNWFHFAPYGVGQITGGKTGIFAGASVMFFAFLGFESISMAVDEVKEPQKTIPKGIILSLIIVTALYIVVTTILTGIVHYTKLNVPDAVAFALRNIRLYWAADYVSIVAILTLITVCISMTYALARTIYSISRDGLLPKSLYTLTKKNKVPQNATLVTGLLAMICAGIFPLSSLAEFVNICTLAYLIILSGAIIKLRRIEGEPKANEFKTPLVPFLPMLAIIICLSFMSQYKAFTWIAFAIATIIGTLIYLAYGYTHSIENK

SEQ ID NO: 4897 - protein, 399 aa, Desulfitobacterium hafniense
MCEKTHTMIQRGQEVVMNTYGRLPMAIVKGKGTTVWDIEGKQYLDFVTGLAVSSLGHSHPAVVEAIQKQAEEILHTSNLYWIPNQIALAEKLVEHSFADQVFFCNSGAEANEAAIKIARKYAKEHYSEDKYEILTLVNSFHGRTLATLTATGQTKYQKGYAPLPEGFTYVPINDLAQLEEKMNPKVAAVMLEPIQGEGGVFPLEVEFLAKARKLCDDYGALLIFDEIQVGLGRTGKLFAYEWSNVVPDIMTLAKALGGGVPIGVMLAKEKVASTFKPGDHASTFGGNPLATAVGCAVMDVLTEEGFLEDVQKRAQYFKQELQKLADKYQTGTEIRGQGFILGWPLDRLGAEIVEGAREKGLLINFVGGKALRFLPPLNVSYQEIDEAITILDQIFAECW

SEQ ID NO: 4898 - protein, 393 aa, Triticum aestivum
  unsure (1)..(393): unsure at all Xaa locations
ASTPKTHTAPPHTASNPNPSPTPTHAARRTADQAATHPDPVQDPDQAGTPGAVAHLRHGGALPSATPPQAGESPSPSLPGREGAILLLQACREAAGARFDKAEVHANRRAGEITAQAIRASGWRXPDVVLPTKLFWAGXGANDKGLSRQHVVEGLQALLKRLDMEYVDVVYCHRPDATTPIEETVRAMTWAIDQGWAFYWRRSERTAQHFTEAWAVASRLNPVVPTLEQREYHVVSPSLQXMTFGFTKWTLLGFRGFSTGNYXIGRILAGKVLPLEKYKSLNPMSPVVDSKNLANGFMAVASDLGVSIALMGIAWELSVSPAHRGIARWAPPHNGSAGCNRAESPGQIVATMNALAGGRLLTSSIRETNEAVVQRMPRCLDSYRCTRSVGRLR

SEQ ID NO: 4899 - protein, 309 aa, Fusobacterium nucleatum subsp. nucleatum ATCC 25586
MKKILIMGGNQFVGKEIAKNFLEKDYTIYVLNRGTRKNIEGVFFLKVDRDNLIEMENILKDIEVDIIVDVSAYTEEQVDILHKVMKNGFKQYILISSASVYNNIECTPVNEGCQTGENLIWGDYAKNKYLAEKKTIENSNLYNFKYTIFRPFYIYGIGNNLDRENYFFSRIKYNLPIFIPSKNNIIQFGYVEDLALAIESSIENSDFYNQIFNISGDEYVTMSEFAEICGKVMAKKAVIKYVNTEENKIKARDWFPFREVNLFGNISKLENTGFRNTYSLIQGLEKTYKYNDENDLITKPILNKLELEN

SEQ ID NO: 4900 - protein, 283 aa, Triticum aestivum
MPGMEEAEDYASCAFSLTCPEDGAELGDGVVDDGDLFLFYVGGGAAADDEDGDDEYVEQLVSKEASFCSSSDSGDADCSSAASEDWFLQARLAAVKWILETRGCFGFGPTPRRGCTEEEVEDDVVVCVQRAAMPWAARLLSVACVSVAAKMEEYCAPALSELDAGGGYEFCFASVRRMELLVLSTLGWRMAAVTPFDYLPCFSSRLDRHDGRGGGGLDPAGVALKSIGSICATAEAGSVLDYMPSTAAAAAILVASYEALLTKEALESKMDNLSPSCPIEKPG

SEQ ID NO: 4901 - protein, 169 aa, Leavenworthia stylosa
DTDRVGMIHDGESRFSIKGKPIHHFLGTSTFSEYTVVHSGQVAKINPEAPLDKVCIVSCGLSTSLGATLNVAKPKKGQSVAVFGLGAVGLGAAEGARIAGASRIIGVDLNSNRFEQAKKFGVTEFVNPKEHDKPVQQVIAEMTNGGVDRSVECTGSVRAMIQAFECVHD

SEQ ID NO: 4902 - protein, 321 aa, Oryza sativa; identical to SEQ ID NO: 2971

SEQ ID NO: 4903 - protein, 228 aa, Gossypium australe
FTSLCHTDVYFWEAKGQTPLFPRIFGHEAGGIVESVGEGVTHLKPGDHVLPVFTGECGNCRHCKSKESNMCDLLRINTDRGVMLSDGKTRFSINGKPIYHFVGTSTFSEYTVAHVGSVAKINPAASLDKVCILSCGISTGLGAALNVAKPTKGSTVAIFGLGAVGLAAAEGTRIAGASRIIGVDLNPNRFEEAKKFGCTEFVNPNDHNKPVQEVLAEMTNGGVDRSVE

SEQ ID NO: 4904 - protein, 417 aa, Streptomyces avermitilis MA-4680
MGRGVTRRRAVGNGVLVSTTETLIASADAHSAHTYHPLPVVVATADGAWMTDVEGRRYLDLLAGYSALNFGHGHRRLIDAARAQLERVTLTSRAFHHDRFAAFCTQLAELCGMEMVLPMNTGAEAVETAVKTARKWGYRVKGVPAEMAKIVVAGNNFHGRTTTIISFSTDPEARADFGPYTPGFEIVPYGDLTAMRSALTENTVAVLLEPIQGEAGVLVPPAGYLAGVRELTRDRNVLFVADEIQSGLGRTGRTFACEHEGVVPDVYVLGKALGGGIVPVSAVVASSEVLGVFRPGEHGATFGGNPLACAVALEVIAMLRSGEYQARAAELGEHLHRELGVLAGTGRVTAVRGRGLWAGVDVDPAYGTGREISEKLMDRGVLVKDTHGSTIRIAPPLVISKEDLDWGLAQLRGVLGV

SEQ ID NO: 4905 - protein, 363 aa, Buchnera aphidicola (Uroleucon rudbeckiae)
MKKKYRIAVLPGDGIGPEVMREAYKILNILKNHFSLPLETREFNIGGSAIDQEGTALPKKTLLGCENSDAILFGSVGGKKWDDLPINQRPERASLLPLRKHFNLFANLRPAKLYSELKYLSPLRSDIIKNGFDILCIRELTGGLYFGKPTGRLKKNNIEYAFDTEIYYNYEITRIAHLAFQLAQTRNFKICSIDKSNVLNSSVLWREIVKKVSKNYPDVHLSHLYIDNATMQIIKDPNQFDILLCSNLFGDIISDECAIITGSIGMLPSASLNEKKFGLYEPAGGSAPDIEGKNIANPIAQILSVSMLVRYGMNLKTIADKIDQSVISVLKKGYRTADISNNNNYLKTNEMGDVIANTLISGE

SEQ ID NO: 4906 - protein, 355 aa, Oryza sativa
MAAANGSACGGGGVDKEKEEFKQIYGVLKEELLRDPAFEFTDSSRQWIDRMLDYNVPGGKCNRGLSVVDSYKLLKGTNVLSQEDMFLASTLGWCVEWLQAYFLVLDDIMDDSHTRRGQPCWFRVPQVGSIAINDGIILRNHITRMLRLHFRGKLYYADLLDLFNEVEFKTASGQLLDLITTHEGEKDLNKYNIGVHRRIVQYKTSYYSFYLPVACALLLSGEDLTKYGAVEDILVKMGIYFQVQDDYLDCYGDPKFIGKIGTDIEDYKCSWLVVQALERADESQKSVLFENYGKKDPACVAKVKSLYRELNLEAVFLDYENESYKKLIADIEAQPSIAVQNVLKSFLHKIYKRQK

SEQ ID NO: 4907 - protein, 504 aa, Listeria monocytogenes
KPLANLKNLGWLFLDENKIKDLSSLKDLKKLKSLSLEHNGISDINGLVHLLQLESLYLGNNKLTDITILSRLTKLDTLSLEDNEISDIVPLSGLTKLQNLYLSKNHISDLRALAGLKNLDVLELFSQECLNKSINHQMNLVVPNTVKNIDGSLVTPEIISDDGDYEKPNVKWHLPEFINEVSFIFYQPVTVGKAKARFHGRVTQPLKEVYTVSYDVDGTVIKTKVEAGTRITAPKPPTKQGYVFKGWYTEKNGGHEWNFSTDYMSGNDFTLYAMFKAETTEKAVNLTRYVKYIRGNAGIYKLPREDNSLKQGTLASHRCKALTVDREARNGGELWYRLKNIGWTKAENLSLDRYDKIEYDKGVTAYARVKNAPGNAVWTKPYNTAGATLVNKLSVYQGKNMRILREAKTPITTWYQFSIDGKVIGWVDTRALNTFYKQSMEIPIQLTRYVSANKGNEAYYKVPVVDSPIKWGTLAKYKNQTLIVDRTATVEGQLWYRIRTSSTF

SEQ ID NO: 4908 - protein, 735 aa, Neurospora crassa
MHLRIFAVLAATSLAWAETSEKQARQAGSGFAAWDAAYSQASTALSKLSQQDKVNIVTGVGWNKGPCVGNTPAIASIGYPQLCLQDGPLGIRFGGSVTAFTPGIQAASTWDVELIRQRGVYLGAEARGVGVHVLLGPVAGALGKIPNGGRNWEGFGPDPYLTGIAMSETIEGIQSNGVQACAKHFILNEQETNRDTISSVVDDRTMHELYLFPFADAVHSNVASVMCSYNKVNGTWACENDKIQNGLLKKELGFKGYVMSDWNAQHTTNGAANSGMDMTMPGSDFNGKTILWGPQLNTAVNNGQVSKARLDDMAKRILASWYLLEQNSGYPATNLKANVQGNHKENVRAVARDGIVLLKNDDNILPLKKPSKLAIIGSSSVVNPAGRNACTDRGCNTGALGMGWGSGTADYPYFVAPYDALKTRAQSDGTTVNLLSSDSTSGVANAASGADAALVFITADSGEGYITVEGVTGDRPNLDPWHNGNQLVQAVAQANKNTIVVVHSTGPIILETILAQPGVKAVVWAGLPSQENGNALVDVLYGLVSPSGKLPYTIAKSESDYGTAVQRGGTDLFTEGLFIDYRHFDKNGIAPRYEFGFGLSYTNFTYSSLSITSTASSGPASGDTIPGGRADLWETVATVTAVVKNTGGVQGAEAPQLYITLPSSAPSSPPKQLRGFAKLKLAPGESKTATFILRRRDLSYWDTGSQNWVVPSGSFGVVVGASSRDLRLNGKFDVY

SEQ ID NO: 4909 - protein, 242 aa, Petunia x hybrida
MEFQSDLTREISPQRKLGRGKIEIKRIENTTNRQVTFCKRRNGLLKKAYELSVLCDAEVALIVFSSRGRLYEYANNSVKATIERYKKACSDSSNTGSIAEANAQYYQQEASKLRAQIGNLQNQNRNFLGESLAALNLRDLRNLEQKIEKGISKIRAKKNELLFAEIEYMQKREIDLHNNNQYLRAKIAETERSQQMNLMPGSSSYDLVPPQQSFDARNYLQVNGLQTNNHYPRQDQPPLQLV

SEQ ID NO: 4910 - protein, 394 aa, Zea mays subsp. mays
LGAARRARLPPGEMGWPLVGGMWAFLRAFKSGKPDAFIASFVRRFGRTGVYRSFMFSSPTVLVTTAEGCKQVLMDDDAFVTGWPKATVALVGPRSFVAMPYDEHRRIRKLTAAPINGFDALTGYLPFIDRTVTSSLRAWADHGGSVEFLTELRRMTFKIIVQIFLGGADQATTRALERSYTELNYGMRAMAINLPGFAYRGALRARRRLVAVLQGVLDERRAARAKGVSGGGVDMMDRLIEAQDERGRRLDDDEIIDVLVMYLNAGHESSGHITMWATVFLQENPDMFARAKAEQEAIMRSIPSSQQGLTLRDFRKMEYLSQVIDETLRLVNISFVSFRQATRDVFVNGYLIPKGWKVQLWYRSVHMDPQVYPDPTKFDPSRWEGHSPRAGTFL

SEQ ID NO: 4911 - protein, 253 aa, Physcomitrella patens
MVVPSLPAFGGQNAMLRRNIDNNTDTLISLLQGSCSPRVSMQQGYVAVPRSSESLENMMGACGQKLPYFSSFDGPSVEEQEDVDEGIDEFAHHVEKKRRLSLEQVRSLERNFEVENKLEPERKMQLAKELGLQPRQVAVWFQNRRARWKTKQLERDYETLKKAYDRLKADFEAVTLDTSALKAEVSRLKGISNDDVKPAEFVQGKCDTTSHPASPAQSERSDIVSSRNRTTPTIHVDPVAPEEAGAHLTIELG

SEQ ID NO: 4912 - protein, 296 aa, Rhizobium sp. USDA 1953
  unsure (1)..(296): unsure at all Xaa locations
RGKTQIKEFDAFPTLXQLPLWGFDGSSTQQAEGRSSDCVLKPVAVYPDPVRTNGALVMCEVMMPDGKTPHPSNTRATVLDDESAWFGFEQEYFFYKNGRPLGFPEQGYPAPQGPYYTGVGYKNVGDIARQIVEEHLDICLAAGINHEGINAEVAKGQWEFQVFGKGSKXAADEVWLARYLLLRLTEKYGIDVEFHCKPLGDTDWNGSGMHANFSTAYLREVGGKDYFEALMAAFEKNLHDHINVYGPDNHLRLTGKHETAPWDKFRYGVADRGASIRVPHSFVNNGYRGYLEDRRP

SEQ ID NO: 4913 - protein, 342 aa, Xanthomonas campestris pv. campestris str. ATCC 33913
MTSLTNRRIVLASRPHGEPGTDNFRIEDAPVPPTGHNQILVRNRFLSLDPYMRGRMDEGPSYAAPVAIDAVMEGGTVGEVLESNHPDYHPGELLVLGGGWQTHTVLEPTAPLRKLPKDDALPLSTALGVYGMPGFTAYAGLHEIGKPQAGETLVVAAASGPVGATVAQLARLQGLRVVAIAGGEEKVRYLRDTLRVDVALDHRAEDFAAQLRAATPDGIDVYFENVGGKVFDAVMPQLNDFARIPVCGVVATYNSRGQVAPGPDRLPDFIGQVLRKRLTVRGFIQHDFIRLMPAFLREMGQWLREDKIQYREHVLHGLDSAPQGLISLLRGENFGKAVVALD

SEQ ID NO: 4914 - protein, 483 aa, Xylella fastidiosa Temecula1
MLKKHLFIVKPIEPTNHTGTGKGGTQLKRSLTAGQLVMLGIGAVIGAGIFVLSGHAAAEYAGPAVVLSYILAGIACALAGLCYAEFAAMLPVSGSAYSYAYATLGEFTAWFIGWNLILEYMFSASTVAVGWSGYLNSFLSSFGYGLPASLSSAPLDVVDGRLIYSGGLINLPAVAIVAAISGLCYVGITQSAFVNSITVAIKVSVIVLFIAFAARYVNPDNWVPFVPDNVAPGKYGIEGVIRGAAVVFFSYIGFDAVSTTAGEAKNPQRDMPIGILGSLAICTVIYIAFSGVLTGLMHYSQLDTPKPVATALETYPTLSWLKHVVEIGAIAGLSSTMLMMLMAQPRIFYAMSQDGLLPKLLSKVHPKFQTPHVGTLIVGACACALAGLFPISLLGDLVSMGTLLAFATVCIGIVVLRRTRPDLPRPFRVPVYWVIAPTGAAACLYLFWQPFTEHWPLMVGWTVLGLVMYGLYGYQHSKLRHGG

SEQ ID NO: 4915 - protein, 483 aa, Rickettsia prowazekii
MAAFTPITIAYGDGIGPEIMEAVLYILRKAEARISLETIEVGEKLYKKHYTSGISEESWDVIQRTGIILKAPITTPQSGGYKSLNVTIRKTLQLFANIRPVVSFYPFTRTLHPNLNLTIIRENEEDLYSGVEYRQTHNMYESMKLISHTGCKKIIRYAFEYAIKNNRKKVTCLTKDNIMKFSDGIFHRVFNEIAKEYPQINNEHYIIDIGTAKLATKPEIFDIIVTSNLYGDIISDVAAEISGSVGLAGSANIGQHYAMFEAVHGSAPDIAGKGIANPSGLLNAAIMMLVHIGQGDIASLIENAWKKTIEDGVHTFDIYNEHSSSKKVCTKEFAVEVIKRLGQLPITLPKAAYPLIVKKQESNIDYKIDTREVKKLVGTDIFINMHVFSAHDIADKINKLDIGNFELKTISSKGLKLWPHDSRFEIISDHWCCRFMNKDGTEIKHLDITMLLQSLSKANIDFIKVENLFEFDGVAWYSLAQGE

SEQ ID NO: 4916 - protein, 190 aa, Zea mays
ACLQGHDREGRPLIYGFGARHHPARRDLDEFKRYVVHVLDATVARLPPPGDGRQEKFAAVADLAGWGYANCDIRGYLAALDIMQSYYPERLARVFLVHVPYVFMAAWKIVYPFIDDNTKKKVVFVPDKDLDRTLREAIDDSQLPEIYGGKLKLVTQAANYKPLVRHMHAGGFPLQSDVILSRNIFPCYFK

SEQ ID NO: 4917 - protein, 69 aa, Glycine max
  unsure (1)..(69): unsure at all Xaa locations
SQSSHPWDQICTDIEDFKCSXLIVKVLELSNEQXKTVLQENYGKPDPENRAQVKALYNELNLQGVFEEY

SEQ ID NO: 4918 - protein, 352 aa, Lactobacillus plantarum WCFS1
MEAVVKTESGYDNMELKQIPIPEVTGDKVLLKVAYTGICGTDIHTFKGQYANAVTPLVLGHEFSGEVVEVGPDVKTLKPGDRVTSETTFATDGTCVYCQDKEYNLCPNRVGIGTKANGSMANYVLTREESAHILPDNVSYKMAAMSEPLASCVHAMYQKTPFTLHDTLLIMGPGPMGLLSLQIAKEIGAFVIVSGITKDADRLQIAKELGADIIVDTQKEDLAKVVMDATDGVGVTKVYDCSGATPAVNSALPLIRKGGTFQQVGLFAKPMNELDERSIIQHEITYRGSRSQNPYDWAIALHLESKGAINQDAMITKVFDLEHWRDAFDAMMAGKELKVMIASNPDDPDLAD

SEQ ID NO: 4919 - protein, 152 aa, Avicennia marina
MPKAVAVLSSNEGVRGTVYFTQEGDGPTTVTGNLSGFKSGPHGFHVHALGDTTNGCMSTGPHFNPAGKDHGAPEDEVRHAGDLGNITVGEDGTAAVNIVDKQIPLSGPHSIVGRAVVVHADPDDLGKGGHELSKTTGNAGGRVACGIIGLQG

SEQ ID NO: 4920 - protein, 358 aa, Campylobacter jejuni subsp. jejuni NCTC 11168
MKTYKVAVLAGDGIGPLVMKEALKILTFIAQKYNFSFEFNEAKIGGASIDAYGVALSDETLKLCEQSDAILFGSVGGPKWDNLPIDQRPERASLLPLRKHFNLFANLRPCKIYESLTHASPLKNEIIQKGVDILCVRELTGGIYFGKQDLGKESAYDTEIYTKKEIERIARIAFESARIRKKKVHLIDKANVLASSILWREVVANVAKDYQDINLEYMYVDNAAMQIVKNPSIFDVMLCSNLFGDILSDELAAINGSLGLLSSASLNDKGFGLYEPAGGSAPDIAHLNIANPIAQILSAALMLKYSFKEEQAAQDIENAISLALAQGKMTKDLNAKSYLNTDEMGDCILEILKENDNG

SEQ ID NO: 4921 - protein, 355 aa, Zea mays
LLFPAPPPSVLATPLSTACPAAPRRGQITSPPSACSRAGTKDGRTGHPWGTQKRSRYLVATMDHGGGGGSGIWIRAAVAVAAGAAIAARAVRRKSVDSSAVFVGVPAMVAHTVAGYRFAGLLLVFFFTSSRVTRVGEARKRALDPEFKEGGQRNWKQVLSNSGIASILVVLIASVTGGTDRCLDSKESTLVTALIGGVIGHYACCNGDTWSSELGILSKAEPRIITIVQRVRKGTNGGVTIDGLLAAAAAGFSIGLAFVLIGFFTTQCAPDVFWNQLLAIPLATAAGLCGSLIDSFLGATVQYSGFCSVRKKVVGVDGPTVTRISGMNILDNNGVNVVSVFLTTALTAVACPYIF

SEQ ID NO: 4922 - protein, 219 aa, Chelidonium majus
  unsure (1)..(219): unsure at all Xaa locations
GLVKKAHEISVXCDAEVALIVFSTKGKLFEYSTDSGMERILERYERYSYAERELVASELDQGNWSLEYTKLKAKIEILQKNQRHFMGEDLESMSLKELQNLEQQLDTALKQIRSRKNQLMYESISELQKKEKVLQEQNNQLGKKLKEKEKEVAQQQAQWDQQSQGQSSPSFLLSQSLPSLNIGGSYHMRGSNGSEEEGVRPQTTRTNTTLMPPWMVHHL

SEQ ID NO: 4923 - protein, 123 aa, Zea mays
MAAADVEYRCFVGGLAWATSNESLENAFASYGEILDSKVITDRETGRSRGFGFVTFSSENSMLDAIENMNGKELDGRNITVNQAQSRGGGGGGGGYGGGRGGGGGYGGGRRDGGYGGGGGWRD

SEQ ID NO: 4924 - protein, 339 aa, Rhodopseudomonas palustris
MIGTVPCGAAGCAPQWAAPRISQGHFMDIRNLGGSGLRVSVVGLGCNNFGQRTDPETSKKVIHKAIDLGVTLFDTADIYAGMGGSETVLGNVLGDRRKDIVLATKFCKPMATDGTKQGASRRYIVEAVEASLKRLKTDWIDLYQQHDYDPLTPIDETLRALDDLIRAGKVRYIGNSNFPAWRIAEAEYVARALGTHRYVSCQDEYSLVVRDIEKDLLPAAQEYKLGLLPFFPLASGLLTGKYQRGTEAPAHTRFAKMPAIRDRYFTDANLDLVDKLKGFAEARGHSLLELAFSWLACRPQVSSVIAGATTPEQIEQNVKAVSWKLTAEEMAEVDAITKG

SEQ ID NO: 4925 - protein, 149 aa, Capsicum annuum
MADQLTDDQISEFKEAFSLFDKDGDGCITTKELGTVMRSLGQNPTEAELQDMINEVDADGNGTIDFPEFLILMARKMKDTDSEEELKEAFRVFDKDQNGFISAAELRHVMTNLGEKLTDEEVDEMIREADVDGDGQINYDEFVKVMMAK

SEQ ID NO: 4926 - protein, 325 aa, Nostoc punctiforme
MKKQFLATGFFLLSLMFPLKASAQNYDDIYVFGDSLSDTGNVFNFTNGAIPPNPTYFNGRFSNGPIWVEYLASELGLTFNPNNNFAFGGATTGTDNLGLSFLPGLKQEINDFTTTNNSANPNALYIIWAGTNDYLEYFYGNTPNPTESVSNLSSAITSLAGVGAENILVVNLPDLGKFPVTGDNSQTASALSTFTNVHNSDLTKTINLLNQELSPETNIIPLDVNSLYNRIIATPEEFGFTNVTDSCIGDLSVVPIEVLVKPVVCNPDQFLFWDEVHPTTATHQLIGELAFLALKSASVPESSNVLGVLIFAALCVISLRKRHSY

SEQ ID NO: 4927 - protein, 333 aa, Oryza sativa (indica cultivar-group)
MARWAIAIHGGAGVDPNLPEHRQEEAKRVLARCLQVGVDALRSGAAALDVVEAVVRELESDPFFNSGRGSALTRLGTVEMEASIMDGRGRRCGAVSGVSTVKNPVSLARLVMDKSPHSYLAFDGAEQFARDQGLEVVDNSYFITEDNVGMLKLAKEANSILFDYRIPLSGSETCGAQAVSSDNSHGNGMVMNGLPISIYAPETVGCAVVDSSGHTAAATSTGGLMNKMTGRIGDSPLIGSGTYACGACAVSCTGEGEAIIRSTLARDVAAVMEYRGAGLQEAVDYCVKERLDEGFAGLIAVSSTGEVAYGFNCTGMFRGCATEDGFMEVGIWE

SEQ ID NO: 4928 - protein, 173 aa, Prunus armeniaca
MEHEETGCQPHPEGPILCVNNCGFFGSVATRNMCSKCHKDMMLKEEQAKLAASSFGNIVNGTSNSNGNEPVVAAGVDVQAHLVEPKTISLQPSFSFGSGSGGSGEAKPEGPKRCGTCNKRVGLTGFNCRCGHLFCAVHRYSDKHDCPYDYHTAARDVIAKANPVVKADKLEKI

SEQ ID NO: 4929 - protein, 539 aa, Schizosaccharomyces pombe
KSSRGMYSSSRQSSRSGSNTHSHAGPGFGGPSERKGISRLGIDRGFSSSGAGFGSGSNYKSAPSRGVSHHGHGGMSGSHRGSQRGSRRGGGERDKPDPSSLTIPVDQVAPLQLSANRWQPKKLTEKPAETKGEDEEALLPPEVVQRKVKGSLTKMTLEKFDKISDQILEIAMQSRKENDGRTLKQVIQLTFEKATDEPNFSNMYARFARKMMDSIDDSIRDEGVLDKNNQPVRGGLLFRKYLLSRCQEDFERGWKANLPSGKAGEAEIMSDEYYVAAAIKRRGLGLVRFIGELFKLSMLSEKIMHECIKRLLGNVTDPEEEEIESLCRLLMTVGVNIDATEKGHAAMDVYVLRMETITKIPNLPSRIKFMLMDVMDSRKNGWAVLNEVGKGPGTIAEIHEEAERKKALAESQRPSSGRMHGRDMNRGDSRMGGRGSTPPPSSSDWSNNKDGYARLGQGIRGLKSGTQGSHGPTSLSSMLKGGSVSRTPYRQNSALRREQSVRAPPSNVAVTSANSFELLEEHDHDNDGGQKDSNSKTSS

SEQ ID NO: 4930 - protein, 845 aa, Ralstonia solanacearum
MNPSTAPKTMKFGFIAHPTSVALKRHVKIVDLLERTIAEQDRGYRDDRWQWRNLVPFADFGRIVSAQGAVCEGILHYMPLTAEEMLSQPRAIAQRVVDAVESLKDQGAQVVGLGGFTAIVGNRGLQTLERTGIPVTTGNSLTAYAAYRNVLESMDRLGVEPADTEVAVVGYPGSIALVIAKLLAGHGCRLCLVHRGSEAQGRQGLAYLPEPMHAQVRLSNDIEHCYEHVQFYVAATSTGGLIDPYRLRPGSVVVDAALPRDVKPYRKDRNDILIIDGGLVSASSALRFGAESMGLAPKKFLNGCLAETLILGLEGRAEAFSIGRELPEDKVLEIGRIAELHGFSPSPMASYGEPVKDRHFAALRPFHRPRTQSPAGLEGESLREHALRSFGEHINPILRDFYAFNHIERVFQHGRGCTLTDINGQAFLDFVAGYGCLNTGHNHPRIKAALLDYLQREHPTFVQYVSVPLQTSQLAQRLSELAPGRMERVFFSNSGTEAVEAALKLALAAMSKPRVLYCDNGYHGKTLGALSVTGRDKHRTPFKPLLPRCDAIPFGDADALEAALQTGDVGAFIVEPIQGEGGVIIPPDGYLAKVRQLCSAYDCILILDEIQTGLGRTGKMFACEWEGVEPDILILSKSLSGGAVPIGATLSRKAIWDRAYGNIDTFALHTSTFGGGNLAAAAGLATLDVLAEEDLAGNAARVGESLRHQLTAATRDYPFIREVRGRGLMIAIEFRHSYAGGIEAFIREFANRMPGDAAATYRMLSGKARQHIRAAIEEVEKSFEEMFVLRFVTKLSQEYGILTFVTANNNRVMRIQPPLVLNEDQAQSFVDAFARVCHDMSTFLD

SEQ ID NO: 4931 - protein, 327 aa, Ralstonia metallidurans
MSNPMRTRVTRLLGIDYPIIQGGMQWVGLAELASAVSNAGGLGILTALTQPTPDALRNEIARTREMTDRPFGVNLTILPSINPPPYAEYVDAIIDGGVRIVETAGNSPKDFIARFKAAGVTIVHKCTTVRHALSAERNGVDIVSIDGLECAGHPGEDDVGGLVLIPAAARALEIPVIASGGIADGRGMAAALALGAEGVNMGTRFCVTKEAPIHDNIKQALVNGSERDTALIFRTLKNTARVFRNAIAEEVVSMERRPGGCVFDDIRPLVTGTRGRAALQSGEVDNGVVSAGQCIGLIDDIPTCAELISRMVSDCQNRIEATRKYFI

SEQ ID NO: 4932 - protein, 499 aa, Listeria monocytogenes EGD-e
MKRNKTALRILVTLAVVLAITFWVGMSSKEVQAAVIEHPTPINEIFTDPVLTDNVKTLLGKADVTDEVTQTDLDSVTHLSAKSAGITTIEGLQYLTNLSELELIDNQVTDLNPLTNLTKITELRLSGNPLKDVSALAGLKNLKTMDLIYTDITDVTPLAGLSNLQVLNLDINQITDITPLAGLSNLQFLSFGSTQVSDLTPLANLSKLTTLNAMNSKVSDVSPLTGLSNLTEVYLEENQISDVSPLAKLPNLSIVTLTNQTITNQPVFYQNKPIVPNVVTGLSGELIAPDTISDNGTYTSPNLTWDLNSFINSVSYTFNQSVTFKNTTAPFSGTVTQPLTEVYAVVFDVDGEQTSAMVGVNELINEPTAPAKEGYIFDGWYDAKTDGNKWDFGIDKMPASDITLYAKFTENEEPNASSPINVEPNDNNSDNAEPNASSSNNVQENGTNEGINNLNSSGEDKVNIKLPITGDKLNVLPIFVGAVLIGIGLVLFRKKRQTK

SEQ ID NO: 4933 - protein, 180 aa, Bacillus halodurans
MKAELKTERLYLREMTLDDAQALFCIWSDPDVTKFMNVEAFKTEAQAIDMIKLLTSLSAEKKALRFTMIETGTNTVIGSCGYNEIDWEVGSAEIGYELDQSYWGKGYGTEAITALIHYAFDHLQLKRMVAKVEPANVGSIKILEKLHFRDEGEVIENSKGKTTKLTVYVKRTSKEEGAQF

SEQ ID NO: 4934 - protein, 245 aa, Paxistima canbyi
ALSIAGAVQSQKLAVRAISQLQSLPGGDIKLLCDTVVESVRDLTGYDRVMVYKFHEDEHGEVVAESKRPDLEPYIGLHYPATDIPQASRFLFKQNRVRTIVDCHASPVRVIQDDGLMQPLCLVGSTLRAPHGCHAQYMENMGSIASLAMAVIINGNDEEVIGGRYATRLWGLVVCHHTSARCIPFPLRYACEFLMQAFGLQLNMELQLAAQLSEKHVWKTRTLLCDMLLRDSPPAIVTQSPSIMD

SEQ ID NO: 4935 - protein, 308 aa, Helianthus annuus
MAILSRYSSSNTLFCIEEQVHEDEDELTHQDSSAIHPLDLQDLCWEHEELVSLFTKEEEQQKQTPWPSSCTLSFRKEAVDWILKVKGCHGFTPLTAILAINYLDRFLSSLHFQKANTPWMIHLVAVTCLSLAAKIQETHVPLLLDLQLEESKFLFEAKNIQKTELLVMSTLKWRMNLVTPISFLDHIVRRLGLSNHLHWDFFKKCEAMILYLVADSRFVCYKPSVLATATMLCVVEEIDPTNSIGYKSQLLDLLKTTKDHINECYKLVMDLSYDNHNKGKRDENERTIYPVSPAGFIGFMCHESSNDS

SEQ ID NO: 4936 - protein, 531 aa, Sorghum bicolor
MATTATPQLLGGSVPQQWQTCLLVLLPVLLVSYYLLTSRSRNRSRSGKLGGAPRLPPGPAQLPILGNLHLLGPLPHKNLRELARRYGPVMQLRLGTVPTVVVSSAEAAREVLKVHDVDCCSRPASPGPKRLSYDLKNVGFAPYGEYWREMRKLFALELLSMRRVKAACYAREQEMDRLVADLDRAAASKASIVLNDHVFALTDGIIGTVAFGNIYASKQFAHKERFQHVLDDAMDMMASFSAEDFFPNAAGRLADRLSGFLARRERIFNELDVFFEKVIDQHMDPARPVPDNGGDLVDVLINLCKEHDGTLRFTRDHVKAIVLDTFIGAIDTSSVTILWAMSELMRKPQVLRKAQAEVRAAVGDDKPRVNSEDAAKIPYLKMVVKETLRLHPPATLLVPRETMRDTTICGYDVPANTRVFVNAWAIGRDPASWPAPDEFNPDRFVGSDVDYYGSHFELIPFGAGRRICPGLTMGETNVTFTLANLLYCYDWALPGAMKPEDVSMEETGALTFHRKTPLVVVPTKYKNRRAA

SEQ ID NO: 4937 - protein, 288 aa, Pseudomonas aeruginosa UCBPP-PA14
MVAQLAIIVVFISLCVHYIVAANGPGGLLSAKPFFNPDVSFATSMAGAAIAAYSFLGFDALSTLSEETRDPGRTLPRAILLVALIGGSVYVGSSYFMYLAHPSPAFEHVDGAAFEIARMIGGDLFFAVVLAGIIIAHFAAGMSFQASVGRLLYALGRDNQLPRKLFGALHPRYKTPAFNILLCGIFGCAGFALTIATATSLVNFGAFLAFSAVNLCALRLSFDTRLGDGAGLLHGVLCPLVGLVTAGWMLVSLDNDALIMGCSWLGLGAVYLACRTSFFRNPVPDALA

SEQ ID NO: 4938 - protein, 457 aa, Zea mays
MAASARDSADAAERVVDDHDGWASDGEMGMEMDVEGEFHDRDADRRDGGVDGDDEYLLLTRIRDTSAAEARAGKDIQGIPWERIHIARQDYRKARLEQYKNYENFPQSGELMDKLCKQVEKSSKYYEFQHNTRSVKPSILHFQLRNLLWATSRHDVYFMSNSTVTHWSSLSHKLSEVLDFSGHIAPVEKHPGSLLEGFSGVQVSTLAVNEGLLVAGGFQGELIGKDLEGCNIKFCARTTLSDNAITNAIDIHRSTSGSLRITVSNNDCGVREYDMERFQLLNHYRYNWPVNHTSVSPDKKLLAVVGDDRDALLVDSRNGKVTSTLVGHLDYSFATAWHPDSRTFATGNQDKTCRIWDTRNLSTSLAVLRGNIGAIRCIRYSSDGRFLVFSEPADFVHVYSVAADYKKRQEIDFFGEVSGITLSPDDESLFVGVCDRVYASLLQYRMIHAFDYLDSYV

SEQ ID NO: 4939 - protein, 352 aa, Sinorhizobium meliloti
MSGAPTRTRFARLYGPRDLRLEVADVPAPGDGEVLLKMAAGGICGSDLHYYQDGGFGPVRVREPIIPGHEASGRVAVLGAGVSGLAIDDLVAVNPSQPCGTCRFCGEGLPVHCLDMRFLGSAMRLPHTQGMFRDWLVVPAVQCHPAGSQVSPGEAACAEPLAVCLHAAAQAGEIRGKKVLVTGAGPIGALVVAAARHAGADEIVVTDLADAALDRAKAMGATRIVNVHRDPAGLAAYEADKGKFHVAFECSAAEPALRGAVAAVRPRGTIVQVGVTGEITLPLHALVGKELRLVGSQRFDGEFALAVALISDRRIDVRPIISHQFPVDEAVRAFEQAGDRSAACKVQLTFLS

SEQ ID NO: 4940 - protein, 581 aa, Zea mays
  unsure (1)..(581): unsure at all Xaa locations
MGEVEDMYTQDGTVDMKGNPAVKKGTGNWRACPYILANECCERLAYYGMSTNLVNYMKTRLGQVNSVASNNVTNWQGTCYITPLIGAFFADAYMGRFWTIAIFMIIYIFGLALLTMASSVKGLVPTSCGDKDVCHPTDAQAAVVFVALYLIALGTGGIKPCVSSFGADQFDENDEREKKSKSSFFNWFYFSINIGALVASTVLVYVQTHVGWGWGFGIPAVVMAIAVGSFFVGTPLYRHQKPGGSPLTRIAQVLVACARKWNVAVPADKSRLHETVDGESGIEGSRKLEHSEQLACLDRAAVVTAEDGAEASPWRLCSVTQVEELKSVIRLLPIWASGIVFAAVYSQMSTMFVLQGNTLDQSMGPRFKIPSATLSMVDTISVIVWVPVYDRAIVPLVRSYTGRPRGFTQLQRMGIGLVVSIFSMVAAXGVLDIVRLRAIARHGLYGENDIVPISIFWQIPQYFIIGCAEVFTFVGQLEFFYDQAPDAMRSMCSALSLTTVALGNYLSTVLVTIVTHITTRHGRIGWIPENLNRGHLDYFFWLLAVLSLLNFLAYLVIASWYKYKKTADDYPGAKGEHGTEH

SEQ ID NO: 4941 - protein, 174 aa, Paeonia peregrina
DLLRINTDRGVMLNDGKSRFSINGQPIFHFVGTSTFSEYTVLHVGCLAKINEEAPLDKVCVLSCGISTGLGATLNVAKPKKGSTVAIFGLGAVGLAAAEGARIAGASRIIGVDLNPKRFDEARKFGVTEFVNPKDYNKPVQEVIAEMTGGGVDRSVECTGSIMAMMSAFECVHD

SEQ ID NO: 4942 - protein, 170 aa, Oryza sativa (japonica cultivar-group)
MRKHHNTRIRFFHVMITLKSSDGEPVEVTEASARISKVIGDKIDAGRGGEAIPLPHVDKKTLKKVIEYCDEHANENSDTDEQKEELKNWDKAFIDELDEDDGSFLFLVLLASSYLKIDGLLDLTYQRVADNSKAKTTEEIRKTFSTIEIELSDKEEEEQQQEEEIRPENV

SEQ ID NO: 4943 - protein, 312 aa, Hordeum vulgare subsp. spontaneum
MATAGKVIKCKAAVAWEAGKPLSMEEVEVAPPQAMEVRVKILYTALCHTDVYFWEAKGQTPVFPRILGHEAGGIVESVGEGVTELVPGDHVLPVFTGECKECAHCMSEESNLCDLLRINVDRGVMISDGQPRFTIDGKPIFHFLGTSTFSEYTVIHVGCVAKIDPEAPLDKVCLLSCGISTGLGATLNVAKPKKGMVVAIFGLGAVGLAAMEGARMSGASRIIGVDLNPAKHEQAKKFGCTDFVNPKDHTKPVQEVIVEMTDGGVDRAVECTGNADAMISAFECVHDGWGVAVLVGVAHKEAVFKTHPMNFL

SEQ ID NO: 4944 - protein, 124 aa, Glycine max
  unsure (1)..(124): unsure at all Xaa locations
MAKDGAGGGPDWNGLLKWSLAHGSDGTNPPRALSEEDRKWFMEAMQANTIDVVGRMKEIAQVMKTPNDVLQSHGVTPENIEDMLDELQEHVESIDMANDLHSIGGLDPLLGYLKNSHAGIXSKQ

SEQ ID NO: 4945 - protein, 305 aa, Miscanthus condensatus
IESVGEGVTDVAPGDHVLPVFTGECKECAHCRSAESNMCDLLRINTDRGVMIGDGKSRFSINGKPIYHFVGTSTFSEYTVMHVGCVAKINPEAPLDKVCVLSCGISTGLGASINVAKPPKGSTVAIFGLGAVGLAAAEGARIAGASRIIGVDLNPSRFEEARKFGCTEFLNPKDHKKPVQEVLAEMTNGGVDRSVECTGNINAMIQAFECVHDGWGVAVLVGVPHKDAEFKTHPMNFLNERTLKGTFFGNFKPRTDLPNVVELYMKKELEVEKFITHSVPFAEINKAFDLMAKGEGIRCIIRMEN

SEQ ID NO: 4946 - protein, 347 aa, Xylella fastidiosa Dixon
MLCVVVFFCCCMGCFLILASFREWSFMHYRRLGSTGLQLSVLSFGTWVTFGNQVARDEARNLVACAWDHGVNFFDGAETYAQGRAEQVLGDVIADLRLPRDGYCVSSKVFFGAVKEPRPTQCGLSRKHVHDACHAALKRLRVDYLDLFFCHRPDADTPIEETVRAMTTLIRQGKVLYWGTSEWSAAQIAEAIAIASREHLERPWVEQPQYNLLHRERVEREYVSLYAQGLGTTIWSPLASGLLTGKHNVGVASGSRLVQPGYEWLQREVLGEGEARLVQARRFSEVAADLGQLPTQLAIAWCLRNPHVSTVILGASRVAQLKENLQALQVVAALDAAAWRCVEAAME

SEQ ID NO: 4947 - protein, 89 aa, Oxalis unduavensis
  unsure (1)..(89): unsure at all Xaa locations
XINISGTNGEVMPGQWEYQVGPSVGIEAGDHIWASRYILERITEQAGVVLTLDPKPIDGDWNGAGCHTNYSTKSMRDEGGFEVIKKAIL

SEQ ID NO: 4948 - protein, 363 aa, Crucihimalaya wallichii
IRCKAAVAWEAGKPLVMEEVEVAPPQKHEVRIKILFTSLCHTDVYFWEAKAQTPLFPRIFGHEAGGIVESVGEGVTDLQPGDHVLPIFTGECGDCRHCHSEESNMCDLLRINTERGGMIHDGESRFSIKGKPIHHFLGTSTFSGYTVVHSGQVAKINPDAPLDKVCIVSCGLSTGLGAVLNVAKPKKGQSVAVFGLGAVGLAAAEGARIAGASRIIGVDLNSQRFDEAKEFGVTEFVNPRDHDKPVQQVIAEMTDGGVDRSVECTGSVQAMIQAFECVHDGWGVAVLVGVPSKDDAFKSHPMNFLNERTLKGTFFGNYKPKTDIPGVVEKYMNKELELEKFITHTVPFSEINKAFDYMLKGES

SEQ ID NO: 4949 - protein, 214 aa, Paeonia officinalis
IVESVGEGVTDLKPGDHVLPVFTGECKVCRHCKSEESNMCDLLRINTDRGVMLNDGRSRFSINGQPIFHFVGTSTFSEYTVVHVGCVAKINPEAPLDKVCVLSCGISTGLGATLNVAKPKKGSSIAIFGLGAVGLAAAEGARIAGASRIIGVDLNPKRFEEAKKFGVTEFVNPKDYNKPVQEVIAEMTDGGVDRSVECTGSIMAMISAFECVHD

SEQ ID NO: 4950 - protein, 177 aa, Zea mays
FTGLRGAFSEVGWLLLPHRFVFRFWFVGEREEMAASDVEYRCFVGGLAWATDDHSLNNAFSTYGEVLESKIILDRETQRSRGFGFVTFSTEDAMRSAIEGMNGKELDGRNITVNGAQSRGGRGGGGGGYGGGRRDGGGYGGGGGGYGGGRGGYGGGGGYGGANRGGGYGNNDGNWRN

SEQ ID NO: 4951 - protein, 392 aa, Burdachia sphaerocarpa
DLEPVNPADVPVTAAGALKSYKLAAKAISRLQSLPSGNISLLCDVLVKEVRDLTGYDRVMVYKFHDDEHGEVVSECRRSDMESYLGLHYPATDIPQASRFLFMKNKVRMICDCLAPPVKVIQDERLPQPLSLCGSTLRSPHGCHAQYMVNMGAIASLIMSVTINEDDDTIDGDEQQMARKLWGLVVCHHTSPRFVPFPLRYACEFLIQVFGVQITKEVELAAQVREKHILRIQTLLCDMLLRDAPVAIITQSPNVMDLVKCDGAALYYKKKFWLLGVTPTEAQIRDIAEWPVEYHSGNTGLSTDSLMEAGYSGASSLGDAVCGMAAVSITSRDFLFWFRSHTAKEIKWGGAKHDPADKDDGRKLHPRSSFKAFLEVVKWRSLPWEDMEMDAI

SEQ ID NO: 4952 - protein, 830 aa, Butyrivibrio fibrisolvens
MEKWARIKYTPNLPLGENGERVTASQKHIELSCEAACEGMVLLKNDRNVLPIRKGTRVALFGKGVFDYVKGGGGSGDVTVPYIRNLYEGLSQYTSDISIYDKSVRFYQEYVADQYRLGIAPGMIKEPALPEDILADAAAYADTAIIAISRFSGEGWDRKVAGVDREIKCEAKDLVEQGNKIFDHGDFYLTNAEKKMVKMVKENFSSVIVVMNVGGVVDTTWFKKDDQISSVLMAWQGGIEGGLAAARILLGKVNPSGKLSDTFAARLEDYPSTEGFHEDDDYVDYTEDIYVGYRYFETIPGAKEKVNYPFGYGLSYTTFLLEDYKAEPFVASAADEVGKSDSDLADAIVASVTVTNIGKIPGKEVVQLYYSAPQGKLGKPAKVLGGYAKTRLLQPGESQRVTIALYMEDMASYDDLGKVKKAAWLLEKGEYHFFLGTSVRDTRLLDYTYELSKNIIVEQVSNKLVPTSLPKRMLADGTYEELPQTEPVDTYATIFPRPKNWKETIEHDVLKTPVVRPQDRFQLFLPPKEGDPKKFIEVAECKVTLEDFIAQLSNEQLASLLGGQPNVGMANTFGYGNLPEVGVPNAQTCDGPAGVRIAPEVGVVTTAFPCSTLLACTWNEDICYEVGVAGGEEAKECNFGAWLTPAVNIHRSPLCGRNFEYYSEDPFLAGKQAAAMVRGIQSNNIIATPKHFALNNKESNRKGSDSRASERAIREIYLKAFEIIVKEQSPGASCLQYNIVNGQRSSESHDLLTGILRDEWGFEGVVVSDWWGFGEHYKEVLAGNDIKMGCGYTEQLLEAIDKKALKRKDLEKRQSESSRCFSNSTKLKAA

SEQ ID NO: 4953 - protein, 143 aa, Zea mays
TVRIKEVMSYLPIILFGIYMSWIYLRYFQRRLEVGLKGDPSDEFSFSSFFPGFLRPILDPIASVFHKLFCGRPARPECTGQTLDGSQFPGSGSTEANRRRERGQKALEQRLAEKLAAVRKAEGTPPPKQQQEEDAENDASDKV

SEQ ID NO: 4954 - protein, 240 aa, Papaver somniferum
VQLRRMENKINRQVTFSKRRSGLLRPCAEMSVLCDAEVALIVFSTKGKLFEYSTDSGMDRILERYERYSYAERELVTTEIDQGNWSLEYSKLKSKIEILQKNQRHFMGEDLQSMSLKELQNLEQQLDVALKQIRSRKNQLMYESISELQKKEKALQEQNNKLGKQLKEKEKEVAAQQQQASQFSQGQSSPSFLLSQSLPSLNIGSGSYQARGGDNGNEEGNRTQTTRTNTATLMPPWMLN

SEQ ID NO: 4955 - protein, 385 aa, Rhodococcus erythropolis
EFVAWIIGWDLILEFALASSVVAKGWSLYLGEVMGSRSPIVELGPISFDWGAVLVIAVITILLATGTKLSSRVSLVITAIKVAVVLLVIIVGLFYIDTDNYSPYIPPSEPGSTGEGIHQSLFSYVTGAGGSTFGWYGLLAAASLVFFAFIGFDVVATTAEEAKEPQKALPRGILGSLLIVTVLYVAVTLVLTGMVKYTELEGDTSNLATAFAFHDITWAKNVISFGALAGLTTVVMVLMLGQTRVLFAMARDGLMPRRLAPTGKHGTPVRITILVGVVVAVLAGVFPIGTLEEMVNIGTLFAFVLVSIGVLVLRRTRPDLPRGFRVPLVPLVPILAVLACLWLMFNLSVETWMRFVVWMALGVVIYFAYSRQHSMIGKRERGEIE

SEQ ID NO: 4956 - protein, 546 aa, Arabidopsis thaliana
MSLSQNAPKSKGIKREELKKQYEDVEDEEEIGSDDDLTRGKRRKTEKEKQKLEESELVEMKKLENLIFGSLYSPVTFGKEEEEDGSALFHVDRSAVRQIPDYEDDGDDDEELSDEENGQVVAIRKGEAAWEDEEEKQINVDIASVNRLRKLRKEENEGLISGSEYIARLRAHHAKLNPGTDWARPDSQIVDGESSDDDDTQDGGVDDILRTNEDLVVKSRGNKLCAGRLEYSKLVDANAADPSNGPINSVHFHQNAQLLLTAGLDRRLRFFQIDGKRNTKIQSIFLEDCPIRKAAFLPNGSQVIVSGRRKFFYSFDLEKAKFDKIGPLVGREEKSLEYFEVSQDSNTIAFVGNEGYILLVSTKTKELIGTLKMNGSVRSLAFSEDGKHLLSSGGDGQVYVWDLRTMKCLYKGVDEGSTCGTSLCSSLNGALFASGTDRGIVNIYKKSEFVGGKRKPIKTVDNLTSKIDFMKFNHDAQILAIVSTMNKNSVKLVHVPSLTVFSNWPPPNSTMHYPRCLDFSPESGFMAMGNAAGKVLLYKLHHYQNA

SEQ ID NO: 4957 - protein, 471 aa, Mycobacterium tuberculosis CDC1551
MSLRELMLRRRPVSGAPVASGASGNLKRSFGTFQLTMFGVGATIGTGIFFVLAQAVPEAGPGVIVSFIIAGIAAGLAAICYAELASAVPISGSAYSYAYTTLGEAVAMVVAACLLLEYGVATAAVAVGWSGYVNKLLSNLFGFQMPHVLSAAPWDTHPGWVNLPAVILIGLCALLLIRGASESARVNAIMVLIKLGVLGMFMIIAFSAYSADHLKDFVPFGVAGIGSAAGTIFFSYIGLDAVSTAGDEVKDPQKTMPRALIAALVVVTGVYVLVALAALGTQPWQDFAEQETAGLAIILDNVTHGEWASTILAAGAVVSIFTVTLVTMYGQTRILFAMGRDGLLPARFAKVNPRTMTPVHNTVIVAIFASTLAAFIPLDSLADMVSIGTLTAFSVVAVGVIVLRVREPDLPRGFKVPGYPVTPVLSVLACGYILASLHWYTWLAFSGWVAVAVIFYLMWGRHHSALNEEVP

SEQ ID NO: 4958 - protein, 235 aa, Oryza sativa
MSTLETTRAELGLVVVYLNKAEARDKICRAIQYGSNFLSDGQPGTAQNVDKNTSLARKVFRLFKFVNDLHALISPVPKGTPLPLVLLGKSKNALLSTFLFLDQIVWLGRTGIYKDKERAEILGRISLFCWMGSSVCTSLVEVGELGRLSASIKKLEKEIGNKDKHQNEQYRAKVEKSNERSLALIKAGMDVVVAFGLLQLAPKKVTPRVTGAFGFASSLISCYQLLPSHPKSKMV

SEQ ID NO: 4959 - protein, 140 aa, Triticum aestivum
  unsure (1)..(140): unsure at all Xaa locations
MACDQRGMRGEAAAAGEEEMLRRGPWTVEEDVLLANYIAANGEGRWNALARRAGLKRTGKSCRLRWLNYLRPDLRRGGMTAEEQLLVLELHARWGNRWSKIAQHLPGRTDNEIKNYWRTRVQRHAKQLRCDVGSQRFXGP

SEQ ID NO: 4960 - protein, 293 aa, Oryza sativa (japonica cultivar-group)
MASSFAAVFFSSAFAACFAEVCTIPLDTAKVRLQLQKKAALATGGGGGTTGGMLGTIMCIAREEGVAALWNGIIPGLHRQCVYGGLRIALYEPVKAFFIRDGDTVAGGVSLFAKILAALMTGVIAIVVANPTDLVKVRLQADGKATTVKRHYSGALNAYATIIRQEGIGALWTGLGPNIARNAIINATELASYDQLKQMFLKLPGFTDNVFTHLLAGLGAGFFAVCIGSPVDVVKSRMMGDATYKSTLDCFAKTLKNDGLPAFYKGFIANFCRIGSWNVIMFLTLEQVRRSIL

SEQ ID NO: 4961 - protein, 235 aa, Neurospora crassa
MPFPAAAAARVRLSHVTRPVTALTNPRQWQASLGPHPAKPTNWWVNLRTQKRLASSVLGVGQRKIWLDPNEVSEISNANSRQTIRKLVADGLIIKKPVTMHSRSRARELNLARRIGRHRGFGKRKGTADARMPEQVLWMRRQRVLRRLLVKYRASGKIDKHLYHELYHLAKGNTFKHKRALVEHIHRAKAEKAREKAIKEEMDAKRARTKAARERKLERQAAKRNALAGEEEESK

SEQ ID NO: 4962 - protein, 260 aa, Glycine max
TSEVLEIISRFSSELDPPARFWALSPLDGGSSCGDQHVVALSLIEEGEVVLGVLGCPNYPMRKDWFSYHHSYLRMISKLAPPTSQTWNKGCVIYAKRGSGKAWIQPLLHVNDKFVWPNHAKQVSVSSIDNLEMATFCQPVEKANLSHSFAEGLAHSVGFSNQPLRVYNTMKYTAIACGDAEVFIKFARAGYKEKIWDHAAGAIIIQETGGMVTDAKGHPLDFSKGLYFERLDRGIVACAGATLHEKIIDAVDASWASSCL

SEQ ID NO: 4963 - protein, 99 aa, Triticum aestivum
YFGILARSGFTVSKALFFNFLSALDALAGTALALSLGKDPGHSSLIEGFTAGGFIYIAVAGVLPQMNDQITTMKSSLAQLISLAMGMLVALGISLVIII

SEQ ID NO: 4964 - protein, 360 aa, Trichodesmium erythraeum IMS101
MINCRITLLPGDGIGPEIMAVAVDVLKVVGKQFNLEFEFQEAPIGGVAIDATGEPLPKETLEMCRNSNAVLLAAIGGYKWDNLPRHQRPETGLLGLRAGLGLFANLRPAKIFPQLIDASTLKREIVEGVDIMVVRELTGGVYFGTPKGVFETETKEKRGVNTMAYSESEIDRIAKVGFETAQKRGGKLCSVDKANVLEVSQFWRDRINLVAQEYQDVELSHLYVDNAAMQLVRFPKQFDTIVTGNLFGDILSDAAAMLTGSIGMLPSASLGASGPGVFEPVHGSAPDIAGQDKANPLAQVLSVAMMLRYALEQPVVADKIEQAVLQVLEQGYRTGDIMSEGMKLVGCKEMGEVLLKILSL

SEQ ID NO: 4965 - protein, 367 aa, Zea mays
MTRRCSHCSNNGHNSRTCPVRSAGGGSGGGGVRLFGVRLTTAPAPAVMKKSASMSCIVSSLGGGFGGSSPPVEGVGAGRGGEDSGTGYVSDDPAHASCSTNGRAERKKGTPWTEEEHRMFLMGLQKLGKGDWRGISRNFVVSRTPTQVASHAQKYFVRQTNSSRRKRRSSLFDMVPEMPMDESPAAVEQFTLQNTQDEDTSSNHVPTLHLGQRKETEFAKQLQTFQPGHHEKSEYAEPSLLLPDLEMNPSVPFKTITDPTGPAFYPSLVPVPLTLWPPSVSHVEEAARTHEILKPTPLNGKGVVKADDVVGMSKLSIDEASSGSMEPTALSLELIGSTDTRQSAFHVSPPMNRPELSKRNSSPIHAV

SEQ ID NO: 4966 - protein, 324 aa, Foeniculum vulgare
KAIPPHCFEKSLITSFRYLIQDLLMAYALYYVATTYIDQYLPHPLNYLGWAAYIAVQGCVLTGAWVVGHECDHDAFSDYGWINDLVGLVVHSSLMVPYFSWKISHRRHHANTQSLENDEVYVPRFRYNIRNYYKVLNNPLGRVLVWVTTLLIGFPLYLMFNVSGHKYERWTSHYDPHSPLYTERERKQIIVSDIAILAVIYGLYRLVLIKGFAWVFCVYGGPLLVVNMWFTLITILNHTHPSVPYYDSTEWDWLRGALCTVDRDYGILNKVFHNVCNAHVCHHIFSMIPHYHGLEATEAMKPVLGDYYQYDGTPILKAMYREMK

SEQ ID NO: 4967 - protein, 370 aa, Oryza sativa
MVREPQDLRLGERDLLEEMSMNEEVEDGEVKPLGRVESMDETPGEVAKLRCRHGARGAAVVASAWRGSNTGSFVLVRSYITITFRGFRPPRLARLIRSPSSPCSKTCRLITPESIIATISHRSTMNGIELSSEDKAILVETLKNKLQALAEQHVDVLESLAPSVRKRVDVLMEIQSQHDELEVKFFEEKAALEAKYQKLYGPLYSKIHESDEEALKYLKDIKWCRIDDPKGFKFEFFFYTNPFFKNQVLTKTYHMIDEDDEPILEKAIGTEIEWHPGYCLTQEVLTKESSESTKPITKTEECESFFNFFSPPQVPDDDAKIDENTAEELQNQMERDYDIAEAVQDEDYGASWVDDEEEDDNNDEYSDEEA

SEQ ID NO: 4968 - protein, 515 aa, Magnaporthe grisea
MKNPISSLDVPTPPATTIPTLSSPAPLLRPAIPGARSAGARTPRLGLAIPPSPNVKPVGGAPGRPPLPTLHLATPMGSSVTPHEQPPGRPSIVTQQGQSASGGSESSAAHSRSGSFGPLDGRTSNPTSAGSQYSALSFASHFGIGSTRPQGTPDPASAVGSIYSERSDGGAGMDKDGNLKGLENFDKLTIDKARTADVEDLDVEGWKIASMEKRIVELGGLGEGAGGAVTRCKLTGGKTVFALKVITANPDPDVKKQIMRELDFNIQCASEHICRYYGAFEDPSTATISIAMEFCEGGSLDSIYKEVKRLGGRTGEKVLGKIAEGVLRGLTYLNSKKIIHRDIKPSNILLCRNGDVKLCDFGVSGDFGTKGEANTFIGTSYYMAPERITGQSYTITSDVWSTGVTLLEVAQHRFPFPADGTEMAPRAGLIDLLTYIVRQPIPKLKDEPSAQISWSENFKYFIECCLEKDPQRRASPWRMLEHPWMVDMKSKRVNMTRYLAQVWGWDDKGEAKPAE

SEQ ID NO: 4969 - protein, 444 aa, Brassica rapa
TFSFLLVFVVLILFHPALSIYFNILSSTETLTISGNKTLVSPGDVFELGFFTPRSSSRWYLGIWYKKLYFRIKTYVWVANRDSPLFNAIGTLKISGNNLVLLDHSNKSVWSTNLTRGNERSLVVAELLANGNFVMRDSDINDATGFLWQSFDYPTDTLLPEMKLGYDRKKGLNRFLTSWRNSDDPSSGETSYKLDTQRGLPEFYLLINGSRGQRSGPWNGIRFSGIPEDLRLSYMVYNFIENSEEVAYTFRMTNNSIYSRLTISSEGLLERWTWAPASFSWNLFWSLPADTWCDVYMACGPYAYCDVNTSPECNCIQGFNRSNEQQWDLRDGSAGCVRGTRLSCNGDGFTRMKRMKLPETTMAIVDRSIGIGVTECEKRCLSDCNCTAFANADIRNGGTGCVIWTTGLEDIRTYFADDIGQDLYVRLAAADLVKKRNANGKIIP

SEQ ID NO: 4970 - protein, 140 aa, Zea mays; identical to SEQ ID NO: 1542

SEQ ID NO: 4971 - protein, 683 aa, Neurospora crassa
MSDHDPDHGPASPNEYDDESNPASPGSVDESSEASTPMDPPSSGSDAMPGFTPEGDLPRRVPSLRTISDPQHTNSMSPSSSVPGTLNAARRPAASAANLPTDLMAKARALHQQRMGMAPRPSMSPQNSGLGMGPMGSGMGGMGSMGGMGHSMNLNMNHGGPAPGGLPGGLRLPPGIARPPPQGFPKSAPAIAGLGAKKAPSLSERRAMKLGGLPGGPGSPVTATPKLSDMGAEDAKAPAINGEGRGSKLSDFKNYIDAEKGWITFADAATITRTGVNFANGQTFRISLDEVEVMDELGKGNYGTVYKVRHSKPKLPRFGQGLNTKQSLSRQASASDADVSDISPLSPVTAAARGISGKVMAMKEIRLELDESKFSTILKELVILHECASPYIIDFYGAFYQEGAVYMCIEYMDGGSIDKLYAGGIPENVLRKITYATIMGLKCLKEDHNIIHRDVKPTNILVNTNGQVKICDFGVSGNLVASIAKTNIGCQSYMAPERISGGGMSAAGGAAAGTYSVQSDIWSLGLTIIECAMGRYPYPPEVSSTIFSQLSAIVEGDPPGLPSEGYSGTAQDFVKSCLNKIPAKRHTYPMLLMHPWIKSLGRPETITEEVEAEEKAADDQLADATGSLDINSNGPINDQGDREVAEWVTNVLDRKLKGLLSDKAEKPALHAAPLDQVSPGIAA

SEQ ID NO: 4972 - protein, 344 aa, Thermus aquaticus
MRVAVLPGDGIGPEVTEAALRVLKALDEREGLGLTYETFPFGGAAIDGYGEPFPEVTRKGVEAAEAVLLGSVGGPKWDALPRKIRPESGLLALRKSQDLFANLRPAKVFPGLERLSPLKEEIARGVDVLIVRELTGGIYFGEPRGMSEAEAWNTERYSKPEVERVAKVAFEAARKRRRHLTSVDKANVLEVGEFWRKTVEEVHKGYPDVALDHQYVDAMAMHLVKNPARFDVVVTGNIFGDILSDLASVLPGSLGLLPSASLGRGTPVFEPVHGSAPDIAGKGIANPTAAILSAAMMLEHAFGLVELARRVEAAVAKALRETPPPDLGGSAGTQAFTEEVLRHL

SEQ ID NO: 4973 - protein, 160 aa, Griffithsia japonica
PIVRLPIHPTPNSRRPQPLSTAPPSPASRLSFPPRRRRLCPPAIGAAASASVYDLSAFKNGRPYPFSPLSGKLTLFVNVASYCALTPQYEGLVALHTAYQPKGFEVVASPCNQFGRQEPQPDDEICAFVKERFGARFVLLDKLVVNERPADGRSPRSTVS

SEQ ID NO: 4974 - protein, 413 aa, Thermosynechococcus elongatus BP-1
MSPPAVDIKVSTDAPPKIVKALNLLGSTGSIGTQTLDIVAQYPDRFRVVGLAAGRNLERLIPQIRQFQPEIVSIADPEQLPELEAALADLPQKPQLVAGEAGIAAVAAYGDAEVVVTGIVGCAGLVPTIAAIKAGKDIALANKETLIAGGPVVLPLLQEYGVKLLPADSEHSAIFQCLQGVPEGGLRKIILTASGGAFRDWPVEKLAQVTVADALKHPNWSMGPKITVDSATLMNKGLEVIEAHYLFGMDYDNIEIVIHPQSIIHSLIELQDTSVLAQLGWPDMRLPLLYALSWPERIPTNWSPLDLVKAGDLTFRSPDHQKYPCMGLAYAAGRAGGAMPAVLNAANEQAVALFIAEAIAFLEIPRLIEMVCDRYSAQNIPNPTLEDILAADRWARATVQELAQRGVSPMVAL

SEQ ID NO: 4975 - protein, 481 aa, Neurospora crassa
MASVSSALPEGNKPALRRTQTEATSDSYPGTADASPFDSPLERSASNTSLSSQASDNVKTDKAEFGKLLDTYGNEFEVPDFTIKDIRDAIPAHCFERSALHSLAHVVRDIIYLTVTFYVWNKYVTPEYIPMKAARVVLWGLYTFMQGLFGTGLWVLAHECGHQAFSPSRLINDTVGWVLHSALLVPYFSWKFSHSKHHKATGNIERDMVFVPRTREQFASRIGRFVHEISELTEETPIYTLIHLIGQQLIGWPNYLMTNVTGHNFHERQREGRGKGKKNGWFTGVNHFNPSSPLYEEREAPWIIVSDIGIAIAATALIYLGNTFGWSNMFVWYFLPYLWVNHWLVAITYLQHTDPSLPHYTPDQWNFVRGAAATIDREFGFIGRHLLHGIIETHVLHHYVSTIPFYHADEASEAIKKVMGRHYRADVQDGPIGFIKAMWKAARWCQWVEPTEGAEGKGKGVLFYRNQNGLGVKPAKLPKTN

SEQ ID NO: 4976 - protein, 142 aa, Nicotiana tabacum
MKGGKSKAGADSKLGVRKKATETKKAKKAAKDPNKPKRPPSAFFVFMEEFRKTYKEKHPNNKSVAAVGKAGGDAWKKLSEAEKAPYQAKAEKRKAEYQKNMDAYNRKQAGDAEEDESDKSKSEVHDDDDEDDDGSEEEEDDD

SEQ ID NO: 4977 - protein, 430 aa, Schizosaccharomyces pombe
NTSSTEQIEVLENEYAAHNYHPLPVCFSKAKGAKVWDPEGREYLDFLAAYSAVNQGHCHPKIIEALVEQAQRVTLSSRAFYNDKFGPFAKYITEYFDYEMVIPMNTGAETVETACKLARLWGNKAKKIPTDEAIILSCVDNFHGRTMGIISMSTDPDARDNYGPYLPNVGPKISGADRVLRYNNIEDLKYYLDTFGPKVAAFLVEPIQGEAGVMVPDDGYLEEAYKLCKAHNVLFIADEVQTGVARTGKMLCIEHSNVKPDVVILGKAISGGVYPVSAVLSSREIMLNFEPGTHGSTYGGNPLGAAVSIAALEVVKEEKLTERAAVLGEKFRTALIECKSPIVQKVRGRGLLNAVVIDESKTNGRTAWDLCLIMRSRGVLAKPTHGNIIRFSPPLVITEEDLMKGIEVIKKSLNDLPTIDMTPYAEKPIH

SEQ ID NO: 4978 - protein, 455 aa, Actinosynnema pretiosum subsp. auranticum
MNWTVDVPVDTLPELRSRLDDALGRPAAQQPEWPDADLARRVRAVLESVPPITVPAEIDRLRENLAAVARGEAFMLQGGDCAETFADNTEPHIRANVRTLLQMAVVLTYGASLPVVKIGRIAGQYAKPRSSGTDALGLPSYRGDIVNSLVPTPEARVADPGRMIRAYANAGAAMNLLRAMTTAGMADLHRLHDWNKDFVRTSPAGERYEALAAEIDRGLRFMSACGVNDSSLHTTEIFASHEALLLDYERALLRLDTRGDEPKLYDLSSHFLWIGERTKQLDGAHIAFAELLANPIGLKIGPSTTPEMAVEYVERLDPHNQPGRLTLIIRMGNGKVRDVLPAIVEKVTASGHKVIWQCDPMHGNTHESSTGYKTRHFDRIVDEVQGFFEVHRRLGTHPGGIHIELTGEDVTECLGGAQEISDTDLAGRYETACDPRLNTQQSLELAFLVAEMLRS

SEQ ID NO: 4979 - protein, 398 aa, Escherichia coli
MKQLTILGSTGSIGCSTLDVVRHNPEHFRVVALVAGKNVTRMVEQCLEFSPRYAVMDDEASAKLLKTMLQQQGSRTEVLSGQQAACDMAALEDVDQVMAAIVGAAGLLPTLAAIRAGKTILLANKESLVTCGRLFMDAVKQSKAQLLPVDSEHNAIFQSLPQPIQHNLGYADLEQNGVVSILLTGSGGPFRETPLRDLATMTPDQACRHPNWSMGRKISVDSATMMNKGLEYIEARWLFNASASQMEVLIHPQSVIHSMVRYQDGSVLAQLGEPDMVRQLPTPWAWPNRVNSGVKPLDFCKLSALTFAAPDYDRYPCLKLAMEAFEQGQAATTALNAANEITVAAFLAQQIRFTDIAALNLSVLEKMDMREPQCVDDVLSVDANAREVARKEVMRLAS

SEQ ID NO: 4980 - protein, 640 aa, Zea mays
MGLEEATNATGVLTADSCEPTRSPRPAQATQHGHPSRSPRGICQDSCSMQLKHASASVLKTKPSPRILTEAAPWRQQERSATNICREAEGRPRIASVYADIERRVGGFDILECNNKDFRALRILGALNARDAKSKNDSSGGPVATHRTGYDLTTSSGSFQAPIVVMKPARTTEKHGVSLASVAPIAGLRSLRKLPARYSSFTGTNETSTNENIHLRMSRAQLKSEETVSSANSPRPTSSSSPRNVLKKAEPERRSRPPVSPKSPSKKSNEAVSPKGRTRSKPSQVKCHRDEVLQITGNRISLAKQVDVSIMDCPKPLGGNSTFVPEGNTAATASQKAASILGSDQNIHSLDNIPSPVSVLDASFYHKRISDSFKDGETHSSEECWNPNSLPDTPQSKANSEVNQIKPENLEVLIQKLEQLQSMSEEDASIKEVMASVAANKDHQYIYEIMLASGLLHKEHSVTALPGQLQPSNYPINPELFLILEQTRPVSVSAFQTVGGAKRSCKPCAGKLHRRLVFDLVNETIAQKMIICRSGSQPVKFLQSRKLSGWQLFKDLCTEVDRQIKCTEEEENGNMISDEDTVNGTKDWMSFDTMLHGMVWEIERSIFKGLIDEVIGGETIEKMQFGQRKLQRQLSFSSIN

SEQ ID NO: 4981 - protein, 332 aa, Nostoc punctiforme
MSSGKPTILVTGGAGYIGSHTVLALKQAGYNVVILDNLVYGHRDLVEKILQVELVVGDTGDRALLDHLFKTRDIAAVMHFSAYAYVGESVTDPAKYYRNNVVGTLTLLEAMLTASVKKFVFSSTCATYGVPEFVPIPENHPQNPINPYGATKLMVERILSDFDVAYGFQSVRFRYFNAAGANPNGLLGEDHNPETHLIPLVLMTALGKRKSISIFGTDYPTPDGTCIRDYIHVNDLADAHILGLEYLLKGGDSEVFNLGNGSGFSVREVIAAAEQVTGTSIPVEEHDRRPGDPPILIGTSEKARTILGWQPQYPSIEDIVAHAWQWHQKRHK

SEQ ID NO: 4982 - protein, 355 aa, Bacillus subtilis subsp. subtilis str. 168
MKVIRIILQVLILYVFFMIGEAIQHLFHLPVSGSIVGLVLLLICLGLRIVPVSIIEDGAGFLLSFLPLLFIPAMTGVNKLSVSHFIQWPDAADYSRSQHHRHDHCGWIRQPAIREKSKKTGGEREMQQACIAIIIILLTVAAYLAMVKLYKRFPLPFLIPVLTTTILIVAALMMFHVSYEGYMIGGKWINSLLGPAVVALAYPLYKQWHIIVKHCVPILGGVLVGLCMGMISGLIFAEAFGIDHDLLLSILPKSITTPVAIQIAAGLGGVPSMTVVFVMIAGFSGVILGPLFLKWRRIRSSLGQGIALGSAFHALGTSKALEYGELAVSMSSVSMTLCAVLGSFFGPLVVWLFHI

SEQ ID NO: 4983 - protein, 182 aa, Bacillus halodurans
MKREGENIVVKLASVEDVEQLLALEVRNKEFFQQFTGLRDSAFYTYEGQKERIIREMEAAKADTGYLFLICLKESDEVIGEVSLTEVVRGNLQSCWIGYFLDKVHNGKGYMTEAVKLVVDYAFTELAFHRIEAGVMPHNIGSINVLLKAGFQKEGLARKNVKINGRWEDHQTLAILEGETVS

SEQ ID NO: 4984 - protein, 476 aa, Xanthomonas campestris pv. campestris str. ATCC 33913
MFKQLWATKHPHASHEAADGLGLQRALGPWGLTALGIGAVIGGGIFVITGQAAADHAGPAIVLSFVLAAICCAFCAMAYAEFAAMVPVSGSAYTYTYATFGELAAWFIGWMLVLEYGVSASAVAVSWTGYFLSLLEHFGIHLPAALVSAPLDGKLQRTGAIANLPAAGIVLLLTWLCYVGIRKSSAMNMAMVILKTGLIILVIAAGWKYVDPANWHPFIPANEAPGKYGMEGVLRGAAMVFFAYIGFEAVSVAAQESHRPQRDLPIGMMLSLVICTVLYIAMAAVMTGLVPFTQLGTDEPVVTAVAAHPQLAWLRVVVEVGALIGLSSVVLVMIIGQPRIFMIIARDGLLPAVFTRIHPKYRTPHINTVITGIGIALLAAVFPLDVLGELTSMGTLIAFAAVCAGVLILRRTHPELPRPFRMPAAWLICSAGVLSCLALLSAMTLHNWMLMGLWTLVGLVVYFGYGYRHSRLREGR

SEQ ID NO: 4985 - protein, 184 aa, Fusobacterium nucleatum subsp. vincentii ATCC 49256
MNAEIDISNVKLETERLILRAWEITDLDNFFEYASVNGVGEKAGWEHHKSKDESLEILKMFIDEKKVFAIVLKENQKVIGSIGIEECRQDLDTNLENLLGRELGYVLSKDYWNKGIMTEAVSKVIEYCFKILKLNYLIATCFNYNIASKRVLEKLNFKYYKDITIETRYNTKEESTLMLLKIIN

SEQ ID NO: 4986 - protein, 322 aa, Pseudomonas fluorescens PfO-1
MSLPALLEQRLRLPVVAAPMFLISNPELVLACCRNGVVGSFPALNQRESSGFKAWLEQIEAGLATLENPAPYAVNLIVHKSNPRLEADLNICVEHKVPIVITSLGAVKEVVDAVHSYGGLVFHDVTTRRHAEKAAEAGVDGLIAVAAGAGGHAGTWSPFSLIAEIRECFDKTLLLAGCLNHGHEILAAQLLGADLAYFGTRFIGTTESHAPDAYKQMLLTAKAADIIHTPAVSGVPASFMRQSLEAAGFDMAALQGKGEVNFGDKLKPINDEAKAWKTVWSAGQGVGQIDDLPSVDQLVARLDAEYRQALEHAAQLPKRWPR

SEQ ID NO: 4987 - protein, 249 aa, Coxiella burnetii RSA 493
MPTLLKGKTALVTGASRGIGASIAAELGRQGAIVLGTATTEAGAKKITQMLMEEKVEGKGYALDICDQERMKAILSDIQGDFDAPSILVNNAGITRDNILLRMRSEQWDEVINTNLNGVFHLTKACLKSMVKARSGRIINISSVVATMGNAGQANYVAAKAGLVGFTKVVAMEYAAYGITANCIAPGFIETEMTGALSEQQREAILARVPMKRMGQPNEIAQAAAFLASDNAAYITGETLHINGGMCMV

SEQ ID NO: 4988 - protein, 140 aa, Oryza sativa
VALASQTYDLVDAHIQQLDQFMRKLEELRQEKEAAAGTSTADNTPKGGRSSERGRGGRKKTAKVPTEQPAPAIDLELPVDPNEPTYCLCNQVSYGEMVACDNNDCKIEWYHFGCVGVKEHPKGKWYCPSCIGFQKKRKGK

SEQ ID NO: 4989 - protein, 250 aa, Triticum aestivum
MAKTYPVVSAEYQEAVEKARQKLRALIAEKNCSPLMLRLAWHSAGTFDVSSKTGGPFGTMKKPAEQAHAANAGLDIAVRMLEPMKEEIPTISYADLYQLAGVVAVEVSGGPVIPFHPGREDKPQPPPEGRLPDATKGSDHLRQVFGKQMGLSDQDIVALSGGHTLGRCHKERSGFEGPWTRNPLKFDNSYFTELLSGDKEGLLQLPSDKTLLTDPVFRPLVEKYAADEKAFFEDYKEAHLRLSELGYAEA

SEQ ID NO: 4990 - protein, 175 aa, Brucella melitensis 16M
MPIYAYNGHKPQFADRESNWIAPDATLIGKVVVGENAGFWFGAVLRGDNEPITIGADTNVQEQTIMHTDIGFPLTIGAGCTIGHRAILHGCTIGENTLIGMGAIVLNGAKVGKNCLIGAGTLVKEGMEIPDNSLVVGSPARVLRQLDDAAVEKLRASAKHYVERGHSFMRGMEPA

SEQ ID NO: 4991 - protein, 235 aa, Brucella melitensis 16M
MLPGDPLGNPFVATLFWSAATILLYLAAKRVYRRFPLWWLTPLAVTPLLLMALVIGLDENYRVYFSATHWLVALLGPATVAFAIPIYQQRATIRRYWPVLLAGVLVGSSAAMASAWGLAHLLGLNEAISLSLMPRSMSTPFAMTVSGDIGGRPDLTAIFVVLTGIFGAALGEIMLHWLPVRSALARGALFGMGAHGAGVARAHQIGSEEGSIAGLVMVLVGLVNVLAAPLIAHFL

SEQ ID NO: 4992 - protein, 394 aa, Coriolus versicolor
MSKKAPQLSRFWAQSRPPPPPTKLGHHRQLAPNAGLHVSPLCLSAMSIGEKWGPLGMGEMTKEQSFKLLDAFYAAGGNFIDTANNYQDGESEQFIGEWMEARGMFNQMVIATKYTSNWKRGESLPQKTSYVGNNMKSLYISVEQSLENLRTNYIDILYVHWWDWTCGVEEVMNGLHHLVADRKVLYLGVSDTPSWIVAKANMYARLTGKTPFVVYQGAWSVLQRDLEREIIPMARAEGMAIAPWNVLAAGKIRTDAEEERRRQTGEHGRKTASDAWERTPEQREVCKVLEKVAGKVGAKNITAVAIAYVMQKTPYVFPIIGGRKVEHLHANIEALDITLSEEHIEEIESAHPFDVGFPHNMVGDGSWYSPLYQSAGYFEKWPKQQAIKPALTGQ

SEQ ID NO: 4993 - protein, 344 aa, Helicobacter pylori J99
MALLFTGACGYIGSHTARVFLEKTKENIIIIDDLSTGFLEHIKALERYYPNRVAFIQANLNETQKLDAFLNKQQLKDPIEAVLHFGAKISVEESMRLPLEYYTNNTLNTLGLVKLCLKHAIKRFIFSSTAVVYGESGSSLSEESPLNPINPYGASKMMSERILLDASKVADFKCVILRYFNVAGACMHNDYTTPYTLGQRTLNATHLIKIACECAVGKRKKMGIFGTNYPTRDGTCIRDYIHVDDLANAHLASYHTLLEKNKSEIYNVGYNQGHSVKEVIEKVKEISNKDFLVEILDKRQGDPASLIANNSKILQNTPFKPLYNNLDTIIKSALSWEEHLLKFQ

SEQ ID NO: 4994 - protein, 169 aa, Triticum aestivum
MAEGTGATAASGSAAGKMTMVVGVDESEHSYYALQWTLLHFFSPGQQQQYRLVVVTAKPTAASAVGLAGPGAADVLPFVEADLKRSSLRVIDKAKELCAHVSDAVFEVVEGDARNVLCEAVERHHAEMLVVGNHGYGAIKRAVLGSVSDYCTHHAHCTVMIVKKPKHKH

SEQ ID NO: 4995 - protein, 345 aa, Magnetospirillum magnetotacticum
MEVEFATQTSLPAMFLEQAARLGERPFLGKKSGGVWHALSWRETEARVLALAAGLRALGLAPGDRVMLVAENRPEWAMADLAIMAAGGISVPAYTTNTVADHRHILDNCGARLVIVSTRALAERILPAAAHSDQAPAIIAMEPLALAQSPGVDIHSWEAVLELGRGAEAPIRTIIAGLKRDDTACLIYTSGTGGVPKGVMLSHGAILCNCMGATDVLRELGLENEVFLSFLPLSHAYEHTAGLYFPISIGAEIRYAEGLEHLATNMAEVSPSIMTAVPRLYESMRTRILKGLARVSPLRRRLFMRPSIWARAASRAKGWACSKSSPISCWSGWSVIRSATVSAEN

SEQ ID NO: 4996 - protein, 361 aa, Arabidopsis lyrata subsp. petraea
CKAAVAWEAGKPLVMEEVEVAPPQKHEVRIKILFTSLCHTDVYFWEAKGQTPLFPRIFGHEAGGIVESVGEGVTDLQPGDHVLPIFTGECGDCPHCHSEESNMCDLLRINTERGGMIHDGESRFSINGKPIHHFLGTSTFSEYTVVHSGQVAKINPDAPLDKVCIVSCGLSTGLGATLNVAKPKKGQSVAIFGLGAVGLAAAEGARIAGASRIIGVDLNSQRFDQAKEFGVTEFVNPRDHDKPVQQVIAEMTNGGVDRSVECTGSVQAMIQAFECVHDGWGVAVLVGVPSKDDAFKTHPMNFLNERTLKGTFFGNYKPKTDIPGVVEKYMNKELELEKFITHTLPFSEINKAFDYMLKGES

SEQ ID NO: 4997 - protein, 482 aa, Staphylococcus epidermidis ATCC 12228
MEDNNMKRGLNSRHISMIAIGGAIGTGLFVATGSVISQAGPGGAILAYILIGIMLYFLMSSIGELATFYPVSGSFSSYSTRFVDSSLGFTMGWLYWGMWSLVTSVDIIVASNVLQYWDVFKVLNPLTWSLIFLTLLFLINIFSVKAFGETEFWLSLIKVITIIVFIIFGIMMIFGILGGHTYGFENYTKGQAPFVGGISGILSVLLVAGFSVGGTEVVAVTAGESNNPEKSMPKAIKQVFWRILLFYVLSIAVIAAIIPYTDPLLLNENESVSQSPFTIVFDKIGIAFAASVINAVILTSLLSAANSGIYTTSRMLFSLSADKQAPKFFGKLNDKTKLPMRALITTYIIIVLVIVYANFNANAVFNLLNIIGSMVIVVWGSSIWSQIRLRQAIKKQGKNPDKLLPYKAPFYPVGPIIVLFTLLFLLLGSSFGSIASGDILGVIRNFTPLFILAIIYIAHKLIKRTHFVKLEEIDLTPHNYKN

SEQ ID NO: 4998 - protein, 247 aa, Halobacterium sp. NRC-1
MFKAIVSADTLQETLDSVSVLVDECKIHLDDDTLSIRAVDPASVGMVDLDLAATAFESYEADGGLIGVNLSRLEDIAGMADAGQLIQLELDEETRKLHIQIDGLEYTLALIDPDSIRQEPDIPDLDLPAHVAIEGRDIDRAVTAADMVSDHIALGVDTGDDLFYVNAEGDTDDVHLELAPDQLIDLDAGDAHSLFSLDYLKDMNKAIPTTAEVELELGDEFPIKLHFDIADAQGHVTYMLAPRIQSN

SEQ ID NO: 4999 - protein, 751 aa, Geobacillus stearothermophilus
MENQNRQNAAQCPFHGSVTNQSSNRTTNKDWWPNQLNLSILHQHDRKTNPHDEEFNYAEEFQKLDYWALKEDLRKLMTESQDWWPADYGHYGPLFIRMAWHSAGTYRTGDGRGGASTGTQRFAPLNSWPNNANLDKARRLLWPIKKKYGNKISWADLFILAGNVAIESMGGKTIGFGGGRVDVWHPEEDVYWGSEKEWLASERYSGDRELENPLAAVQMGLTYVNPEGPDGKPDPKAAARDIRETFRRMGMNDEETVALIAGGHTFGKAHGAGPATHVGPEPEAAPIEAQGLGWISSYGKGKGSDTITSGIEGAWTPTPTQWDTSYFDMLFGYDWWLTKSPAGAWQWMAVDPDEKDLAPDAEDPSKKVPTMMMTTDLALRFDPEYEKIARRFHQNPEEFAEAFARAWFKLTHRDMGPKTRYLGPEVPKEDFIWQDPIPEVDYELTEAEIEEIKAKILNSGLTVSELVKTAWASASTFRNSDKRGGANGARIRLAPQKDWEVNEPERLAKVLSVYEDIQRELPKKVSIADLIVLGGSAAVEKAARDAGFDVKVPFFPGRGDATQEQTDVESFAVLEPFADGFRNYQKQEYSVPPEELLVDKAQLLGLTAPEMTVLVGGLRVLGANYRDLPHGVFTDRIGVLTNDFFVNLLDMNYEWVPTDSGIYEIRDRKTGEVRWTATRVDLIFGSNSILRSYAEFYAQDDNQEKFVRDFINAWVKVMNADRFDLVKKARESVTALQDIVLARSAAIASLQ

SEQ ID NO: 5000 - protein, 455 aa, Bradyrhizobium japonicum USDA 110
MTASDAGTAPWTGRLTGRGAGVSVLVATAIVVADMIGVGVFTSLGFQVKDIPSGFSILLLWSVGGIVALCGVFSYSELGAMFPRSSGEYNFLGRAYHPAFGFLAGWVSATVGFAAPVALAAMAFGEYAKSVVPDLPPIPLAIGVVWLVSLVQLTGVRHSSTFQLISTILKVVLIVAFLVAGFIIGVPQPIAFTPQPGDLAHIVSAPFAIGLVFVMYSFSGWNAATYIIGEMNMPQQNLPRALLAGTLIVLVLYVALNAVFLYSTPVGALAGQLDVASVAGSAIFGSLGGRIVGAMICVGLISSISAMMWIGPRVMMTMGEDIPALRVFSRKSTSGAPAYAILFQLAVATLLLFTRSFEAVLDFIQFALLFCSFFTVAGVIKLRITDPDLPRPYRAWGYPFTPLVFLLVTAFMMYYLLTERPVQSLSGMFVMLSGLLIYAVFRRRPVAAGTSHNRE

SEQ ID NO: 5001 - protein, 928 aa, Thermobifida fusca
MTEPFRDPTLPPHERVRDLLARLTTEEKIGLLHQYQRPIPRLGIASFRTGTEALHGLAWHGPATVFPQAIGLASTWDPDLVQQVGAATAAEVLVFHTKNPATVGRNVWAPVVNPLRDPRWGRNEEGYSEDPWLTGVMAVSYARGLAGPHPHRMDTAPTLKHFLAYNNETDRCTSSSHLPPRVLHEYELPAFLPALREGVAVAVMPSYNLVNGRPAHLSPLINDVLRAAAPDELMVVSDAMAPGNLVDPQHYYDDHATAYAHALRAGIDSFTQDDDRAEATLAHLRDALDRGLITEEDLDRAATHILSVRVRLGEFDPEPLRRVDPDTVNSPAHQALARTAARRSIVLLKNDGILPLRDPRRIAVIGQLADTLMEDWYSGTLPYAITARAGLAERTETVFCEGVDRIALRTNEGYLTASADGTPMTITPAPGFGPVAESAAFDLFDWGGAWALRAVVNGRYVSEDENGHLTNDQPGPNGWEVRQTFRWQPDPNGTGVLQHIATGRYVAVGDNNTVTLTPDADSAAVFAIDTLRSGATEAAAIAATAEVAIVVAGDHPLVNGRETEDRTDLDLPAAQEKVLRAVRAANPATVLVLTSGYPFGIVWADEHIPAILWSAHGGQEYGRALADVLFGDADPTGRLTQTWYRSAAELPDLFDYDIIANDATYLYYLGSPLYPFGHGLSYTTFDYTDPEVHVTDDHVTVHVTVTNTGDRFGEEVVQCYTHQRVSRVKQPLRKLQGFARVALHPGETRRVRIDFPIHALAIWDVTRSRFVVEDAPRTVHLGRSAKDLRVCAPLNVPGEPIGPRPATRLHAADNDEYHGVVLCAAAKDRGDAVRATEPGAWIAFLDVDFTPAPKEAVICANTDQPGTLTLRIDNPISGPTVATADIPAATDHFDFTEVRIPVDSVTRRHDLYIVFEAAGTALSWIDLS

SEQ ID NO: 5002 - protein, 149 aa, Helianthus annuus
MADQLTEDQISEFKEAFSLFDKDGDGCITTKELGTVMRSLGQNPTEAELQDMINEVDADGNGTIDFPEFLNLMARKMKDTDSEEELKEAFRVFDKDQNGFISAAELRHVMTNLGEKLTDEEVDEMIREADVDGDGQINYEEFVKVMMAK

SEQ ID NO: 5003 - protein, 152 aa, Triticum aestivum
MMACALSIAQPTALAPCGGGGGGSSKSVPRNLPKLRSPMVSGRMRSRAVVARAAQDSSEASSGSVVRYVKSSFNTTEDIFALAGIGFAAIAAFWASMMLIGVIDKLPVLPLFFELIGIAVAWWFIYGNLLFKPDREKFLENIKSSASRILGQ

SEQ ID NO: 5004 - protein, 214 aa, Paeonia parnassica
IVESVGEGVTDVKPGDHVLPIFTGECKECRHCKSEESNLCDLLRINTDRGVMLNDGKSRFSINGQPIFHFVGTSTFSEYTVLHVGCLAKINPEAPLDKVCVLSCGISTGLGATLNVAKPKKGSTVAIFGLGAVGLAAAEGARIAGASRIIGVDLNPKRFDEARKFGVTEFVNPKDYNKPVQEVIAEMTDGGVDRSVECTGSIMAMMSAFECVHD

SEQ ID NO: 5005 - protein, 305 aa, Pseudomonas syringae pv. tomato str. DC3000
MSLPLIYHDDYSPAFAQDHRFPMDKFRLLRDYLVDSGLTRDVQLMRPELCPVDILALAHDPSYISRYLSGDLSREDQRRLGLPWSEALARRTIRAVGGSLLTAEQALTHGLACHLAGGTHHAHYDYPAGFCIFNDLAVISQYLLQSGRVGKVLIFDCDVHQGDGTARILADTEDAITVSLHCEKNFPARKAQSDWDIPLPMGMGDADYLNVVDDLLNYLLPFYKPDLVLYDAGVDVHKDDALGYLQLTDRGLANRDEAVLRHCLGRDIPVMAVIGGGYSKDRHALARRHGILHHSAQRVWNDMGL

SEQ ID NO: 5006 - protein, 132 aa, Glycine max
  unsure (1)..(132): unsure at all Xaa locations
MAHSLSFAPICSFKSXHTRGIQFPVIRLSRTVFRINEACHDSKARNFQSLXAKAADDNPSTKTKSIVCSDCEGNGAILCTQCKGTGVNSVDHFNGQFKAGGLCWLCRGKRDILCGSCNGAGFIGGFMSTFDD

SEQ ID NO: 5007 - protein, 127 aa, Listeria monocytogenes
MGIAVLGGAGYIGSHAVNELITRGYEVVVIDNLRTGHRESIHKKAKFYEGDIRDKAFLSSVFEKEKVDGVIHFAASSLVGESMEVPLDYLNNNVYGTQIVLEVMEEFDVKHIVFSSSAATYGEPERV

SEQ ID NO: 5008 - protein, 181 aa, Vibrio parahaemolyticus RIMD 2210633
MKGLLKLAAYLGFISMSSFVLASECPDILQGKQRMLNSTEEIELCEVFKGKTLLVVNTASQCGFTPQYEQLETLYQTYKDKNFAVIGFPSNDFRQDKGSEENTAKICYLDYGVTFPMMARSSVLGNDANPVFSEISTQAGVTPKWNFYKFLISKEGKVIATFPSSTSPTSTTLTNMIEQQL

SEQ ID NO: 5009 - protein, 600 aa, Mycobacterium leprae
MREFSVPTRFSVGEHDNIAAVVFEHERDDPNLVIYQRQIDGVWTDVTCAEAASQIRSAALGLIALGMQAGDRVSIFSATCFEWAILDLAILSVGAVTVPIYETSSAKQVRWILQDSDAVLVFAETDAHATMVNQLAGELPALRQVLQINSAGATALDQLAEAGASVDVAQLANRLKTLRAQDPATLIYTSGTTGRPKGCQLTHSNLLYEVRGAKECLPTLLQPGQRLLVFLPLAHVLARALTLSAFTYKMTVGFTSDIKNLLPMLAVFKPTVVVSVPRVFEKVYNTAEQNAANEGKSRIFAMAAQTAVEWSEASHRGGPGLLLRARHAVFDRLVYRKLRAALGGDCHASVSGGAPLGARLGHFYRGVGLTIHEGYGLTETSAAITLNQAGNVKVGTVGNLLPGNSMRIADDGELLVRGNVVFSGYWHNEQGTIEAFTEGWFKTGDLGAIDEDGFLTITGRKKEIIVTAGGKNVAPALLEDQLRAHPLISQALVVGDAKPFVGALITIDPEAFNGWKQRNSKAADAAIGDLTTDPDLVAEVDAAVKQANLSVSHAESIRKFRILPVDFTEQTGELTPTMKVKRNVVAQKFASDIEAIYEKD

SEQ ID NO: 5010 - protein, 388 aa, Glycine max
MASRVSIGNLTSSAPYINSPHFRSQLKLSSNSSLHKPLMRDKTVLVTGGAGYIGTHTVLQLLLGGCRTVVVDNLDNSSEVSIHRVRELAGEFGNNLSFHKVDLRDRDALEQIFVSTQFDAVIHFAGLKAVGESVQKPLLYYNNNLTGTITLLEVMAAHGCKKLVFSSSATVYGWPKEVPCTEEFPLSAMNPYGRTKLIIEEICRDVHRAEPDWKIILLRYFNPVGAHPSGCIGEDPRGIPNNLMPFVQQVAVGRRPALTVFGNDYNTTDGTGVRDYIHVVDLADGHIAALLKLDDPNIGCEVYNLGTGKGTSVLEMVRAFEMASGKKIPLVMAGRRPGDAEIVYASTKKAERELKWKAKYGIDEMCRDQWNWASKNPYGYGDQEDSTV

SEQ ID NO: 5011 - protein, 380 aa, Solanum tuberosum
MSTTVGQVIRCKAAVAWEAGKPLVMEEVDVAPPQKMEVRLKILYTSLCHTDVYFWEAKGQNPVFPRILGHEAAGIVESVGEGVTELGPGDHVLPVFTGECKDCAHCKSEESNMCSLLRINTDRGVMINDGQSRFSINGKPIYHFVGTSTFSEYTVVHVGCVAKINPLAPLDKVCVLSCGISTGLGATLNVAKPTKGSSVAIFGLGAVGLAAAEGARIAGASRIIGVDLNASRFEQAKKFGVTEFVNPKDYSKPVQEVIAEMTDGGVDRSVECTGHIDAMISAFECVHDGWGVAVLVGVPHKEAVFKTHPMNLLNERTLKGTFFGNYKPRSDIPSVVEKYMNKELELEKFITHTLPFAEINKAFDLMLKGEGLRCIITMED

SEQ ID NO: 5012 - protein, 300 aa, Nicotiana tabacum
MGDKAKSTSSAGAWPTVKPFANGGASGMLATCVIQPIDMIKVRIQLGQGSAGEVTRTMLKNEGFGAFYKGLSAGLLRQATYTTARLGSFRVLTNKAIEANDGKPLPLYQKALCGLTAGAIGACFGSPADLALIRMQADATLPVAQRRNYTNAFHALYRIVADEGVLSLWKGAGPTVVRAMALNMGMLASYDQSVEFFKDNLGMGEAATVVGASSVSGFFAAACSLPFDYVKTQIQKMQPDAQGKYPYTGSFDCAMKTLKSGGPFKFYTGFPVYCVRIAPHVMMTWIFLNQIQKVEKKIGL

SEQ ID NO: 5013 - protein, 1035 aa, Pichia pastoris
MSDTSNDEVIKDILKKIERERNIAQGASNIRKKTNNAEIIQNCNTSIREAQQNIEYLEQTLSKLQLEQHNRAARGSNQGELTQQKVLKTSPPTFTFLDLLKYDCPSLGHRIHYMLQLLEFKLQVEKQYREANEKISRLYQVDGDRRSIAAAEGGKVESDMKIHLMKMALKNYHDVHVNIDEVARDTEVMNTFRKKPLSGTLSITINSIRDILHVSSIFSKKLETLVSIRLMTVEKARTKPTKNQRVNDSFQIHVEKGNELSLIVYDKVGDTLTPVAMIWFLLSDIVEEIRKKKVDRELNATGWMSASNLAGRPEQQQPQQLGSHPFDNQQGNLQSLQTHTSHSNGDTDPAQLSASAWFVLAPAGQILLTMGFNKTNDAGQKKEFMGGLGRHGAIRQRKEEVLEQHGHKFVPRQFCNIMMCAMCGDFLPYSGYQCEDCRFLCHKKCYQKVITKCISKSSIDVDPEETKLNHRIPHKFEPFSNHGTKWCCHCGYILPWSRKNVYKCSECGVVCHAQCTHLVPDFCGMSMEMASKILSTIKETTATRQQRQAMSMSSKSSGKSDTHISQKQLPPVPSAAQRLSQSDEAPKTKPIRRPPPPPPPVSNEQRVLPQREEPQVEPERTPNQAIAEAEYALEKQISSTSSSKETDHHHQHHHYHPQQQPQQQVKTVKTAVASDVSPTKVAVKKQEAARRSSERHHGRHRQKYGLDDFRFIAVLGKGNFGKVMLAESIHTGQLCAIKVLKKDFIIKNDEVASTKSEKRVFIIANRGKHPFLLNLHQCFQTENRIYFVMEYVSGGDLMWHAQQRTFSPSRAKFYAAEVLLALQYFHENGVVYRDLKLDNILLTADGHIKLADYGLCKEEMWYGSTTATFCGTPEFMAPEILKEQKYDKAVDWWAFGVLLYQMMLGKSPFKGEDEDEVFNSILTDEPRYPIQMDRESVDILQQLLTKDPYKRLGASEEDAEEIKRHPYFHGINWDDIMQCKVPPPLIPTIKDRHDVSNFDVEFTTEAPKLTPVNSVLSLSMQEQFRGFTYVNDDHT

SEQ ID NO: 5014 - protein, 379 aa, Arabis blepharophylla
MITTGQIIRCKAAVAWEAGKPLVMEEVEVAPPQKHEVRIKILFTSLCHTDVYFWEAKGQTPLFPRIFGHEAGGIVESVGEGVTDLAPGDHVLPIFTGECGDCPHCHSEESNMCDLLRINTERGGMIHDGESRFSIDGKPIYHFVGTSTFSEYTVIHSGQVAKINPDAPLDKVCIVSCGLSTGLGATLNVAKPKKGQSVAIFGLGAVGLAAAEGARIAGASRIIGVDLNSKRFDEAKKFGVTEFVNPKDHDKPVQQVIAEMTDGGVDRSVECTGSVQAMIQAFECVHDGWGVAVLVGVPSKDDAFKTHPMNFLNERTLKGTFFGNYKPKTDIPGVVEQYMNKELEIEKFITHTVPFSEINKAFDYMLKGEGNRCIIRMGA

SEQ ID NO: 5015 - protein, 463 aa, Thermoplasma acidophilum
MNNHRYSSLKRNAIGFKENMFQGVAGSAPAGAAVATLTGAAAYALGSLPLAAFIAFLVVFLNAFIISRLSTRIAGAGGYYYYVRDGLGNRPARFTGFLYIFYQIMALAFISLSVGVFVPAVLGAVFGIAIPGYLMYLLIVAVLAAGFLISYSGVRESTRYTMYMAIAEMAIVAGMGVIILVMKPSINTISVFTPKFAYGGFSGVGIGVLLMYTAFSGFGASTPLGEESMDAEKTISRSVLFTVVVLGAFFVFASYYFTVAWGPANMASYANPNNLAPGITMIRNYLGTGAAILITALFINSLLTGTVVVTNSTSRVMMAMARDGIINESFSGVSRRKTPHISAAFVSAGSAIIAIVSAAVLGGFGAFIMTATAATLGVLLVHALINISLPASDMHLHRSFYGSMILSVVSVAVLGFIFYSTFMSISLPVIVGSLAFAIFSVSALVYSLKNRTSEVHSEMAVES

SEQ ID NO: 5016 - protein, 501 aa, Neurospora crassa
MSRTTQQQQQTKRPIKRVAVIGAGPAGAITIDALAQERTFDLIRVFERREGPGGCWIGDNNNNNNNRPQPLTDFTSLSNRTADPPLPIPQGALPAFTPKLDQQRFTESSVYPYLETNVDALPMEFSQEPFPSQKSELSIALHGPDTPFRHWKSVRGYIAGLVNRNGYQDLVSYSTTVEKVEKVGDEWKVTLRKEGEQQEDYWWAEWFDAVVVASGHYWVPWIPAVEGLEAFERQRPGSVLHSKQFRGRDLYLDKKVVIVGASVSAADIAYDLAHSRTAQVPVHAITVGHTFNGYFGDEAFKHPRIENHPSISRVCPKTRTVYLVDGTCIPNVDHIIFGTGYTWTLPFLSQVLPVRNNRVPDLYQHVVWQKDPSLLFVGAVGAGLTFKVFEWQAVYAARILAGRAQMVPTLKEMQEWEEERIKEKGDGPKFSLIYPEFEEYFETLRRLAGEGETARGLGRKLPRFRPEWFRAFMEGHDLRKRMWKRVSKQAREEDKFSRAKL

SEQ ID NO: 5017 - protein, 2160 aa, Magnaporthe grisea
MTRNDALSRFSSITSSSTDSAHSTATVKPLPSTPIASDTRRHSSGSRPAIPSRLRIDDDLNRITASPLRDDTQVSPTNTFGTRVALSPSSPTSNVFPREQRLSDFGNYRRDLAVLDPGGSRVPQIQQPPPNTGPSLSSQVAPWMTSNGTGGAPAAINTSFYNDSSDNLSVASQLSPGFRIPGGRPSISQPSGVGADNNEASYFGDERRPSIASITTTASSQGSKASGNRGGFRKLQGFFGEEFPGRDSSDTSLPPAVPGKEHRSHSYSHGRPYRDRNYSNATDHTRDGSPSSSRPRTPVPAPEVVPFLYQEADDIAKYGEAPVRDILSGPDRERYVTGDSLQNPPKTSSSSRSGHSLAHLSGQHRHQKSNDDPRTLRPTMSRDDSAVPTYKDRSGSATTMMTTSRDRAHSPAPSGHSIGGYFSSKNGTYDGQTSPPGHQKKSLLGRFKRNKDKEDTGSLKKTSPSSTSLNLKPSRSEFGGDGASTMGQDWPSRLAEPSQYNSNSNSASARPPQARHGTFKSPFAKRGRTHHRHDDRDEAIGPTDKHDGMQAGGTMFHLDTDLNDMSGILSRPLPLTPMDADFVGTIKGEKSTVTSNGRNGAWDAPDSWAVKRTGDDLAYHGPENDEAGPSPRPEEKMTSYCIRVFKSDGTFATLQMSIDSSVQDLIGQLSKKSYVSGGLEYHIALRKHGLIRVLGSAEKPLFIQKRLLRQVGFEERDRIEDIGREDNSYLCRFLFMSSRELEQQARTQDLGLGRTQKFNHVDLSARNIIRIPIYLYSKVQDIISLNLSKNLSLDLPRDFISSCQNLRDIKFNNNEARKLPASLGRASRLTYLDVSNNRIDHLENAELNGLVGLLKLNLANNRLKHLPPYFGAYRSLRTLNVSSNFLDKFPSFLCELESLVDLDLSFNLIGAFPPAIENLRNLEKLVITNNRLAGTLPDSFSRLQSLRELDIKYNAISGIDVISLLPKLEILAADHNAISQFVGSFERVRSLKLKDNPITRFELTSTVPTLKLLNLSNAKLASIAESFNHMLNLERLVLDRNHFVSLPSQIGRLRRLEHFSIAHNALAELPPEVGCLQELKFLDVRGNNLKKLPLEIWWANKLETLNASSNVMTDFPKPASRPPQPPESSPGSMQGSNGKVAMVGSLSTPPSIEDLDPDDSRRPSQASSSTLLSVGPSPVPAGPDRKSSVVSVYGKGGRKTSIISRSANSSGNAPAPPNTRKDSGLSARITNTFSGSLRNLFLADNLLDDDVFDQIMLLCELRVLNLSFNQISDMPQRCIKSWPQLSELYLSGNELTTIPVDDLEEYSLLQVLHINCNKFTNLPADISRAKKLAVLDCGSNFLKYNISNVPYDWNWNLNPNLRYLNLSGNRRLEIKQPAYGSGAGNREQYTDFSRLQNLRVLGLMDVTLTQPSIPEQSEDCRVRTSGSSAGYLPYAMADTLGKNEHLSTVDLVVPRFNASETETLLGLFDGQALSSGGSKIAKYLHENFGQILATELRALKTGLKETPEDALRRAFLALNKELVTIAIQHSEDRPSVPHRSGSQAHVILNKEDLNSGGVATVVYLQGQDLYVANVGDAQAMIIQSDQTHKMLTRKHDPAEPTERSRIREAGGWVSRNGKLNDQLGVSRAFGYVDLMPAVQAAPHVSHVAIREQDEMILLATSELWEHLAPELIVDIARQERGDLMRATQKLRDLAIAYGSTNKIMIMMISVADLKRRTERTRINRGQSMSIHNLSLHGEQYKFPTRGRRKKDQVMDSTLQRLEAEVPAPTGMIAIVFTDIKNSTNLWETYPAAMRSAIRLHNEMMRRQLRRIGGFEVKTEGDAFMVSFPTATSALLWCFAVQLQLLEVNWPSEMLNSLSCKPTVDKNNQVIFKGLSVRMGIHWGEPLCEPDPITRRMDYYGPMVNKASRISAVADGGQITVSSDFISEIQRCLETYQGANAAALVNESFDEDPFSMAIRKELRSLSSQGFEVKELGERKLKGLENPEVVYSLYPHQLAGRIETHQAHDKGVTAAAPELIENTPAVLKEGSELDFDPEIIWGLWKLSLRLEMLCSSLEYVGGRGLQAPETELLERMKQRGGEVTESFLVNFMEHQISRIETCVSTLSIRHLNMGGGTIKELDDLRGPISSVLANFSKQMAELQRYKALYGPLDAIEDGQQAS

SEQ ID NO: 5018 - protein, 222 aa, Oryza sativa
  unsure (1)..(222): unsure at all Xaa locations
MLSRLRGLRRYVASRTLRGIKRWRRKTTETGDRGEREEHMASGEEEGVGWRRRGRRWWRAAEEEEEGGRGCXMAELEQVFRRYDANGDGKISAEELASVLRALGAPLGPGEVRRMMDEMDSDRDGFVDLSEFAALAHGGKGGDAKDQEAASEAELREAFRMYDADSNGKISARELHRVLRQLGDKCSVADCSRMIRSVDADGDGCVNFDEFKKMMGGGGGRR

SEQ ID NO: 5019 - protein, 245 aa, Alcaligenes latus
MTQKLAYVTGGMGGIGTSMCQRLHKDGFKVIAGCGPSRDYQKWLDEQKALGYTFYASVGNVADWDSTVVAFEKVKAEHGTVDVLVNNAGITRDGQFRKMSKADWQAVMSTNLDSMFNVTKQVIDGMLDKGWGRIINISSVNGEKGQFGQTNYSAAKAGMHGFTMALAQEVAAKGVTVNTVSPGYIATDMVKAIRQDVLDKIVSTIPIKRLGTPEEIASIVAWLAGDESGFTTGADFSCNGGLHMG

SEQ ID NO: 5020 - protein, 341 aa, Pirellula sp.
MSTATSKAVQSKQIELVSRPDGMPQPSNFELRKAEVGPIQDGEILVKNQWMSVDPYMRGRMKDTDSYVPPFQIDEPLEGGCIGEVVQSENDQFKEGDMVLGNLGWREYWTSDGKGITKIDPNIAPPQAFLGALGMTGMTAWVGLHKIARLKKGSTVFVSAASGAVGSIVCQLAKAMDCRVIGSAGKEEKIQWLKDKTGIDAVINYKEVDNLSEELAKHAPDGIDVYFDNVGSDHLEAAIDNMNDFGCCVECGMIATYNATEPPAAPRNMFKVIAKRLRIQGFIVRDHMDAKDEFVADMAKLIQQDKVVWEESVTDGIENAPDAFIGLFEGDNLGKQLVRLN

SEQ ID NO: 5021 - protein, 159 aa, Glycine max
  unsure (1)..(159): unsure at all Xaa locations
PCLYNQXTFNLDPVQFAAEGIKSMCHEMTALKSANKELKGMMKTVKIQDIDNLQDEMMDLMDVSNEIQETLGRSYNVPDDIDEDDLMGELDALELDMGNETEADGVPSYLQPDKEPDLDAELNLPAAPTGQTAVPPGRFNAQTEDELGLPAVPRASIRG

SEQ ID NO: 5022 - protein, 242 aa, Gerbera hybrid cultivar
MGKGRLELKRIENKINRQVTFAKRRNGLLKKAYELSVLCDAEVALIVFSTRGKLYEFSSTSSMLKTLERYEKCSFGPPEQRRPAAKEDLQEQSSYQEYMRLKERYDALKRLERNYYGEEIDSLTTSELESLERQLHCSLKQIRTIRTQSLLDKLYEQQKMEHQLYESNKTLRLRLDEEGQAEALQWDAHAHANGMVYAHQHQVSQPMRDTFYHPTGCETTLQIGYQSEQMSAVNHQMQGWPA

SEQ ID NO: 5023 - protein, 312 aa, Triticum aestivum
  unsure (1)..(312): unsure at all Xaa locations
WRLIFQMLDYNVPGGKLNRGLSVIDSYMLLREGTEVDEEDFYLACVLGWCIEWLQASALVMDDITDNAYTRRDNLCWYKLPTVGLSAINDGVLLKCHVQAIIKRYFKEKFYFMELMELWNEIGLQTAMGQMLDLITTHTGAKDLARYRIQGYRRIVKYKTSYYSFYXLPVACALLLNGAKLSDYVELKNVLIEMGVYFQIQDDYLDCFGDPQVIGKVGTDIEDYKCSWLIVQAMELANENEMKILYENYGKSCPECVAAVKNVYKELDLQDIFLEYESRVYKHLVSTIDAEPDRAIREILKIFLKKIYRRKK

SEQ ID NO: 5024 - protein, 263 aa, Zea mays
MLELRLVQGSLLKKVLEAIRELVTDANFDCSGTGFSLQAMDSSHVALVALLLRAEGFEHYRCDRNLSMGMNLNNMAKMLRCAGNEDIITIKADDGSDTVTFMFESPKQDKIADFEMKLMDIDSEHLGIPDSEYQAIVRMPSAEFMRICKDLSSIGDTVVISVTKEGVKFSTSGEIGSANIVCRQNQTIDKPEEATIIEMQEPVSLTFALRYMNSFTKASSLSEQVTISLSSELPVVVEYKIAEMGYIRFYLAPKIDDDEEMKP

SEQ ID NO: 5025 - protein, 257 aa, Brucella suis 1330
MSDQAPQIDLNFPLSEKVAIVTGGASGIGAAISKAFIAKGAKVAVLDISADIAKAKAEELGENAKPFVCDVSSQQSVNDAITAVISQFGKIDIAVNSAGVVYLAPAEDISLDYWDKTININLKGSFLVTQAVGRAMIAAGNGGKIINLASQAGTVAIEEHVAYCASKFGVIGMSKTFAAEWGKYGICVNTLSPTIVLTELGKKAWAGEKGEAAKKRIPAGRFAYPEEIAAAAVFLASAGADMITGADLLIDGGYTIL

SEQ ID NO: 5026 - protein, 292 aa, Zea mays
MSAGRQAYWCYQCRQRVRPRGREMVCPYCDSGFVAEMDDVDALMSHFVGTDPDFHRDPRFGIMEAISAVMRHGMAGMNREVDVRGRPNFFSDLEMEFGSGPWLLFRGQLPGHLTEDNGFDVFVNGRRGGGGGGVGMRRANIADYFVGPGLDDLIEQLTQNDRRGPPPAAQSSIDAMPTVKITQRHLSGDSHCPICKEKFEMGSEEAREMPCKHLYHSDCIVPWLEQHNSCPVCRYELPPQGSATGASCSRARSTDQSQSSSSSSSSGRTSGRQRRRNPFSFLWPFRSSSSSR

SEQ ID NO: 5027 - protein, 160 aa, Zea mays
MVRGSLCMCSSASLLLFWLHLYDLTKEGSLDGPHLHTVYPHGSTDTLPFATMGSGSLAAMSVFESKYKEGLTREEGIQIVCEAICAGIFNDLGSGSNVDVCVITKGKTEYLRNHQLPNPRTYASSKGYSFTKGQTEVLSSKVTLLKQKVEVAEGGDAMEE

SEQ ID NO: 5028 - protein, 370 aa, Agrobacterium tumefaciens str. C58 (Cereon)
MTVRSLFLLPGDGIGPEAMTEVRKLIEYMNSAHNAGFTVSEGLVGGSAYDAHGVAISDADMEKALAADAILFGAVGGPKWDGVPYEHRPEAGLLRLRKDLELFANLRPAICYPALAAASSLKPELVEGLDILIVRELTGGVYFGEPKQIIDLGNGQKRGIDTQIYDTFEIERIASVAFELARSRDNRVCSMEKRNVMKSGVLWNQVVTETHAAKYKDVQLEHMLADAGGMQLVRKPKQFDVIVTDNLFGDMLSDVAAMLTGSLGMLPSASLGAPDAKTGKRKAMYEPVHGSAPDIAGKSIANPIAMIASFAMCLRYSFNMVDEATKLEAAIANVLDKGIRTADIMADGCRQVGTSDMGDAVLAEFKALSA

SEQ ID NO: 5029 - protein, 248 aa, Lycopersicon esculentum
MDFQSDLTREISPQRKLGRGKIEIKRIENTTNRQVTFCKRRNGLLKKAYELSVLCDAEVALVVFSNRGRLYEYANNSVKATIERYKKACSDSSNTGSVSEANAQYYQQEASKLRAQIGNLMNQNRNMMGEALAGMKLKELKNLEQRIEKGISKIRSKKNELLFAEIEYMQKREVDLHNNNQYLRAKIAETERAQHQHQQMNLMPGSSSNYHELVPPPQQFDTRNYLQVNGLQTNNHYPRQDQPPIQLV

SEQ ID NO: 5030 - protein, 504 aa, Listeria monocytogenes
KPLANLKNLGWLFLDENKIKDLSSIKDLKKLKSLSLEHNGISDINGLVHLPQLESLYLGNNKLTDITILSRLTKLDTLSLEDNEISDIVPLSGLTKLQNLYLSKNHISDLRALAGLKNLDVLELFSQECLNKSINHQTNLVVPNTVKNIDGSLVTPEIISDDGDYEKPNVKWHLPEFINEVSFIFYQPVTVGKAKARFHGRVTQPLKEVYTVSYDVDGTVIKTKVEAGTRITAPKPPTKQGYVFKGWYTEKNGGHEWNFSTDYMSGNDFTLYAIFKAETTEKAVNLTRYVKYIRGNAGIYKLPREDNSLKQGTLASHRCKALTVDREARNGSELWYRLKNIGWTKAENLSLDRYDKIEYDKGVTAYARVKNAPGNAVWTKPYNTAGATLVNKLSVYQGKNMRILREAKTPITTWYQFSIDGKVIGWVDTRALNTFYKQSMEIPIQLTRYVNANKGNEAYYKVPVVDSPIKWGTLAKYKNQTLIVDRTATVEGQLWYRIRTSSTF

SEQ ID NO: 5031 - protein, 370 aa, Triticum aestivum
MAGGGGKVACAAWIRRREDKATRVFAVHGRPSPPALEVLGFDSGSCSLSEEPLARIVLGDDPDDAPLAVAVHPTGDELVCTTAKGCRLFKLIFEEFTVRFIESKAPAIESVGLQKCVAFSTDGAKFAIGGEDGHLRIFHWPSMKVLLDEPNAHKSFRDMDISLDSEFLVSSSTDGTARIWKINEGVPLVNLTRSSDEKIECCRFSRDGMKPFLFCTVAKGSKAVTVVWNISDWSRIGYKRLLGKPASTLSVSLDGKFLALGNQDGDFCVVDVKEMEISHWSKKVHLGSPICGIEFCPTERVVISTSPQWGAELTRLNVPADWKEWQIWLILLALFLASAVLFYVFYQNSGSFWSGTPRRDVIDLPSHAEF

SEQ ID NO: 5032 - protein, 487 aa, Pseudomonas aeruginosa PAO1
MTDLNTSQGQQLRRVLKPRHLNMIAIGGSIGTGLFVASGATVATAGPGGALLSYALIGLMVYFLMTSLGEMAAYMPVSGSFCTYGSRFVEDGFGFALGWNYWYNWAVTIAAELVAAQLVMSFWFPEVPGIYWSAIFLGIMFGLNVISARGFGESEFWFALIKVVTVVIFIGVGLATIFGIMHGVESPGFSNFTMGDAPFVGGFQAMVGVAMIAGFSFQGTELIGIAAGESENPRKNIPIAIRQVFWRILMFYILAIFVIGMLIPYTDPNLLKNDASDISVSPFTLLFERAGFAAAAGVMNAVILSAILSAGNSGMYASTRMLYNLALEGKAPRLFSRVSRSGVPRNALYATTLVGALCFLTSAFGDSTVYTWLLNTSGMCGFIAWLGIAISHYRFRKGYLAQGGRLEDLPYRAKLFPFGPLFAFALCMVITLGQNYQALVGERIDWIGLLATYISLPLFLAIWLGYRWKKRARFVRYHEMDVSPTNT

SEQ ID NO: 5033 - protein, 260 aa, Triticum aestivum
  unsure (1)..(260): unsure at all Xaa locations
RGAVQSIGSCDAFATEYDLEAEEYVPIPKGGSPRRKXIVQDVTLHDLDAANAQPQGGQDILSLMGQMMQXRKTEITEKLRQEINKVVNRYIDEGIAELVPGVLFIDEVHMLDIEGFSYLNRALESPLSPIVILATNRGICTVRGTDMTSPHGIPVDLLDRLVIVRTQIYGPIEMIQILAIRAQVEEIEIDEDSLAFLGXEVGQQTSLRHAIQLLSPAXVVAKANGREKICKADLEEVRGLYLDAKSSARLLQDQQGSYIT

SEQ ID NO: 5034 - protein, 94 aa, Nicotiana plumbaginifolia
QWREGPLGPKTLCNACGVRYRSGRLFPEYRPAASPTFIPTLHSNSHRKVVEMRKKAIYGETSALEEPHNVIVEGPPMSPAPEFVPMSSYLFDVY

SEQ ID NO: 5035 - protein, 139 aa, Zea mays
GSPGFGFVGERIEMAASDVEYRCFVGGLAWATDDHSLHNAFSTYGEVLESKIILDRETHRSRGFGFVTFSTEEAMRNAIEGMNGKELDGRNITVNEAQSRGGRGGGGGGYGGGRGGGGYGGRREGGGGGYGGGGGGWRD

SEQ ID NO: 5036 - protein, 414 aa, Yersinia pestis CO92
MEQPSPVTRQSFDEWIVPTYAPADFIVVRGEGSTLWDQQGKSYIDFAGGIAVNALGHGHPAVRAALIEQADKVWHLGNGYTNEPVLRLAKQLIDATFAEKVFFCNSGAEANEAALKLARKYALDNFANKAGQQGEKNQIVAFRNAFHGRTLFTVSAGGQPKYSQDFAPLPGGIHHGIFNDLASAEHLITDQTCAVIVEPIQGEGGVLPADKEFLHGLRALCDRHNALLIFDEIQTGVGRTGELYAYMHYGVSPDVLTSAKALGGGFPIGAMLTTTKYASALSVGSHGTTFGGNPLACAVAGTVLSLINQPTLLAGVKARHQWFIDELAEINARHNVFAEIRGRGLLIGCVLNAQYAGKSKEIVQAAAQYGLIALIAGPDVVRFAPSLIISPKEIKEGLARLAMGIEQVCQKVTS

SEQ ID NO: 5037 - protein, 228 aa, Gossypium marchantii
FTSLCHTDVYFWEAKGQTPLFPRIFGHEAGGIVESVGEGVTHLKPGDHVLPVFTGECGNCRHCKSKESNMCDLLRINTDRGVMLSDGKTRFSINGKPIYHFVGTSTFSEYTVAHVGSVAKINPAAPLDKVCILSCGISTGLGATLNVAKPAKGSTVAIFGLGAVGLAAAEGARIAGASRIIGVDLNPNRFEEAKKFGCTEFVNPKDHBKPVQEVLAEMTNGGVDRSVE

SEQ ID NO: 5038 - protein, 132 aa, Daucus carota
DYEMKLMDIDSEHLGIPESEYEAIVRMPSAEFARICKDLSTIGDTVVISVTKEGVKFSTRGDIGTANIVCRQNTSVDKPEDATIIEMQETVSLTFALRYMNSFTKATPLANQVTISLSSELPVVVEYKIAEM

SEQ ID NO: 5039 - protein, 193 aa, Oryza sativa
  unsure (1)..(193): unsure at all Xaa locations
ENIRPDVVILGRALGAGVVPVSAVLADKDIMLCIKPGEHGSTFGGNPLASAVAVASLKVVTDEGLVERAAKLGQEFRDQLQKVQQRFPQIIREVRGRGLLNAVDLSNEALSPASAYDICIKLKERGVLAKPTHDTIIRLAPPLSISPEELAEASKAFSDVLEHDLPQLQKQIKKTESAAEKQSCDRCGRDLYX

SEQ ID NO: 5040 - protein, 331 aa, Triticum aestivum
MACGLLPLLHGPLSSPPRPLVPSRSPSLLAPGTLPLAPRRSRVSRHLSPAPPRALPDIAAAAAGLRDAVAGAFQASPPTWSSAATTNVAIFVAGTPLLLSGLSASGIAAAYVLGTLTWRAFGARAYLLVAAYFVVGTAVTKLKIKQKEALGVAEKKGGRRGPGSVIGSSAAGCVCALLSVYNVGGGAFAELWTLGFVASFCTKLSDTVSSEIGKAYGRTTYLVTTFKVVPRGTEGAVSVEGTLAGILASMFLAGIGYILGQVNLPQSVLCVLASQIANFGESLIGATLQDKEGFEWLNNDVVNVVNISAGAVLAALMQQLLVSWAFMISLS

SEQ ID NO: 5041 - protein, 69 aa, Zea mays
MSLVFLCFPIANALIAKINDGSPLVDELVLLLLYCAYTVGLYLHLAVSVVHEIKDALGIYCFRITRKEA

SEQ ID NO: 5042 - protein, 140 aa, Nicotiana tabacum
MSGGIAQDWEPVVIRKKAPTAAARKDEKAVNAARRSGAEIETIRKSAAGTNKAASSSTTLNTRKLDEDTENLAHQKVPTELKKAIMQARQDKKLTQAQLAQLINEKPQIIQEYESGKAIPNQQIISKLERALGAKLRGKK

SEQ ID NO: 5043 - protein, 439 aa, Glycine max
MHRSLKVAVIGAGVSGLAAARELRHEGHNVVVLEKSNHVGGMWAYDPKTDSDPLGLDPTRETVHSSLYLSLRTNLPRQLMGFSDFPFVKNESGDPRTFPGHEEVLRFLEGFAGEFGINELTQFETEVVRVERKGNEWVVESRTSRDGDSVSREGFDAVVVCSGHFVEPKLAEVPGIDTWRGFQMHSHNYRVPQPFHNQVVILIGLGPSAFDISREIAQVAREVHVATRLNPDLAGMKLGDYGKIMFRTAVKCVFEDGLVAFEDGFSVYADAIIHCTGYKYHFPFLETNGLVTVDDNRVGPLYKHVFPPALSPWLSFIGLTFKNSVYQIIELQCKWVAKVLSGKVLLPTEKEMMESVKEYYQLMEENGLPKRYTHSLYPLQADYKHWLVAEIGLPPLEEWKENMLKQCFKNFVEMNEKYRDEWDDTYWDAIIHGAPASEK

SEQ ID NO: 5044 - protein, 334 aa, Streptomyces coelicolor A3(2)
MTTVAVKPATMAQALTRALRDAMAADPGVHVLGEDVGTLGGVFRVTDGLAAEFGEDRCTDTPLAEAGILGTAVGMAMYGLRPVVEMQFDAFAYPAFEQVVSHVTKMRNRTRGKMPLPLTIRVPYGGGIGGVEHHSDSSEAYYMATPGLHVVTPATVADAYGLLRASIASDDPVVFLEPKRLYWSKDSWNPEEPASVEPMGRAVVRRSGRSATLITYGPSLAVCMEAAEAARAEGWDLEVVDLRSLVPFDDETVCASVRRTGRAVVVHESGSFGGPGGEIAARVTERCFHHLEAPVLRVAGFDIPYPPPMLERHHLPGVDRILDAVGRLQWEAES

SEQ ID NO: 5045 - protein, 355 aa, Novosphingobium aromaticivorans
MRRYSIASIPGDGIGREVVPAAIEVLTAAAAKCGFVLEFRHFDWSCQTYLETGKMMPDDGLDRLRDHDAVFLGAVGFPGVPDHISLWGLLLPIRREFEQYVNLRPVRLLPGIASPLRDKAPGDIDFWVVRENSEGEYSQIGGRTGTGENEIVVQQAIFSRRGTDRILRYAFDFARRSGRRHVTSATKSNGLYHSMPFWDERFAAIGAEYPDVAADQYHVDILAARFVMSPERFNVVVGSNLFGDILSDLGPGITGTIAVAPSANLNPERRFPSMFEPVHGSAPDIAGQGIANPIGQIWSGAMMLEHLGEAEPAALVMRALETALIAPDIARTPDLGGNGTTAGFAQAVRSTLLGL

SEQ ID NO: 5046 - protein, 392 aa, Coleostachys genipifolia
DLEPVNPADVPVTAAGALKSYKLAARAISRLQSLPSGNISLLCDVLVKEVRDLTGYDRVMVYKFHEDEHGEVVSECRRPDLEAYLGLHYPATDIPQASRFLFMKNKVRMICDCLAPPVKVIQDKRLVQPLSLCGSTLRSPHGCHAQYMANMGAIASLVMSVTINEGDDTMDGDQQQMARKLWGLVVCHHTSPRFVPFPLRYACEFLIQVFGVQINKEVELAAQVREKHILRTQTLLCDMLLRDAPVAIITQSPNVMDLVKCDGAALYYRKKFWLLGVTPTEAQIKEIAQWLIEYHSGDTGLSTDSLMEAGYPSASVLGDAVCGMAAVKITSRDFLFWFRSHTAKEIKWGGAKHDPDDKDDGRKMHPRSSFKAFLEVVKWRSLPWEDVEMDAI

SEQ ID NO: 5047 - protein, 454 aa, Triticum aestivum
  unsure (1)..(454): unsure at all Xaa locations
METKPRPSRVGRVTAKKRPRPDASSSTTRKLQRREIAAFPEPTFAASTTRERXRNIEPHEEFXDTYDPKENXENNPYLRKRSKIIEIIGARDIIFALSQLGVCAAFSRVTNQXRFAFMNGSPDHVXIRSLFFITRTNVSLITVSVYGXSENFSALRCRTTRIEYIRRGKPDAGFPLFETESLRWPGFVEFDDVNGKVLTYSAQDSTYKVFDLKNYTLLYTISDKDVQEIKISPGIMLLIYSRKKGYIPLEILSIEDGKRLKSFRHLLHRNKKIDFIEQFNEKLLVKQDGENLQILDVTNSKITEVSSNEFVTPSAFIFLYEMQLFLTFRNRSVSVWNFRGELVTSFEDHLLWHPDCNTNSIYITSNQDLIISYCKAEPDDPSSEDNACSINISDILTGKCMAKIKAGNLCKQKSSKSSGTPLEALGDITSLYYDEEREEIITGNHQGLIHVWSN

SEQ ID NO: 5048 - protein, 112 aa, Sulfolobus tokodaii
MKFCPKCGSIMVPKKDNGKTMYKCPKCGYEEESTSSGSMKIKTVVKHSIKEKTLVVDGDAPPAGAQITKGVTCPACGNDEAYFWILQTRRADEPPTRFYKCTKCGKVWREYE

SEQ ID NO: 5049 - protein, 285 aa, Mesorhizobium loti
MRYNQLGNTGMFVSELCLGTMTFGAAGQNAQWGLIASLDQKGVNDIVGRSIAAGVNFFDTADVYSFGESERLLGQSLRDLGVKRSDVVIATKVHGTMGQGPNERGSSRGHIMDSVDASLERLQLDHIDLYQLHGTDAVTPIDETLRALDDLVASGKVRYVGVSNWAAWRIAKALGIADRKGFARFETIQSYYSIAGRDLEREIVPLISEEKLGLMVWSPMAGGLLSGKYGPGAPGNGEGRRASFNFPPVNEDRAWAAVAVMREIAKKHDVSVATVALGYVLAKPS

SEQ ID NO: 5050 - protein, 752 aa, Geobacillus stearothermophilus
MENQNRQNAAQCPFHGSVTNQSSNRTTNKDWWPNQLNLSILHQHDRKTNPHDEEFNYAEEFQKLDYWALKEDLRKLMTESQDWWPADYGHYGPLFIRMAWHSAGTYRIGDGRGGASTGTQRFAPLNSWPDNANLDKARRLLWPIKKKYGNKISWADLFILAGNVAIESMGGKTIGFGGGRVDVWHPEEDVYWGSEKEWLASERYSGDRELENPLAAVQMGLIYVNPEGPDGKPDPKAAARDIRETFRRMGMNDEETVALIAGGHTFGKAHGAGPATHVGPEPEAAPIEAQGLGWISSYGKGKGSDTITSGIEGAWTPTPTQWDTSYFDMLFGYDWWLTKSPAGAWQWMAVDPDEKDLAPDAEDPSKKVPTMMMTTDLALRFDPEYEKIARRFHQNPEEFAEAFARAWFKLTHRDMGPKTRYLGPEVPKEDFIWQDPIPEVDYELTEAEIEEIKAKILNSGLTVSELVKTAWASASTFRNSDKRGGANGARIRLAPQKDWEVNEPERLAKVLSVYEDIQRELPKKVSIADLIVLGGSAAVEKAARDAGFDVKVPFFPGRGDATQEQTDVESFAVLEPFADGFRNYQKQEYSVPPEELLVDKAQLLGLTAPEMTVLVGGLRVLGANYRDLPHGVFTDRIGVLTNDFFVNLLDMNYEWVPTDSGIYEIRDRKTGEVRWTATRVDLIFGSNSILRSYAEFYAQDDNQEKFVRDFINAWVKVMNADRFDLVKKARESVTALQISRYPRSNTTIACSK

SEQ ID NO: 5051 - protein, 148 aa, Euglena gracilis
AEALTHEQIAEFKEAFSLFDKDGDGTITTKELGTVMRSLGQNPTEAELQDMINEVDQDGSGTIDFPEFLTLMSRKMHDTDTEEEIKEAFRVFDKDGNGFISAAELRHVMTNLGEKLTDEEVDEMIREADVDGDGQINYEEFVKMMMSK

SEQ ID NO: 5052 - protein, 176 aa, Thermococcus litoralis
MNPFHDLEPGPEVPEVVYALIEIPKGSRNKYELDKKTGLIKLDRVLYSPFHYPVDYGIIPQTWYDDDDPFDIMVIMREPTYPGVLIEARPIGLFKMIDSGDKDYKVLAVPVEDPYFNDWKDISDVPKAFLDEIAHFFQRYKELQGKEIIVEGWENAEKAKQEILRAIELYKEKFKK

SEQ ID NO: 5053 - protein, 292 aa, Oryza sativa
MARWAIAIHGGAGVDPNLPEHRQEEAKRVLARCLQVGVDALRSGAAALDVVEAVVRELESDPFFNSGRGSALTRLGTVEMEASIMDGRGRRCGAVSGVSTVKNPVSLARLVMDKSPHSYLAFDGAEQFARDQGLEVVDNSYFITEDNVGMLKLAKEANSILTVGCAVVDSSGHTAAATSTGGLMNKMTGRIGDSPLIGSGTYACGACAVSCTGEGEAIIRSTLARDVAAVMEYRGAGLQEAVDYCVKKRLDEGFAGLIAVSSTGEVAYGFNCTGMFRGCATEDGFMEVGIWE

SEQ ID NO: 5054 - protein, 335 aa, Zea mays
MAHRVLLLLSLASAAAVAAAVDAEDPLIRQVVPGGYDNDLELNAESHFLSFVQRFGKSYKDADEHGVTKFSDLGLRKSRRALLRELGESAHEAPVLPTDGLPDDFDWRDHGAVGPVKNQGSCGSCWSFSASGALEGAHYLATGKLEVLSEQQFVDCDHECDSSEPDSCDSGCNGGLMTTAFSYLQKAGGLESEKDYPYTGSDGKCKFDKSKIVASVQNFSVVSVDEAQISANLIKHGPLAIGINAAYMQTYIGGVSCPYICGRHLDHGVLLVGYGASGFAPIRLKDKPYWIIKNSWGENWGENGYYKICRGSNVRNKCGVDSMVSTVSAVHASKE

SEQ ID NO: 5055 - protein, 438 aa, Saccharomyces cerevisiae
MVSALNPRTTEFEFGGLIGALGISIGLPVFTIILNQMIRPDYFIKGFFQNFDIVELWNGIKPLRYYLGNRELWTVYCLWYGILAVLDVILPGRVMKGVQLRDGSKLSYKINGIAMSTTLVLVLAIRWKLTDGQLPELQYLYENHVSLCIISILFSFFLATYCYVASFIPLIFKKNGNGKREKILALGGNSGNIIYDWFIGRELNPRLGPLDIKMFSELRPGMLLWLLINLSCLHHHYLKTGKINDALVLVNFSQGFYIFDGVLNEEGVLTMMDITTDGFGFMLAFGDLSLVPFTYSLQARYLSVSPVELGWVKVVGILAIMFLGFHIFHSANKQKSEFRQGKLENLKSIQTKRGTKLLCDGWWAKSQHINYFGDWLISLSWCLATWFQTPLTYYYSLYFATLLLHRQQRDEHKCRLKYGENWEEYERKVPYKIIPYVY

SEQ ID NO: 5056 - protein, 364 aa, Aspergillus oryzae
MSSYNIVVFGGDHCGPEVTAEAIKVLRAVEKNRDVTFNLQDHLLGGASIDATGSPLTDEALNAAKNADAVLLGAIGGPKWGTGAVRPEQGILKLRKEMGTFGNLRPCNFAAPSLVESSPLRADVCRGVNFNIIRELTGGIYFGERKEDDGSGYAMDTEPYSRAEIERIIRLAAHLALQHDPPLPVWSLDKANVLATSRLWRKVVTEVMAKEFPQLKIEHQLIDSAAMIMVKNPRQLNGIVVTSNLFGDIISDEASVIPGSLGLLPSASLSGIPDGNSKVNGIYEPIHGSAPDIAGKGIVNPVAAILSVAMMMQYSFGLFAEARAIEQAVSNVIESGVRTGDIGGKATTAEVGDAVAAELEKLLK

SEQ ID NO: 5057 - protein, 152 aa, Glycine max
MVKAVAVLGSSEGVTGTIFFTQEGNGPTTVTGSLAGLKPGLHGFHVHALGDTTNGCLSTGAHFNPNNNEHGAPEDENRHAGDLGNVNVGDDGTVSFSITDSQIPLTGPNSIIGRAVVVHADPDDLGKGGHELSKTTGNAGGRVACGIIGLQG

SEQ ID NO: 5058 - protein, 169 aa, Triticum aestivum
PLSSLATPIPFPSSPVGGGGGCRSKLTTQQGNSIHPSHPRSAARMVDAWWPLLAAAVPAIVAGQAIRVKRRRDEEQRLKAARGREKSSDEVFVCERVCTSKRMLKKVGAFSKDPIPDTCVTVCGVSELDACADACGRTVCVNQHQVPNWNDVCLKRCQSECLKLSSTIM

SEQ ID NO: 5059 - protein, 371 aa, Malus x domestica
MGKGGMSDGDHADRCCGEAINGDVQQENMAAWLLGVKNLKIQPYKLPNLGPHDVRVRLKAVGICGSDVHHFKNMRCVDFIVKEPMVIGHECAGIIEEVGSEVEDLVPGDRVALEPGISCKRCNLCKQGRYNLCRKMKFFGSPPNNGCLANQVVHPGDLCFKLPDNVSLEEGAMCEPLSVGIHACRRANVCQETNVLVVGAGPIGLVTLLAARAFGAPRIVIADVNHERLLIAKSLGADAVVKVSTNIEDVAEEVAKIQKVLENGVDVTFDCAGFNKTITTALSATRPGGKVCLVGMGQREMTLPLATREIDVIGIFRYQNTWPLCLEFLRSGKIDVKPLITHRFGFSQKEVEEAFETSARGGNAIKVMFNL

SEQ ID NO: 5060 - protein, 329 aa, Sinorhizobium meliloti
MTKYKLEYIWLDATRPYQTLRGKTQIKEFDAFPTLEQLPLWGFDGSSTLQAEGRTSDCVLKPVTVYPDPVRTNGALVMCEVMMPDAETPHASNTRATVLDDEGAWFGFEQEYFFYKNGRPLGFPEQGYPAPQGPYYTGVGYKNVGDVARQIVEEHLDICLAAGINHEGINAEVAKGQWEFQIFGKGSKKAADEVCVARYLLVRLTEKYGIDVEFHCKPLGDTDWNGSGMHANFSTAYLREVGGQDYFEALMAAFEKNLHDHINVYGPDNHLRLTGKHETAPWDKFSYGVADRGASIRVPHSFVNNAYPGYLEDRRANSQGDPYQMLLSS

SEQ ID NO: 5061 - protein, 296 aa, Rhizobium sp. CIAM1143
  unsure (1)..(296): unsure at all Xaa locations
RGKTQIKEFDTFPTLEQLPLWGFDGSSTMQAEGRSSDCVLKPVALYPDPARTNGALVMCEVMMPDGVTPHPTNARATILDDEDAWFGFEQEYFFYQNGRPLGFPEQGYPAPQGPYYTGVGYSNVGDVAREIVEEHLDLCLAAGINHEGINAEVAKGQWEFQVFGKGSKKAADQIWMARYLLQRLTEKYGIDIEYHCKPLGDTDWNGSGMHCNFSTXYMREVGGKDYFEALMAAFDKNLMDHIAVYGPDNDKRLTGKHETAPWNKFSYGVADRGASIRVPHSFVKNDYKGYLEDRRP

SEQ ID NO: 5062 - protein, 227 aa, Zea mays
  unsure (1)..(227): unsure at all Xaa locations
PASLPSPLSPSVPAHPPCPWTVAAYKYREQDLLDKGELLLRSNPIHKKIPVLLHAGRPVCESLVIXQYIXRGLARTSXLAPPQGRPPTPRAQARFWADYIDKKIYDSQTRLWKFEGEAREQAKKDLVEVLETLEGELADKPFFGGGALGFVDVALVPFTSWFLAYEKLGGFSIQEHCPRIVAWAXACRERESVAKAMSDPXKVLEFVQFLQSKFGGQVIAEALRVLL

SEQ ID NO: 5063 - protein, 471 aa, Bacillus cereus ATCC 14579
MNQQIEQTDLKRTMKSRHLFMIALGGVIGTGLFMGSGQIVHNAGPGGAILAFLVGGFVMYLTMLCLGELSVAMPEAGSFQSYASKFISPGFGFVVGWMYWLNWAVTVGVELTTVSILMKRWFPDVSSWIWCVTFAAALFLVNALSAKAYAEAEFWFASVKVATIVIFIVLGGAVMFGLLDFNGKPAPMLHNFTENGGLFPNGALAVLLTMITVNYSFQGTELIGIASGESENPEKTIPKAIKNTIWRTLFFFVLAISVVVGLLPWQEANLVESPFVLVFDVAGVPYAADIMNFVIITAVLSVANSGLYANSRMLWAMAKQGMASPAFTKLTKKGVPLNALIFSLIFASLSLLTSVFAADTVFLVLTSIAAMAAVVVWMSIAASQFFFRRNFVKNGGNINDLKYRTPLYPLVPIVAFSLNFITFVSLAFIPDQRIALYCGIPFMIICYILYQVKYKKIVTLEQPRTVIREIN

SEQ ID NO: 5064 - protein, 353 aa, Escherichia coli
MPKAQESIMGQQKQRNRRWVLASRPHGAPVPENFRLEEDDVATPGEGQVLLRTVYLSLDPYMRGRMSDEPSYSPPVDIGGVMVGGTVSRVVESNHPDYQSGDWVLGYSGWQDYDISSGDDLVKLGDHPQNPSWSLGVLGMPGFTAYMGLLDIGQPKEGETLVVAAATGPVGATVGQIGKLKGCRVVGVAGGAEKCRHATEVLGFDVCLDHHADDFAEQLAKACPKGIDIYYENVGGKVFDAVLPLLNTSARIPVCGLVSSYNATELPPGPDRLPLLMATVLKKRIRLQGFIIAQDYGHRIHEFQREMGQWVKEDKIHYREEITDGLENAPQTFIGLLKGKNFGKVVIRVAGDD

SEQ ID NO: 5065 - protein, 392 aa, Diplopterys cabrerana
DLEPVNPADVPVTAAGALKSYKLAAKAISRLQSLPSGNISLLCDVLVKEVRDLTGYDRVMVYKFHEDEHGEVVSECRRSDLEPYLGLHYPATDIPQASRFLFMKNKVRMICDCLAPPVKVIQDDRLPQPLSLCGSTLRSPHGCHAQYMTNMGTIASLVMSVTINEDDDTMDGDQQQMTRKLWGLVVCHHTSPRFVPFPLRYACEFLIQVFGVQINKEVDLAVQMREKHILQIQTMLCDMLLRDAPVAIITQSPNVMDLVKCDGAALYFRNKTWLLGVTPTEEQIRDIAEWLLKYHSGNTGLSTDSLMEAGYPGASALGDAVCGMAAVSITSGDFLFWFRSHTAKEIKWGGAKHDPDDKDDLRKMHPRSPFKAFLEVVKWRSMPWEDVEMDAI

SEQ ID NO: 5066 - protein, 222 aa, Tradescantia virginiana
  unsure (1)..(222): unsure at all Xaa locations
GLVKKAHEISXLCDAEVALIIFSTKGKLYEYATDSKMENILERYERYSYAEKALTSSDPELQGNWCQEYVKLKAKVEALHKSQRHLMGEQLEALDLKELQQLEHQLEGSLRLVRSRKTQMMLDSISELQRKEKSLEEQNKNLEKEILEKQKEKALAHQAHWEQQNQPLQSTNSPPRPFVIAETHPTLNIGNFQGRTNTVHAEESLQRQMRISSSLLPXWMXH

SEQ ID NO: 5067 - protein, 159 aa, Zea mays
  unsure (1)..(159): unsure at all Xaa locations
MAKGGLSKLKCMIKRWHSSSRISRTPSGCSSARFHDLGDAGAGFALENSWRKGVAASSVFAFGGGGTGSASFHGTDGLPPGLHPVYAGKSRRRYLIAADLVGHPLFQNLVDRSGGAGVGAGGTVVGCEVVLFEHLLWMLENAXNPQPESLAELVEYYAC

SEQ ID NO: 5068 - protein, 457 aa, Sinorhizobium meliloti
MAQTWTPNSWRQKPIQQVPDYPDLAVLDSVEARLAKYPPLVFAGEARRLKSALANVAEGRGFLLQGGDCAESFAEHGADTIRDFFRAFLQMAVVLTFGAQQPVVKVGRIAGQFAKPRSSGVEKQGDVTLPSYRGDIINGIEFTEEARVPNPERQVMAYRQSAATLNLLRAFAMGGYANLENVHQWMLGFVKDSPQAERYRKLADRISETMDFMKAIGITAENHPSLRETDFFTSHEALLLGYEQALTRVDSTSGDWYATSGHMIWIGDRTRQPDHAHIEYCRGIKNPLGLKCGPSLTADGLLELIDILNPANEAGRLTLICRFGHDKVAEHLPRLIRAVEREGKKVVWSCDPMHGNTITLNNYKTRPFERILSEVESFFQIHRAEGSHPGGIHIEMTGNDVTECTGGARALSGDDLADRYHTHCDPRLNADQALELAFLLAERMKGGRDEKKMVVNG

SEQ ID NO: 5069 - protein, 155 aa, Zea mays
  unsure (1)..(155): unsure at all Xaa locations
PGTQPPTPRTGAEGQAXXPQXXAEXXRXXQRXSSXGDTXXXXGTKEGXKXXTXGEXGXANXGGGGDQXXDKPEEXTXXREQEPXXXTXAXRDRNPXTKAXXRAEQGXXSXAXEXPGXGEDKNXXEGDXRXXXAPKXDXDEEXKPRTTRPAGKRRR

SEQ ID NO: 5070 - protein, 247 aa, Petunia integrifolia subsp. inflata
MVFPNQEFESSSSQRKSGRGKIEIKRIENTTNRQVTFCKRRNGLLKKAYELSVLCDAEVALIVFSSRGRLYEYANNSVRATIDRYKKHHADSTSTGSVSEANTQYYQQEAAKLRRQIRDIQTYNRQIVGEALSSLSPRDLKNLEGKLEKAIGRVRSKKNELLFSEIELMQKREIEMQNANMYLRAKIAEVERATQQMNLMPGGGSEYQQQPMSSTSQPYDARNFLPVNLLEPNPHYSRQDQTALQLV

SEQ ID NO: 5071 - protein, 137 aa, Triticum aestivum
  unsure (1)..(137): unsure at all Xaa locations
LLASGDYEDVHVRLMRAYPEVSEYWYFGVLVVAAATGMAGIDTYPTYTTIGVVPYGIILALLFVVPTGIIRAMTGVEVTLNVLAEFIGGMWVXEGNALAMNFFKSFGYVTCAHALSFSNDLKLAHYLKIAPRQTFAA

SEQ ID NO: 5072 - protein, 323 aa, Zea mays
  unsure (1)..(323): unsure at all Xaa locations
MSSSSLSSGVEGFDDPGTVIRARHCLSTMMSSKREHIKRILAPKASCIPFKDSACRCFGYMVSKKKYIYTIDDDCFVAKDPSGKDINALEQHIKNLLSPSTPFFFNTLYDPYREGADFVRGYPFSLREGAHTAVSHGLWLNIPDYDAPTQLVKPKERNERYVDAVMTIPKGTLFPMCGMNLAFDRDLIGPAMYFGLMGDGQPIGRYDDMWAXWCVKVICDHLSLGVKTGLPYIWHSKASNPFVNLKKEYKGIFWQEDIIPFFQNVTIPKDCDTVQKCYIYLSGQVKEKLGKIDPYFAKLGDAMVTWIEACEELNPAGPAVGKN

SEQ ID NO: 5073 - protein, 237 aa, Corynebacterium efficiens YS-314
MPVSEVAVPTLFDAPGARFPRPSREVASGVVHLPDWLPLGEQAAVVEEARGIARSVAGTPLAMTRPQLRSGQMSVHILSLGQHWATNPYRYVTSVGGVAVPPIPASFHDLAARALADAAALSPPLAAWSGKYRAEAALVNYYAPGSAMGMHQDANELSEAPVISLSIGDTGIFRLGNTDNRNRPWVDVPLLSGDLIIFGGEHRRAFHGVPRIEADTAPEGCGLDRGRINITIRQVAL

SEQ ID NO: 5074 - protein, 233 aa, Vigna unguiculata
MQSIPLQKQVDYYSQVHETLRQQIEASSLEKHLSKSIFIVVIGGNDVFGYFDSKDLQNKNTPQQYADSMASTLKLQLQRLYNNGAKKFEIAGVGPIGCCPAYRLKNKTECASAANDLSAKYNEALQYMLKEWKLEKKDINYSYFDTYAALQDLIHNPTSYGFVNVKGACCGLGELNAQIPCLPVSSICSNRQDHVFWDAFHPTEAASRIFVDEIFKGPSKFISPINMEQLLAI

SEQ ID NO: 5075 - protein, 691 aa, Oryza sativa (japonica cultivar-group)
MAPVEDGGGVEFPVGMKVLVVDDDPTCLAVLKRMLLECRYDATTCSQATRALTMLRENRRGFDVIISDVHMPDMDGFRLLELVGLEMDLPVIMMSADSRTDIVMKGIKHGACDYLIKPVRMEELKNIWQHVIRKKFNENKEHEHSGSLDDTDRTRPTNNDNEYASSANDGAEGSWKSQKKKRDKDDDDGELESGDPSSTSKKPRVVWSVELHQQFVNAVNHLGIDKAVPKKILELMNVPGLTRENVASHLQKFRLYLKRIAQHHAGIANPFCPPASSGKVGSLGGLDFQALAASGQIPPQALAALQDELLGRPTNSLVLPGRDQSSLRLAAVKGNKPHGEREIAFGQPIYKCQNNAYGAFPQSSPAVGGMPSFSAWPNNKLGMADSTGTLGGMSNSQNSNIVLHELQQQPDAMLSGTLHSLDVKPSGIVMPSQSLNTFSASEGLSPNQNTLMIPAQSSGFLAAMPPSMKHEPVLATSQPSSSLLGGIDLVNQASTSQPLISAHGGGNLSGLVNRNPNVVPSQGISTFHTPNNPYLVSPNSMGMGSKQPPGVLKTENSDALNHSYGYLGGSNPPMDSGLLSSQSKNTQFGLLGQDDITGSWSPLPNVDSYGNTVGLSHPGSSSSSFQSSNVALGKLPDQGRGKNHGFVGKGTCIPSRFAVDEIESPTNNLSHSIGSSGDIMSPDIFGFSGQM

SEQ ID NO: 5076 - protein, 142 aa, Oryza sativa
MAGIGPIRQDWEPVVVRKKAPTAAAKKDEKAVNAARRSGAEIETMKKYNAGTNKAASSGTSLNTKRLDDDTESLAHERVSSDLKKNLMQARLDKKMTQAQLAQMINEKPQVIQEYESGKAIPNQQIIGKLERALGTKLRGKK

SEQ ID NO: 5077 - protein, 346 aa, Prunus armeniaca
KKAIPPHCFQRSVIRSFSYVFYDLTIAFLLYYIASNYIQPLSQPLSSLAWPVYWFVQGCVLTGVWVIAHECGHHAFSDYQWLDDTVGLILHSALLVPYFSWKYSHRRHHSNTGSIERDEVFVPKQKSAIGWYSKYLNNPPGRFLTLTIQLTLGWPLYLAFNVSGRHYEGFACHYHPYGPIFSDRERLQIFLSDAGVLAVVYGLYRLAVAKGLAWVVCYYGGPLMVVNGFLVLITYLQHTHPSLPHYDSSEWDWLKGALATVDRDYGILNKVFHNITDTHVAHHLFSTMPHYHAMEATKAIKPILGDYYQLDRTPVFKAMFREAKECIYIQRDEGDQKGVFWYNNKL

SEQ ID NO: 5078 - protein, 371 aa, Glycine max
MDAIRKQASKLREQVARQQQAVLKQFGGGGYGGSDNVVTDGVELQLHQRLEKLYISTRAGKHYQRDIVRGVEGYIVTGSKQVEIGTKLSEDSRKYGAENTCTSGNTLSRAALSFAQAHAQIEKERGNLLKALGTQVAEPLRAMVVGAPLEDARHLAQRYDRMRQEAEAQAIEVSKRQAKVREMPPNGENAMKLEAAEAKLQDLKTNMTILGKEAAAALAAVEAQQQRLTLQRLIAMVEAERSYHQIVLQILDQLEGEVTSERQQIETPTTPSLDNTMPPPPSYEEVNGVYASPTHNGSTDSMGYFLGEVLFPYSAVSEVELNLSVGDYVVVRKVTNSGWAEGECKGRAGWFPFSYIERRERVLASKVTEVF

SEQ ID NO: 5079 - protein, 211 aa, Zea mays
MEEDEARRKSEEGDCEKALIVYGNVQTVAEIPGRRGGGSSSGTKKKELTFEQLSRHFSVPIKQAARELNVGVTVLKRQCRKLGITRWPYRKLKSLEKLIDNVQGIGKQNAQENGHLTRSLVEFLDQTMKPIEERPDAMLDQRMEGLRLVCFKENVQEDENLTRSVVEFLQLTKKMIEERPDAILDQRTKDPRQACFKESFRRKRLIGHGAW

SEQ ID NO: 5080 - protein, 499 aa, Glycine max
MAAMQRPLKRTIAIAKLRACFSSLRPAAAADIVASPPPQLPPFDHQPHPYNGPFADEVLAKRKTFLGPSVFHYYKKPCRCVSDQAKIYGFSKLNIVEGKMQYLYDDSGRRYLDAFAGIVTVSCGHCHPEILNAITEQSKLLQHATTIYLHHTIGDFAESLAAKMPGNLKVVYFVNSGSEANELAMMMARLYTGSLGMISLRNAYHGGSSSTLGLTALNTWKYPIPEGHVHHVMNPDPYRGAFGADAASYANDVQDHIDYGTSGKVAGFIAETMQGVGGAVELAPGYLKLVYDIIHKAGGVCIADEVQTGFGRTGSHYWGFETQGVIPDIVTMAKGIGNGLPLGAVVTTPEIASVLAQKIQFNTFGGNPVCSAGGLAVLRVLDKEKRQAHCADVGSHLLERLRFLMERHDRNVRGRGLMVGIELVTDRDNKTPAKAETAVVFEKLRELGVLVGKGGLHGNVFRIKPPMCFSKDDAGMVVSRSLNLDADSRFYFGAFFQAK

SEQ ID NO: 5081 - protein, 265 aa, Oryza sativa
MSQEQPRRPSEKAAGGGGGEQGIRYGDVFPVTGSLAAKPIAPRDAATMQSAENLVLGKTVKGGPAAAMESAASRNEEMGVVGHDQATDAAAEQGVNVSDTLVPGGGRIVTEFVAGQAVGHYVEQDDGAAVVAGVVGAAPGAVRVEEPAKITIGEALEAAALAAGGTPVERSDAAAIQAAEAKATGTDTYMPGGLAAQAQSAAVANLWTARDADKTKLGDVLSNATAKLAADKEVESGDAARVAGAEMRNKPGAAARPGGVAASMA

SEQ ID NO: 5082 - protein, 280 aa, Bambusa glaucescens
  unsure (1)..(280): unsure at all Xaa locations
IVESVGEGVTDLAPGDHVLPVFTGECKECPHCKSAESNMCDLLRINTDRGVMIGDGKSRFSINGKPIYHFVGTSTFSEYTVMHVGCVAKINPEAPLXKVCVLSCRISTGLGASINVAKPPKGSTVAIFGLGAVGLASAEGARIAGASRIIGIDLNPSRFEEAKKFGCTEFVNPKDHSKPVQEVLAEMTNGGVDRSVECTGNINAMIQAFECVHDGWGVAVLVGVPHKDAEFKTHPMNFLNERTLKGTFFGNYKPRTDLPNVVELYMKKELEVEKFITHSV

SEQ ID NO: 5083 - protein, 422 aa, Streptomyces coelicolor A3(2)
MTSQPTLTKPEEGPAGPSGPDTGLQAGLKNRHLSMIAIGGVIGAGLFVGSSSGIATAGPGILLSYALVGTLVVLVMRMLGEMSAANPTSGSFSAHADRALGPWAGFSIGWLYWFFWVVVLAVEATAGAKILEGWIPAVPQWGWALIVMVVLTATNLASVGSYGEFEFWFAGIKVVAIAAFIVVGGLAVFGVLPGVDSDRAGLGNLTEHGGFLPHGAGAVLTGVLLVVFSFMGSEIPTLAAGESEDPQRAVTKATNSIIWRIAVFYLGSIFVVVALLPWDSQSIVDQGSYVAALDSLGIPNAGEIMNFIVLTSVLSCLNSGLYTASRMAFSLGRRGDAPKAFARTTRRGVPQAAILSSVVFGFVAVFFNYKFPDTVFLFLLNSSGAVASSSGWPSASRSCGCGRSSRPRRRRSWSCGCGCTRI

SEQ ID NO: 5084 - protein, 169 aa, Nostoc sp. PCC 7120
MDLSRIPAQPKPGVINILIEIAGGSQNKYEFDKDLEAFALDRVLYSSVKYPYDYGFVPNTLADDGDPLDGMVIIDEPTFPGCVIAARPIGFLEMIDGGDRDEKILAVPDKDPRYAHVKSLNDVAPHRLDEIAEFFRSYKNLEKKVTQILGWQDVDQVKALVDQSIKAYK

SEQ ID NO: 5085 - protein, 471 aa, Oryza sativa
MGALAASIASHLPSGVSAAVAALAASPGEVVRRAAGLEDELRELLRLNGGGRGRGGAAAEQGQGEQTRDRFVRAYERLKSELLNDRAFNFDFTEETRQWVAKMMDYNVPGGKLNRGLSVVDSYMLLRQGTEVDDEDFYLACVLGWCVEWLQASALVLDDITDNAYTRRDNLCWYKLPTVGMSAINDGVLLKCHVQAIIKRYFKEKFYFLDLMELWNETAMGQMLDLITTHTGAKDLARYRIQGYRRIVKYKTSYYSFYLPVACALLLNGARLSDYVELKNDDYLDCFGDPEVIGKAMELANENEMKILYENYGKSDPKCVAEVKSVYRELDLQDIFLEYESRVYKHLVSTIDAETDRAIRDILKSFLKKIYRRKNGASGGRQKRAGRSGIGRRDGPHRGSTLPSESMMSDKLQMLKRGMCPVIASHGPTDRLAIVAFSGAAKRLLPLRRMTRQIVDRLRRPGPGTAAGRLH

SEQ ID NO: 5086 - protein, 171 aa, Bacillus halodurans
MGKKIAVVVTNLFEDSEYTEPVKAFKEAGHSIVTIEKEKGIKVKGKQGESTITIDASIDEVTEDAFDALLIPGGFSPDILRADDRFVAFAKAFADAKKTIMAICHGPQLLINAGVLKGRDVTGYKSIAVDLRNAGANFYDQEVVVCGGNLVTSRTPDDLPAFNRESLNVLT

SEQ ID NO: 5087 - protein, 455 aa, Nostoc sp. PCC 7120
MSRHTDYSSLEQIQTTGADAPKPLLTLSDAVALIVGIVIGVGIFQTPALVASQAGSDTAVLLFWLAGGIVSIIGALCYAELATTYPNVGGAYYYLKRAFGQNTAFLFAWARLTVIQTGSIALAAFVFGDYASEIWRLGTFSSSMYAAVIIALLTILNILGLHQGKWTQNLLTAAQVLGLLLVVLFGLASTANSANSAVSPEPSSSGSWGLAMVFVLLSYGGWNEAAYISAEIKNRQRNILRSLMWSIGIITAIYLLINLAFLRGLGLANMANSSAVAADLMRAVWGTPGVVFISLLIAICALGTINASIFTGARTNYALGQDFNLFGFMGSWRQIPSTPATALLVQGAIALALVVLGTFTRKGFETMVDYTAPVFWFFFLLSGISLLILRQKEPHIPRPFRVPFYPITPLLFCAVCGYLLYSSVVYTNVGAVVGVLVVIAGVPLLFWNRYRQGKA

SEQ ID NO: 5088 - protein, 72 aa, Bituminaria bituminosa
WEYQVGPSVGIEAGDHIWASRYILERITEQAGVVLTLDPKPIEGDWNGAGCHTNYSTKSMREDGGFEVIKKA

SEQ ID NO: 5089 - protein, 244 aa, Triticum aestivum
  unsure (1)..(244): unsure at all Xaa locations
EGDGGPPRIRITAIDLPQPGFRPAERLEATGRRLSEYAKMFHVPFEYRAIAAKWDAIRVEDLRIDKDDLLIVNCLFRMRHMMDETVTDESPRKXVLNTIRKMNPHRFIHAVVNGTYNAPFFVTRFKEALFYFSSLYDMLEATAPPVDEHRQLIEREYFGRELLNVVACEGTERVERPETYKQWQVRNLRAGFRQVPLLQESVKKARYKVIKSYHRDFFVDEDNKWMLQGWKGRVIGALSTWKPS

SEQ ID NO: 5090 - protein, 300 aa, Triticum aestivum
  unsure (1)..(300): unsure at all Xaa locations
MALKVASFSLLELSSGTTRSRRGAAFRPRQHQRKVDLTFQRRDKRAAYLRTCCSMQQGPPPAWPGRAVAEPERRSWEGPKPISIVGSTGSIGTQTLDIVAENPDKFRVVALAAGSNVTLLADQVKTFKPKLVALRNESLINELKEALAGCEEMPEIIPGEQGVIEVARHPDAVTVVTGIVGCAGLKPTVAAIEAGKDIALANKETLIAGGPXVLPLAHKPNVKILXADSKHSAXFKCIQGLLKGXXXXXXSXGLGGALGNKLKKKVIFEDPTGTGEKIQEICLSGSFPCLLIQLWDPAST

SEQ ID NO: 5091 - protein, 71 aa, Triticum aestivum
LLPHRRPPYSTNYCILSGVWNGVLDRHKVFEALEMIVFFRTGVRPRSWDETQAAWMEDTGSAAAVALTDSS

SEQ ID NO: 5092 - protein, 159 aa, Triticum aestivum
  unsure (1)..(159): unsure at all Xaa locations
MAKYNVVQKSKRESSHDRKRRAGRDPPAAMAKYNVVQKSKRESSHDRKXRRAHGDPNSGKLKHHNAPIAISGKRKRKLLRRLNRDQKEAVMVKALENNMGDVDMVSAETSSETAKDKSQMKFNVKKNSRIQIKRLKGKGRKKAKNVKPPTKEKADAMVE

SEQ ID NO: 5093 - protein, 469 aa, Bacillus subtilis subsp. subtilis str. 168
MNQSQSGLKKELKTRHMTMISIAGVIGAGLFVGSGPVIHSTGPGAVVSYALAGLLVIFIMRMLGEMSAVNPTSGSFSQYAHDAIGPWAGFTIGWLYWFFWVIVIAIEAIAGAGIIQYWFHDIPLWLTSLILTIVLTLTNVYSVKSFGEFEYWFSLIKVVTIIAFLIVGFAFIFGFAPGSEPVGFSNLTGKGGFFPEGISSVLLGIVVVIFSFMGTEIVAIAAGETSNPIESVTKATRSVVWRIIVFYVGSIAIVVALLPWNSANILESPFVAVLEHIGVPAAAQIMNFIVLTAVLSCLNSGLYTTSRMLYSLAERNEAPRRFMKLSKKGVPVQAIVAGTFFSYIAVVMNYFSPDTVFLFLVNSSGAIALLVYLVIAVSQLKMRKKLEKTNPEALKIKMWLFPFLTYLTIIAICGILVSMAFIDSMRDELLLTGVITGIVLISYLVFRKRKVSEKAAANPVTQQQPDILP

SEQ ID NO: 5094 - protein, 367 aa, Glycine max
  unsure (1)..(367): unsure at all Xaa locations
HASVKEDIQNVVVVXCKAGMGRTGLMICSLLLFLKFFPTAEEAIDYFNHKRCVDGKALVLPSQIRYVKYFERTLTHFNGEVQPGRRCMLRGFRLHKCPYWVRPSITISDHTGILFTTRKHPKTKDLMPEDFWISVPKKGIVVFALPGEPGLAELVGDFKIQFQDRQGDFYCWMNTTMTENRKFLDGSDFDGFDKRKIPAPGFKVEVVMIDYNGTLPANTKSNPASKGSXETQAMPYLGPKSTTSNSSESKVPRNGDDDVFSDSDEEETRDTQSNKAAAEYKFMAPHQVSETTNDHVGMLTHKTDQLSLQQEECKQNVASEESDTDKLHKNHTGNNSINMGSVGASDIKAIAADASVFSFGDEDFESD

SEQ ID NO: 5095 - protein, 472 aa, Pseudomonas aeruginosa UCBPP-PA14
MDGQHPHSGELKRGLKNRHIQLIALGGAIGTGLFLGSAGVLKSAGPSMILGYAIAGFIAFMIMRQLGEMIVEEPVAGSFSHFAHKYWGGFAGFLSGWNCWVLYILVGMSELTAVGKYIHYWWPEVPTWATAALFFVVVNAINLANVKAFGEAEFWFAIIKVVAIIGMILLGCYLLFSGSGGPQASVSNLWAHGGFFPNGVSGLVMAMAIIMFSFGGLEMLGFTAAEADKPRTVIPKAINQVIYRILIFYIGALVVLLSLTPWDSLLQTLNASGDAYSGSPFVQIFSMIGSGTAAHLLNFVVLTAALSVYNSGTYCNGRMLLGLAEQGDAPRALARVDKRGVPVRALVVSALVTFLAVVVNYVIPHQALELLMSLVVAALVINWAMISMAHLKFRAQMDRQGTRTHFRAFWYPYGNYLCMAFVVFILGVMLLIPGIQVSVYAIPVWLLVMWACYRLKGAPRPMPGLRVKPVTE

SEQ ID NO: 5096 - protein, 520 aa, Glycine max
MATRVHQFFDELEAKKTILAKCTDLFTTLSTHFSSLQHSISEKSQSLDSNLQSLDSLSKETLESLHRRETSIPERESAAAARIEEQREAALADLRATHPPDPDLSATLKSLWRKMDAPALLRFVVSKRKESASLRAEIAAAMAEAVDPARLVVEAVEEFLKSKVAKSGVTDKRWACGLVIQALMVSESESREYSRRIAERAVSVVEMWKEHLDGESESGAAEVVMFLQMVVCFGLRSRFDDEYLRKLVMQFASRRDMAKLAASLQFGDKIIDIIDELIKNGKEIEAVYFASESGLTERFPPIDLLKSYHRNYKKNVSTALKKGNNNRATTDDSSTSELNSIKAIIKCVEDHKLESEFNLDNLRKWATLLEKAKAEKKKSSTSGSKPQNKRGSGSSSSRPAKSAKFSSAHSSSFSRRNLAPSLQPSPGARFSVPFNYPSQTIYDGATANLYTATYGTSHTQSPAGITQQHYSIPVDNLGPSGYRSSGSYSAQTSYGLYDYRNGAPPTYPPPYTVDQTTYRG

SEQ ID NO: 5097 - protein, 248 aa, Thauera aromatica
MGIQNRVALITGSASGMGKQTALRFAEQGAAVVINDIDAEKVRATVDEFSARGHRVLGAVADIGNKAAVDGMVKQTIDAFGRIDILVNNAGMERAGALRKLSEADWDVTINVNLKGTFLCTQAVHGHMVENKHGRIVNIASRAWLGGAGQTPYSSAKAGVVGMTRALAIELGRAGITVNCVAPGLIHTPMWDELPEKDQQFLLSRQPTGKLGEPDDIANTLLFLADDDSGFVTGQVLYVCGGRSLFAG

SEQ ID NO: 5098 - protein, 584 aa, Citrus sinensis
MTHIKEFFTKLSESSSNQNISNIPKKKKKLFLALFATLLVVAAVIGIVAGVNSRKNSGDNGNEPHHAILKSSCSSTRYPDLCFSAIAAVPEASKKVTSQKDVIEMSLNITTTAVEHNYFGIQKLLKRTNLTKREKVALHDCLETIDETLDELHKAVEDLEEYPNKKSLSQHADDLKTLMSAAMTNQGTCLDGFSHDDANKHVRDALSDGQVHVEKMCSNALAMIKNMTDTDMMIMRTSNNRKLTEETSTVDGWPAWLSPGDRRLLQSSSVTPNAVVAADGSGNFKTVAAAVAAAPQGGTKRYIIRIKAGVYRENVEVTKKHKNIMFIGDGRTRTIITGSRNVVDGSTTFKSATVAVVGEGFLARDITFQNTAGPSKHQAVALRVGADLSAFYNCDMLAYQDTLYVHSNRQFFVNCLIAGTVDFIFGNAAAVLQNCDIHARKPNSGQKNMVTAQGRTDPNQNTGIVIQKSRIGATSDLKPVQGSFPTYLGRPWKEYSRTVIMQSSITDLIHPAGWHEWDGNFALNTLFYGEHQNSGAGAGTSGRVKWKGFRVITSATEAQAFTPGSFIAGSSWLGSTGFPFSLGL

SEQ ID NO: 5099 - protein, 276 aa, Zea mays
MMAEAWTPVPFPPTAPCFWLHDTHSVFWRGGDAWTAAENKLFEKALAQIDRNAPDRWEKVAEVVRTKTVDDVRNHYHDLENDVGFIEAGLVPFPHYSGSVPSFGFTHHEDWDGGFRRGYCLKRARGSDPERKKGVPWTEEEHKLFLMGLKKYGRGDWRNISRKYVTTRTPTQVASHAQKYFIRLNSGGKDKRRSSIHDITTVNLPDEDRGNAPPSAVTTTTNPSVALPDMKPFIAPLQDALGVSHPYGNVKLEPKSSLVAGLGFNDSVLLMHCGQL

SEQ ID NO: 5100 - protein, 193 aa, Phoenix reclinata
TVVHSGCVAKINPLAPLDKVCVLSCGISTGLGATLNVAKPPMGSTVAVFGLGAVGLAAAEGARIAGASRIIGVDRNPTRFDEAKSFGITEFVNPKDYDKPVQEVLAEMTGGGVDRSIECTGNINAMISAFECVHDGWGVAVLVGVPHKEAEFKTHPINFLNERTLKGTFFGNYKPRTDLPLVVEKYMNKELEL

SEQ ID NO: 5101 - protein, 668 aa, Petunia x hybrida
MQLQTMLRNAVQSVQWTYSLFWQLCPQQGVLVWRDGYYNGAIKTRKTVQPMEVSAEEASLHRSQQLRELYESLSAGESNQPTRRPSAALSPEDLTESEWFYLMCVSFSFPAGIGLPGKAYSKKHHIWITGANEVESKVFCRAILAKSARVQTVVCIPLLDGVVELGTTQRIQEDIGFINHVKTFFIEQQPPLPPKPALSEHSTSNPTTFSELNFYSSNTPPSAGTTPADEHGGVAGDEDEEDEDEEDEDEEQEDDEEAELDSDKIAAQVGPADVIAAAEASELMQLDMSEAIRFGSPDDGSNTNMDSDFHMVGVSQAENPADYQRQAESFKADTSISWAHFQDLPHLPGGPSYDELSQEDTHYSQTVSTILEHLSNQSSKFSSTIMGCISQTTQSAFTRWPSPSTTVSSPFLDGGATSGQWLLKSILFSVPFLHTKYQTAAEVSPKSRDATTVDSSTASRFRKGCSITQEEPSGNHVLAERRRREKLNERFIILRSLVPFVTKMDKASILGDTIEYVKQLRKKVQDLEARANQTEATLQTKDTGTVKVLQGRGKRRMKIVEGSVGGGQAKITASSPSTTHEEEIVQVEVSIIESDALVELRCPYKEGLLLDVMQMLRELKVEVVTIQSSLNNGSFFAELRAKVKENIYGRKASILEVKKSIHQLIPRV

SEQ ID NO: 5102 - protein, 493 aa, Enterococcus faecalis V583
MSDKEQLEKLDKSFLGQPKGLATLFFTEMWERFSYYGMRAILMYYIYDTVANGGLGLPKATALAIMSIYGSMVFMSSIIGGWVSDRVLGSRKTVFIGGLLIIAGHIVLATPFGVPALFVSIMLIVFGTGMLKPNVSGMVGHLYSKTDLRRDAGFSIFYMGINIGALIAPLVVGTLGQEYNYHLGFSVAAVGMFFGLLQYYFQGRKSLAGIGQAPTNPMSKEEQKKFAKAFMLAIVVALLIFGGAYVTGHLTIDFFINTISVLGILLPVYYFSKMLTSKDVTAEEKPKVLAYLPLFLAAIVFWSLEEQGSSILALFANERTQTSLFGFPIAASWFQSLNPVFVVILTPIFVTLWTKLGKRQPSTVVKFSLGLVFAGLSFVLLMLPGLLYGTEGRVSPLWLFFSFFIMIVGEMCLSPVGLSITTKLAPKAFEAQTVAIWLLADAASQAINAQIARFYTPGTESAYFGIVGLVAVVAGILLFIVKKPIQNLMGDVR

SEQ ID NO: 5103 - protein, 207 aa, Triticum aestivum
  unsure (1)..(207): unsure at all Xaa locations
PLPFSPNARCTTPHRSKPTPIPTGGERRRATQPSKMQYNNLGRSGLRVSQLSYGAWVTFGNQLDVKEAKSLLQACRDAGVNFFDNAEVYANGRAEEIMGQAIRDLGWRRADVVISTKLFWGGQGPNDKGLSRKHIVEGLKASLKRLDMEYVDVVYCHRPDATTPXIEETVRXAMNWVIDQGWAFYWGTSEWTAQQITVAWGVANRLD

SEQ ID NO: 5104 - protein, 315 aa, Podospora anserina
MAQPNVVPEEDYDYEALPPNFSLLQNMAAGAFAGIAEHCAMYPIDAVKTRMQIVNPSAGSVYSGVFQSTYKMASTEGILSLWRGMSSVIVGAGPAHAVYFATYEAVKHVMGGNQAGVHHPLAAATSGACATIASDALMNPFDVIKQRMQIAESAKLYRSMTDCAKYVYKNEGIKAFYVSYPTTLSMTVPFTALQFLAYESISTSMNPTKAYDPFTHCVAGAVAGGFAAALTTPMDVIKTMLQTRGSAHDAELRTVNGFMAGCRLLFKREGAKGFFKGVQPRVLTTMPSTAICWSAYEASKAYFIRQNDSASESST

SEQ ID NO: 5105 - protein, 343 aa, Vibrio vulnificus CMCP6
MKIKALSKLKPEEGIWMTEVDKPVLGHNDLLIKIKKTAICGTDVHIYNWDEWSQKTIPVPMVVGHEYVGEVVGIGQEVRGFEIGDRVSGEGHITCGHCRNCRGGRTHLCRNTIGVGVNRTGCFSEYLVIPAFNAFKIPANISDDLASIFDPFGNAVHTALSFDLVGEDVLITGAGPIGIMAAAVAKHVGARHVVITDVNEYRLDLARKMGVTRAVNVAEQKLDDVMAELGMTEGFDVGLEMSGNPSAFNSMLKTMNHGGRIALLGIPPSDMGIDWNQVIFKGLVIKGIYGREMFETWYKMASLIQSGLDLTPIITHHFKVDDFQQGFDIMRSGMSGKVILDWE

SEQ ID NO: 5106 - protein, 140 aa, Zea mays; identical to SEQ ID NO: 1883

SEQ ID NO: 5107 - protein, 364 aa, Chlamydophila pneumoniae
MSHTECGIVGLPNVGKSGLFNALTGAQVASCNYPFCTIDPNVGIVPVIDERLEALAKISNSQKIIYADMKFVDIAGLVKGASDGAGLGNRFLSHIRETHAIAHVVRCFDDPDVTHVSGKVNPVEDIEVINLELIFSDFSSAKNIHSKLEKLAKGKREVGALLPLFDTIIAHLEKGLPLRTLELTPEQIVALKPYPFLTMKPMFYIANVDESSLPDMDNDYVAAVREVAAKENSKVVPICVRIEEEIVSLPIEERLEFLMSLGLEKSGLHRLVRAAYDTLGLISYFTTGPQESRAWTVVRGSSAWEAAGEIHTDIQKGFIRAEVITFEDMIECQGRAAARELGKLHIEGRDYIVQDGDTMLVLHN

SEQ ID NO: 5108 - protein, 618 aa, Saccharomyces bayanus
MNDSDSLFVDEANPAPCTHGLHERGHAEKEKKDFTVTENQDEGLQQQAKRQGTSGKFKLQNECKKFFDSFKRQLPADQNSELESQERNNLTRSIKSRHLIMISLGTGIGTGLLVGNGQVLGTAGPAGLVLGYGIASIMLYCIIQAAGELGLCYAGLTGNYTRYSSILVDPSLGFAVSVVYTIQWLTVLPLQLVTAAMTIKYWTNVNADIFVAAVFIFVIIINLFGSKGYAEAEFMFNICKILMVIGFVILAIVINCGGAGDRKFIGTKYWHNPGPFAHGFKGVCTVFCYAAFSYGGIEVLLLSAAEQENPTKSIPNACKKVVYRILFIYMLTTILICFLVPYNSDELLGSGSSSGSHASPFVIAVASHGVKVVPHFINAVILISVISVANSSLYSAPRLLLSLAEQGFLPKCLAYVDRNGRPLLCFLVSIIFGCIGFVATSDAEEQVFTWLLAISSLSQLFIWMSMSLSHIRFRDAMAKQGRSMDEVGYKAQTGYWGSWLAVLIALFFLVCQFWVAIAPVSKHGKLDANVFFQNYLAMPIVLFAYFGHKIYTKSWKFWIPAEKIDLDSHRTIYVPPILMGTNKIDDDDLKEYETSESSENPNGSGSRKFFKRMANFWC

SEQ ID NO: 5109 - protein, 352 aa, Zea mays
  unsure (1)..(352): unsure at all Xaa locations
MACGSSARRLIGSVGSKCPFQPDQRRSSFGFPDPTPPVSLGECNPASVELKAAQVEMSTLKKSDKKAALDFAAWSFNVTTSVGLIMVNKALMATYGFSFATTLTGLHFVTTTLMTXYFXWLGLSQPSHLPLADLVKFVIFSNLSIXVGMNVSLMWNSVGFYQIAKLCMIPXSXLLGRLVFDHVHYSRDTKLSIMVXLKGSAVCRVTDVSVNARVXLCLVIAVWSTALPTYYXHFSPTQYSLNSFNLLGHTAPAQAGSLLLVGPFADYLLTGKRVDHFSFSSLALFFLALSCFIAIGVNLSQTRRQRAAQRPTAEVCKSQGKFGRKGRCREIVLLSLIANLNGEFSVPRLNFW

SEQ ID NO: 5110 - protein, 700 aa, Saccharomyces cerevisiae
MVAQYTVPVGKAANEHETAPRRNYQCREKPLVRPPNTKCSTVYEFVLECFQKNKNSNAMGWRDVKEIHEESKSVMKKVDGKETSVEKKWMYYELSHYHYNSFDQLTDIMHEIGRGLVKIGLKPNDDDKLHLYAATSHKWMKMFLGAQSQGIPVVTAYDTLGEKGLIHSLVQTGSKAIFTDNSLLPSLIKPVQAAQDVKYIIHFDSISSEDRRQSGKIYQSAHDAINRIKEVRPDIKTFSFDDILKLGKESCNEIDVHPPGKDDLCCIMYTSGSTGEPKGVVLKHSNVVAGVGGASLNVLKFVGNTDRVICFLPLAHIFELVFELLSFYWGACIGYATVKTLTSSSVRNCQGDLQEFKPTIMVGVAAVWETVRKGILNQIDNLPFLTKKIFWTAYNTKLNMQRLHIPGGGALGNLVFKKIRTATGGQLRYLLNGGSPISRDAQEFITNLICPMLIGYGLTETCASTTILDPANFELGVAGDLTGCVTVKLVDVEELGYFAKNNQGEVWITGANVTPEYYKNEEETSQALTSDGWFKTGDIGEWEANGHLKIIDRKKNLVKTMNGEYIALEKLESVYRSNEYVANICVYADQSKTKPVGIIVPNHAPLTKLAKKLGIMEQKDSSINIENYLEDAKLIKAVYSDLLKTGKDQGLVGIELLAGIVFFDGEWTPQNGFVTSAQKLKRKDILNAVKDKVDAVYSSS

SEQ ID NO: 5111 - protein, 353 aa, Oryza sativa (indica cultivar-group)
ESLVRAGELSWEVGMERYEVIKDIGSGNFGVAKLVRDVRTKELFAVKFIERGQKIDENVQREIMNHRSLRHPNIVRFKEVVLTPTHLAIVMEYAAGGELFERICSAGRFSEDEARFFFQQLISGVSYCHSMQICHRDLKLENTLLDGSIAPRLKICDFGYSKSSLLHSQPKSTVGTPAYIAPEVLARKEYDGKVADVWSCGVTLYVMLVGAYPFEDPDEPRNFRKTITRILSVQYMVPDYVRVSMECRHLLSRIFVANPEQRITIPEIKNHPWFLKNLPIEMTDEYQMSVQMNDINTPSQGLEEIMAIIQEARKPGDGSKFSGQIPGLGSMELDDVDTDDIDVEDSGDFVCAL

SEQ ID NO: 5112 - protein, 435 aa, Aeropyrum pernix
MQVMASPPCTTEELSPPPGGSLVEYSGGSLRVPDNPVVAFIRGDGVGPEVVESALKVVDAAVKKVYGGSRRIVWWELLAGHLAREKCGELLPKATLEGIRLARVALKGPLETPVGTGYRSLNVAIRQALDLYANIRPVRYYGQPAPHKYADRVDMVIFRENTEDVYAGIEWPHDSPEAARIRRFLAEEFGISIREDAGIGVKPISRFATRRLMERALEWALRNGNTVVTIMHKGNIMKYTEGAFMRWAYEVALEKFREHVVTEQEVQEKYGGVRPEGKILVNDRIADNMLQQIITRPWDYQVIVAPNLNGDYISDAASALVGGIGMAAGMNMGDGIAVAEPVHGTAPKYAGKDLINPSAEILSASLLIGEFMGWREVKSIVEYAIRKAVQSKKVTQDLARHMPGVQPLRTSEYTETLIAYIDEADLNEVLAGKRG

SEQ ID NO: 5113 - protein, 517 aa, Listeria innocua
MKKTIKITTSLLLSFACVFSVGDFTKPHTVEAETVYSLTNPKPINEIFSDPKLAQVVADWLKLPSATSAVTQSQLNTVKSLHFDSKGVQSLEGVEYLKNLTQVFGYGNQVSDLGPLSNLTQLEIIQMPRNQISDLTPISNLTALMSLDFEFNNLQTIEPIKNLTNMLELNVSANPISDISAVKNMTQLEFLTIRDCEVSDLSPVENLSNMLMFWAGRNNISDITPLKNMPKLLGLSLFGNQIKDVSVVKNLTSLEDFDLKANQVSDISSLATSTTLETLTLSFNQIIDISPLKNLTNLTRLELENQTRVLDAVEVDNPLILPAPVIDENGSRVQPTKVSHAGIYANGEITWEGLQSNYILNYEYNLPVAIGSLTTTYSGKITQPLLEKPVDPITPVDPVDPVDPVDPVDPVDPVDPVDPVDPVDPVDPVDPVDPIDPVNPVDPITPVDPSNQVNSTDPVKSVLQATETLIKQTISVNPIVAKDNRNLPKTGDSGMTSSLVGGLILAVSSLVLLRKRK

SEQ ID NO: 5114 - protein, 170 aa, Zea mays
MVKAVAVLGSSDGVKGTIFFTQEGDGPTAVTGSVSGLKPGLHGFHVHALGDTTNGCMSTGHDYNPASKEHGAPEDENRHAGDLGNVTAGADGVANINVTDSQIPLTGPNSIIGRAVVVHADPDDLGKGGHELSKSTGNAGGRVACGTTNHFPSPFPLTQISLLFTHFADC

SEQ ID NO: 5115 - protein, 316 aa, Zea mays
MSAPSAPPRTVICVGDVHGYITKLESLWSNLQAALPADAFATALVIFLGDYNDRGPHTRRVLDFLLALPTRYPAQRHVFLCGNHDLAFAAFVGALPPPPDGSPFSATWDEYIHNEEHEGWFRGPGFEGMHVQGRRWGGVIKERWNPKKGLPYKGSIYDAQPTFESYGVAHGSPDLAKAVPEEHKRFLHDLVWIHEEENVPIDMDGGQIICNLIAVHAGLERTIDLNEQLRVLRTRDTRVPKVQMLSGRQDVWDTPKGLAGKQTIIVSGHHGKLHIDGLRFIIDEGGGYEDKPIAAIVFPSKTLIRSTEEAGTTSER

SEQ ID NO: 5116 - protein, 98 aa, Buchnera aphidicola
LPSASLNDSNFGLYEPAGGSAPDIAGKNIANPIAQILSIAMLVRYTMKLPIISDQIESAVIDTLKKGYRTLDIANDKEKCESTNDIGDIISYILKKRI

SEQ ID NO: 5117 - protein, 249 aa, Pyrococcus furiosus
MPFEIVFEGAKEFAQLIDTASKLIDEAAFKVTEDGISMRAMDPSRVVLIDLNLPSSIFSKYEVVEPETIGVNLDHLKKILKRGKAKDTLILKKGEENFLEITIQGTATRTFRVPLIDVEEMEVDLPELPFTAKVVVLGEVLKDAVKDASLVSDSIKFIARENEFIMKAEGETQEVEIKLTLEDEGLLDIEVQEETKSAYGVSYLSDMVKGLGKADEVTIKFGNEMPMQMEYYIRDEGRLTFLLAPRVEE

SEQ ID NO: 5118 - protein, 173 aa, Lycopersicon esculentum
AGINISGINGEVMPGQWEFQVGPSVGISAGDEVWVARYILERIAEIAGVVVSFDPKPIPGDWNGAGAHTNYSTKSMREDGGYEIILKAIEKLGLKHKEHIAAYGEGNERRLSGKHETANINTFKWGVANRGASVRVGRDTEKAGKGYFEDRRPASNMDPYVVTSMIAETTIIG

SEQ ID NO: 5119 - protein, 393 aa, Degeneria vitiensis
DLEPVNPADVPVTAAGALKSYKLAAKAISRLQSLPSGNISLLCDVLVREVSELTGYDRVMAYKFHEDEHGEVIAESRRSDLEPYLGLHYPATDIPQASRFLFMKNKVRMICDCSAPPVKVIQDKRLAQPLSLCGSTLRAPHGCHTQYMANMGSISSLVMSVTINEDDDDMLSEQQQKGRKLWGLVVCHHTSPRFIPFPLRYACEFLIQVFGIQLNKEVELAAQMREKHILRMQTVLCDMLLRDTPVGIITQSPNVMDLVNCDGAALYYRNQFWLLGTTPTEAQIRDIAGWLVEYHDGTTGLSTDSLTEAGYPSAADLGDDVCGMATVKITSKDFLFWFRSHTGKEIKWGGAKHDPVDKDDDGRKMHPRSSFKAFLEVVKQRSLPWEDVEMDAI

SEQ ID NO: 5120 - protein, 117 aa, Glycine max
RAESAERLERLERLELQSTRRMDEAMKRQCKVNLYGTAFPMKEELDRQILSRFQRPPGPIPSSMLGLETVTGSVDHFGFEDCLNDPRESETFRPLDMHHGMEVRLGLSKGPVYPSII

SEQ ID NO: 5121 - protein, 160 aa, Bacillus cereus ATCC 14579
MTVYDFSAKTITGEEKSLKDYKGKALLIVNVASKCGFTPQYKGLQEVYDKYKDQGLEILGFPCNQFGGQEPGTEADITSFCELNYGVNFPMFAKVDVKGDKAHPLYTYMTEQAPGLLGMKAVKWNFTKFLIGKDGKVVGRFAPQTKPVDLEVEIEKVLGE

SEQ ID NO: 5122 - protein, 418 aa, Streptomyces coelicolor A3(2)
MSDSPAPLADPHLVYDPVAGDGPKDVVVLGSTGSIGTQAIDLVLRNPDRFRVTALSANGGRVALLAEQAYRLKARTVAVAREDVVPALREALTAQYGTGEPLPEILAGPEAATQLAASDCHTVLNGITGSIGLAPTLAALEAGRTLALANKESLIVGGPLVKALAKPGQIIPVDSEHAALFQALAAGTRADVRKLVVTASGGPFRGRTRDELAAVTVEDALAHPTWAMGPVITINSATLVNKGLEVIEAHLLYDIPFDRIEVVVHPQSYVHSMVEYTDGSTLAHATPPDMGGPIAVGLGWPERVPDAAPAFDWSKASTWEFFPLDNEAFPSVDLARHVGQLAGTAPAVFNAANEECVEAFRSGALPFLGIMETVTRVVEEHGTPRTGTSLTVADVLEAETWARARARQLAAQTAEARA

SEQ ID NO: 5123 - protein, 248 aa, Nicotiana tabacum
MDFQSDLTREISPQRKLGRGKIEIKRIENTTNRQVTFCKRRNGLLKKAYELSVLCDAEVALIVFSSRGRLYEYANNSVKATIERYKKACSDSSNTGSISEANAQYYQQEASKLRAQIGNLQNQNRNMLGESLAALSLRDLKNLEQKIEKGISKIRSKKNELLFAEIEYMQKREIDLHNNNQYLRAKIAETERAQQQQQQQQMNLMPGSSSYELVPPPHQFDTRNYLQVNGLQTNNHYTRQDQPSLQLV

SEQ ID NO: 5124 - protein, 455 aa, Zea mays
MRIEEVQSTSKKQRIATHTHIKGLGLDANGMAIALAAGFVGQAAAREAAGLAVDMIRQKKMAGRAVLLAGPPATGKTALALGIAQELGSKVPFCPMVGSEVYSSEVKKTEVLMENFRRAIGLRIKENKEVYEGEVTELSPEEAESTTGGYAKSISHVIISLKTVKGTKQLKLDSSIYDALIKEKVAVGDVIYIEANSGAVKRVGRCDSFATEYDLEAEEYVPIPKGEVHKKKEIVQDVTLHDLDAANAQPQGGQDILSLMGQMMKPRKTEITEKLRQEINKVVNRYIDEGIAELVPGVLFIDEVHMLDIECFSYLNRALESPLSPIVILATNRGICNVRGTDMTSPHGIPVDLLDRLVIIRTETYGPTEMIQILAIRAQVEEIDMDEESLAYLGEIGQQTSLRHAIQLISPASVVSKTNGREKICKADLEEVSGLYLDAKSSARLLQEQQERYIT

SEQ ID NO: 5125 - protein, 406 aa, Escherichia coli O157:H7 EDL933
MAIEQTAITRATFDEVILPIYAPAEFIPVKGQGSRIWDQQGKEYVDFAGGIAVTALGHCHPALVNALKTQGETLWHISNVFTNEPALRLGRKLIEATFAERVVFMNSGTEANETAFKLARHYACVRHSPFKTKIIAFHNAFHGRSLFTVSVGGQPKYSDGFGPKPSDIIHVPFNDLHAVKAVMDDHTCAVVVEPIQGEGGVTAATPEFLQGLRELCDQHQALLVFDEVQCGMGRTGDLFAYMHYGVTPDILTSAKALGGGFPISAMLTTAEIASAFHPGSHGSTYGGNPLACAVAGAAFDIINTPEVLEGIQAKRQRFVDHLQKIDQQYDVFSDIRGMGLLIGAELKPQYKGQARDFLYAGAEAGVMVLNAGPDVMRFAPSLVVEDADIDEGMQRFAHAVAKVVGA

SEQ ID NO: 5126 - protein, 223 aa, Bacillus cereus ATCC 14579
MVLIIITVAIYFLATKLYKKFTFAFTLPVLTVTAIMICLFFIFGISHHEYRENGGDILSSLLSSAIVALAIPLFKERKILMKNFLSILIGVVIGIVAVTSMNVVIGGILNIDKELILTTLPQLATMPIALSLADQIGGIPSMTSSFVVVAGITGAIIGPTVLKFFSITSTIGKGVGMGCASHIIGVSRLVKEGEKEATIGSVTMIVTGILISILIPYGTKFIF

SEQ ID NO: 5127 - protein, 330 aa, Solanum tuberosum
MQMQYKNLGRSGLKVSQLSYGAWVTFGNQLDVKEAKTLLQCCRDHGVNFFDNAEVYANGRAERIMGQAIRELGWKRSDIVVSTKIFWGGSGPNDKGLSRKHIIEGTKASLKRLDMDYVDLIYCHRPDTSTPIEETVRAMNYVIDKGWAFYWGTSEWSAQQITEAWGVAQRLDLVGPIVEQPEYKLLSRHKVESEYLPLYSNYGIGLTTWSPLASGVLTGKYTSGNIPPDSRFSLENYKNLASRSLVDDVLRKVNGLKPIAEELGVPLPQLAIAWCAANPNVSSVITGATKEYQIQDNMKAINVIPMLTPAVMEKIEAIVQSKPKRQDSYR

SEQ ID NO: 5128 - protein, 315 aa, Corynebacterium glutamicum ATCC 13032
MEHGVTVIKGTEFDVFPLNLGGNTFGWTSNREQTFAVLDAFVAAGGNFVDTADSYSAWVEGNEGGESERELGAWIKERGADKLIIATKSGALEPVAGRSREATFKAVEGSLERLGVESIDIFYYHYDDEAVSIDEQVAIANDLIAQGKIKHLALSNYSAERLAEFFEKSVGTPAQPVALQPHYNLVSRKDYEENVQPLAEKHGVAVFPYFALAAGLLTGKYTSKEDISGKARAGQLDRYASDEAFAVVTELRAVADELGVAPTTVALAWLVAHGVTAPIASVSKVEQLKDLMAVKDVELSAEQLARLDKVSEPFA

SEQ ID NO: 5129 - protein, 214 aa, Paeonia delavayi
IVESVGEGVTDLKPGDHVLPVFTGECKECRHCKSEESNMCDLLRINTERGVMLSDGKSRFSINGQPIFHFIGTSTFSEYTVVHVGCVAKINPEAPLDKVCILSCGISTGLGATLNVAKPKKGSSVAIFGLGAVGLAAAEGARIAGASRIIGVDLNPKRFEEAKKFGVTEFVNPKDYDKPAQEVIAEMTDGGVDRSVECTGSIMAMVSAFECVHD

SEQ ID NO: 5130 - protein, 359 aa, Pisum sativum
MLGVIRNKTIRPSFSAFRFFSSAKQMTVRDALNSALDVEMSADSKVFLMGEEVGEYQGAYKVTKGLLEKYGPERVLDTPITEAGFTGIGVGAAYYGLKPVVEFMTFNFSMQAIDHIINSAAKSNYMSAGQISVPIVFRGLNGDAAGVGAQHSHCYASWYGSCPGLKVLVPHSAEDARGLLKAAIRDPDPVVFLENELLYGESFPVSAEVLDSSFWLPIGKAKIEREGKDVTITAFSKMVGFALKAAEILEKEGISAEVINLRSIRPLDRPTINASVRKTNRLVTVEEGFPQHGVGAEICTSVIEESFGYLDATVERIGGADVPMPYAGNLERLVVPHVEDIVRAAKRACHRSVPLAAAA

SEQ ID NO: 5131 - protein, 286 aa, Fusobacterium nucleatum subsp. vincentii ATCC 49256
MKNNKICEMLGIKYPIFQGAMAWVSGGELAGAVSKDGGLGIIAGGGMEPELLRENIRKAKAITTNPFGVNLMLLRPDVEAQMNVCVEEGVKVITTGAGNPGAFMEKLKAANIKVIPVIPTVKMAERMEKIGADAVIVEGMESGGHVGTLTTMALLPQVVNAINIPVIAAGGIASGKQFLAALAMGAEAIQCGTIFLTAKECLIHQNYKNIILKAKDRSTIVTGTSTGHPVRVIENKLAKEMIELERNGAPKEEIEKLGTGSLRLAVVDGDVERGSFMSGPSCCYGK

SEQ ID NO: 5132 - protein, 613 aa, Triticum aestivum
  unsure (1)..(613): unsure at all Xaa locations
MPMTSRSWQRPHVERAHEDQPPKWSPSRAEDSSEEHVDGSVATGRRMWRSRMKPKRLKVLQQSRGKQQAAAGGGVGDRLKPRHSHVQARRKKMSRAQDGILKYMLKMMEVCRAQGFVYGIIPEKGKPVSGASDNLRAWRQQKVRAARAAPPPAALAPPGAPAPRPATAPAAPAPGPLSLQELQDTTLGSLLSALMQHCDPPQRRFPLEKGISPPWWPSGDEEWWPELGIPKDQGPPPYKKPHDLKKAWKVSVLTAVIKHMSPDIEKIRRLVRQSKCLQDKMTAKEISTWLAVVKQEEELFMRLHPGARPPASAGGIASAISFNASSSEYDVDVADDCKGDEAGTHKMAMADPTAFNLGAAILNDKFLMQAPMKEETADMEYVQKRSAVAAEPELMLNNRVYTCNNVQCPHSDYGYGFLDRNARTNHRYTCKYNDPLXQARENKATPPAPPQVFPAAYNQQNHGLNNLDFGLPMDGQRSIAELMNMYDTAFPANNKNMGNDDVTIIERPNAITPVMDEGFFGQGNGIGGNGDSMFSDVSNMMQQQQAQQPQQQQQQQQQAPAQQQFFIRDDAQAXFGNQMGSISGASDFRFGSGFNMSGTVDYPQKNDGPNWYY

SEQ ID NO: 5133 - protein, 193 aa, Ceratopteris pteridoides
RTGLLKKAYELSVLCDAEVAVIVFSSTGRLSEFATPSMPKMLEKYHRAIQRSQGNEHSLQNIEHWQHEAINLRKRIQLLQLRQSHLMGENLTCFQLKDLDILESRLSVTVEKIREEKMRRFHVHAEEMHKQECLLHQENTLLKLKIENVESMKHSAHVIDLLSDDDCMLESPKISQESGLKDSRFSLQLGLKP

SEQ ID NO: 5134 - protein, 245 aa, Gymnosporia polyacantha
ALSIAGAVQSQKLAVRAISQLQSLPGGDIKLLCDTVVESVRNLTGYDRVMVYKFHEDEHGEVVAESKRSDLEPYMGLHYPASDIPQASRFLFKQNRVRMIVDCHASPVRVIQDDGLMQPLCLVGSTLRAPHGCHAQYMENMGSLASLAMAVIINGNEEEAIGGRSPTRLWGLVVCHHTSARCIPFPLRYACEFLMQAFGLQLNMELQLAAQLLEKHVLKTQTLLCDMLLRDSPTGIVTQSPSIMD

SEQ ID NO: 5135 - protein, 499 aa, Oryza sativa (japonica cultivar-group)
MDAAAATAVNGVLEVEERKAQKSYWEEHSKDLTVEAMMLDSRAADLDKEERPEILSLLPPYEGKSVLELGAGIGRFTGELVKTAGHVLAMDFIESVIKKNESINGHHKNASFMCADVTCPDLMIEDNSIDLIFSNWLLMYLSDEEVEKLVKRMVRWLKVGGYIFFRESCFHQSGDSKRKVNPTHYREPRFYTKVFKECQALDQDGNSFELSVLTCKCVGAYVKSKKNQNQICWLWQKVDSTEDRGFQRFLDNVQYKASGILRYERIFGEGFVSTGGIETTKEFVDRLDLKPGQNVLDVGCGIGGGDFYMADKYDVHVVGIDLSINMVSFALERAIGRKCSVEFEVADCTKKTYPDNTFDVIYSRDTILHIQDKPSLFKSFFKWLKPGGKVLISDYCKCPGKPSEEFAAYIKQRGYDLHDVRAYGQMLENAGFHDVIAEDRTDQFLDVLERELAKVEKNKNEFVSDFSQEDYDAIVNGWKAKLQRSSAGEQRWGLFIATK

SEQ ID NO: 5136 - protein, 443 aa, Pseudomonas putida KT2440
MSQSTSGASLRRSLGPFSVLLFGLAFLAPLIVFGTYGVITQASGNTTAMAYLVAATGVVFTALSYGRLVRVFPVAGSAYTYTRKMLNANLGFMVGWAALLDYFFIPMLIWLLGASYLNMAFPEVPQWVWITGFIVSTSLLNVLGIQVANRFNVLLMVVQLVIIAVFIGLCVHYIVAANGPGGLLSAKPFFNQDVPFATSMAGAAIAAYSFLGFDALSTLSEETRDPGRTLPRAILLVALIGGSVYVGSSYFMYLAHPSPTFELVDGAAFEIARMIGGDLFFAVVLTGIIVAHFAAGMSFQASVGRLLYALGRDNQLPRRLFGALHPRYKTPAFNILLCGVFGTAGFGLTIATATSLVNFGAFLAFTAVNLCALRLTFDARVKDGAGLLRGVLFPLIGLVTAGWMLVSLDKDALIMGGCWLGLGLVYLACRTSLFRNPVPDALV

SEQ ID NO: 5137 - protein, 224 aa, Pyrococcus furiosus DSM 3638
MNTFGIFLTISAYTFFSWAYSKKKTPILNPVLLSILLIALILKVGNISYEKYMESARFLSFLLGPAVVSLAIPLYKQINIVKEYKKEIATGIITGGTTAILSAVYILKAFNSPEILQRTIAPKSVTTAIAMGVSEKIGGIPELTAVLVILTGILGNALAPELLDFFKIKDRVARGLATGVSSHGLGTARIILEDELSGAVSGLAMALNGVYTAFLLPLIIELIV

SEQ ID NO: 5138 - protein, 304 aa, Saccharomyces kluyveri
MAEKKQSNFAIDFLMGGVSAAVSKTAAAPIERVKLLIQNQDEMIKQGSLDRRYNGIVDCFKRTSEAEGVVSFWRGNTANVIRYFPTQALNFAFKDKIKAMFGFKKEEGYAKWFAGNLASGGLAGGLSLMFVYSLDYARTRLAADSKSAKKGGERQFNGLVDVYKKTLASDGVAGLYRGFLPSVVGIVVYRGLYFGLYDSLKPLLLTGTLEGSFFASFLLGWAVTTGASTASYPLDTVRRRMMMTSGQAVKYDGAFDAFRKIVAAEGIKSLFKGCGANILRGVAGAGVISMYDQLQMILFGKKFK

SEQ ID NO: 5139 - protein, 1137 aa, Oryza sativa
MSSSRSNNRATCSRSSSARSKHSARVVAQTPMDAQLHAEFEGSQRHFDYSSSVGAANRSGATTSNVSAYLQNMQRGRFVQPFGCLLAVHPETFALLAYSENAAEMLDLTPHAVPTIDQREALAVGTDVRTLFRSHSFVALQKAATFGDVNLLNPILVHARTSGKPFYAIMHRIDVGLVIDLEPVNPVDLPVTATGAIKSYKLAARAIARLQSLPSGNLSLLCDVLVREVSELTGYDRVMAYKFHEDEHGEVIAECKRSDLEPYLGLHYPATDIPQASRFLFMKNKVRMICDCSATPVKIIQDDSLTQPISICGSTLRAPHGCHAQYMASMGSVASLVMSVTINEDEDDDGDTGSDQQPKGRKLWGLMVCHHTSPRFVPFPLRYACEFLLQVFGIQINKEVELAAQAKERHILRTQTLLCDMLLRDAPVGIFTQSPNVMDLVKCDGAALYYQNQLWVLGSTPSEAEIKNIVAWLQEYHDGSTGLSTDSLVEAGYPGAAALGDVVCGMAAIKISSKDFIFWFRSHTAKEIKWGGAKHEPIDADDNGRKMHPRSSFKAFLEVVKWRSVPWEDVEMDAIHSLQLILRGSLQDEDANKNNNAKSIVTAPSDDMKKIQGLLELRTVTNEMVRLIETATAPILAVDITGSINGWNNKAAELTGLPVMEAIGKPLVDLVIDDSVEVVKQILNSALQGIEEQNLQIKLKTFNHQENNGPVILMVNACCSRDLSEKVVGVCFVAQDMTGQNIIMDKYTRIQGDYVAIVKNPSELIPPIFMINDLGSCLEWNEAMQKITGIKREDAVDKLLIGEVFTHHEYGCRVKDHGTLTKLSILMNTVISGQDPEKLLFGFFNTDGKYIESLMTATKRTDAEGKITGALCFLHVASPELQHALQVQKMSEQAAMNSFKELTYIRQELRNPLNGMQFTRNLLEPSDLTEEQRKLLASNVLCQEQLKKILHDTDLESIEQCYTEMSTVDFNLEEALNTVLMQAMPQSKEKQISIDRDWPAEVSCMHLCGDNLRLQQVLADFLACMLQFTQPAEGPIVLQVIPRMENIGSGMQIAHLEFRLVHPAPGVPEALIQEMFRHSPGASREGLGLYISQKLVKTMSGTVQYLRESESSSFIVLVEFPVAQLSTKRCKASTSKF

SEQ ID NO: 5140 - protein, 413 aa, Ralstonia metallidurans
MAFCFFRLLVSCRPQESAMAFAEFPVQSLMYITNRPELVFTEGKGSWLTDHNGKRYLDFVQGWAVNALGHSNEGMIQALEKQARKLLNPSPAFYNEPMLKLAQQLTDNSCFDKVFFANSGAEANEGAIKLARKWGRKHKNGAYEIITMDHSFHGRTLATMSASGKAGWDTIFAPQVPGFPKAELNDLASVEKLITDKTVGIMLEPVQGEGGVIPATREFMQGLRALADKHKLLFIVDEVQTGCGRCGTLFAYELSGVEPDIMTLGKGIGGGVPLSALLCKADVASFEAGDQGGTYNGNPLMTAVGSSVMEQLTAPGFLDDVKAKGEYLREQLLVLTKEFGLGGERGEGLLRALVLGKDIGPQLVEEAREMSPVGLLLNAPRPNLLRFMPALNVTREEIDQMIGMLRELLKKLA

SEQ ID NO: 5141 - protein, 245 aa, Rzedowskia tolantonguensis
ALSIAGAVQSQKLAIRAISQLQSLPGGDIKLLCDTVVESVRELTCYDRVMVYKFHEDEHGEVVAESKRPDLEPYIGLHYPATDIPQASRFLFKQNRVRMIVDCHASPVRVIQDDGLMQPLCLVGSTLRAPHGCHAQYMENMGSKASLAMAVIINGNDEEVIGGRNATRLWGLVVCHHTSARCIPFPLRYACEFLMQAFGLQLNMELQLAAQLSEKHVLKTQTLLCDMLLRDSPTGIVTQSPSIMD

SEQ ID NO: 5142 - protein, 171 aa, Sulfolobus tokodaii
MMVIEEYLGKKPKIADKVYIHPTAYVIGDVSIGEFSSLWHYVVVRGDNDSIEIGRETNIQENSTIHTDIGYKVIIGDRVSIGHNAVIHGAKISSNVIIGMGAILLNGSEVGEYSIIGAGAVVTQGTKIPPYSIAVGVPAKVIRKVSEEEIKLISENAEEYLKHVRRFLKIE

SEQ ID NO: 5143 - protein, 86 aa, Zea mays
  unsure (1)..(86): unsure at all Xaa locations
MEIEEASRESGHVACGSWIRRPKKVNWVLIAKASKRXGSSVYCAALLNIFCFDPITASLSSYPLATHTLKDSDGDPVAASXHPGGD

SEQ ID NO: 5144 - protein, 181 aa, Pseudomonas syringae pv. tomato str. DC3000
MAIRKFQDHTPALGERAFIDHSAMVIGDVEIGADSSIWPLTVVRGDMHRIRIGARTSVQDGSVLHITHAGPFNPDGFPLLIGDEVTIGHKSMLHGCTIGNRILVGMGTTIMDGAVVEDEVIIGAGSLVPPGKVLESGFLYVGRPVKQARALTEKEIAFFPYSATNYVKLKDQHLAEGFDKP

SEQ ID NO: 5145 - protein, 215 aa, Zea mays
MRTRTPAWGRAAKLSSARVDHHTAMEPAADGDDVHGQRRDGGHHAPVVSLRALGLADADAFMAWASDDRVMRHLKRPLCATREQAVAQIRDTVLGHPWFRAVCFGDVPVGQVSVWPYADEGGRRANLGYALAHDQWGRGIAAAAVRMVVGTVFDDLPGLERLEAVTDVANVRSQRVLEKAGFHREGVLRRYIAGRRGSGARDAVIYSFLSSDDRA

SEQ ID NO: 5146 - protein, 240 aa, Bradyrhizobium japonicum USDA 110
MKDNPFSLWVYLSQSPLLWLTVTLLVYASTDAVSLASRRHPLANPVLHAMWIIGVFLLVTGTSYTTYFAGAQFVHFLLGPATVALAVPLYENRKRVVSSIVPMLVALVAGSVTAVVSVVLLAELAGLPRDVVLSLAPKSVTAGVAMGIAESLHADPSLAAVAVILTGIMGAIIVTPLMNRTGVTDFRARGFAAGLAAHGIGTARAFQVDEIAGVFSGIAMSLNALVTSFLVPLAVTLLVR

SEQ ID NO: 5147 - protein, 1111 aa, Arabidopsis thaliana
MSSNTSRSCSTRSRQNSRVSSQVLVDAKLHGNFEESERLFDYSASINLNMPSSSCEIPSSAVSTYLQKIQRGMLIQPFGCLIVVDEKNLKVIAFSENTQEMLGLIPHTVPSMEQREALTIGTDVKSLFLSPGCSALEKAVDFGEISILNPITLHCRSSSKPFYAILHRIEEGLVIDLEPVSPDEVPVTAAGALRSYKLAAKSISRLQALPSGNMLLLCDALVKEVSELTGYDRVMVYKFHEDGHGEVIAECCREDMEPYLGLHYSATDIPQASRFLFMRNKVRMICDCSAVPVKVVQDKSLSQPISLSGSTLRAPHGCHAQYMSNMGSVASLVMSVTINGSDSDEMNRDLQTGRHLWGLVVCHHASPRFVPFPLRYACEFLTQVFGVQINKEAESAVLLKEKRILQTQSVLCDMLFRNAPIGIVTQSPNIMDLVKCDGAALYYRDNLWSLGVTPTETQIRDLIDWVLKSHGGNTGFTTESLMESGYPDASVLGESICGMAAVYISEKDFLFWFRSSTAKQIKWGGARHDPNDRDGKRMHPRSSFKAFMEIVRWKSVPWDDMEMDAINSLQLIIKGSLQEEHSKTVVDVPLVDNRVQKVDELCVIVNEMVRLIDTAAVPIFAVDASGVINGWNSKAAEVTGLAVEQAIGKPVSDLVEDDSVETVKNMLALALEGSEERGAEIRIRAFGPKRKSSPVELVVNTCCSRDMTNNVLGVCFIGQDVTGQKTLTENYSRVKGDYARIMWSPSTLIPPIFITNENGVCSEWNNAMQKLSGIKREEVVNKILLGEVFTTDDYGCCLKDHDTLTKLRIGFNAVISGQKNIEKLLFGFYHRDGSFIEALLSANKRTDIEGKVTGVLCFLQVPSPELQYALQVQQISEHAIACALNKLAYLRHEVKDPEKAISFLQDLLHSSGLSEDQKRLLRTSVLCREQLAKVISDSDIEGIEEGYVELDCSEFGLQESLEAVVKQVMELSIERKVQISCDYPQEVSSMRLYGDNLRLQQILSETLLSSIRFTPALRGLCVSFKVIARIEAIGKRMKRVELEFRIIHPAPGLPEDLVREMFQPLRKGTSREGLGLHITQKLVKLMERGTLRYLRESEMSAFVILTEFPLI

SEQ ID NO: 5148 - protein, 247 aa, Glycine max
  unsure (1)..(247): unsure at all Xaa locations
MEYRWTNGRQETGGRDRRQSKREQAYQDSLIEDLSEDFSLPINHRPTENVDLDNVEQASLDTQITSSNIGFKLLQKMGWKGKGLGKDEQGIIEPIKSGIRDPRLGVGKQEEDDFFTAEENIQRKKLDVELEETEEHVKKREKAAYSIYACLLTGLVCHKESSTLEGLENFLQVLLPGGFFXCFVHIMKIQVLAEREQKIQTEVQEIRKVFYCDLCNKQYKLAMEFEAHLSSYDHNHRKRFIQMKEMH

SEQ ID NO: 5149 - protein, 382 aa, Chlorobium tepidum TLS
MKSLSILGSTGSIGLSTLDVVRRHPERFSIAALAEGHDVEMLLKQIDEFRPSLVSVRDEASRERLKGMLGDHKPEILCGLEGAAEVAAVDGADMVVSAIVGAAGLVPTVRAIEAGKDIALANKETLVVAGQLVSDLVKKHDVKLLPVDSEHSAIFQSLVGHRTEDIERIILTASGGPFRKTPAEELKNVGPEQALKHPQWSMGAKITIDSATLMNKGLEVIEAHWLFDMPAEKIGVVVHPQSIIHSMVEYIDGCVIAQLGVPDMRAPIAYALAWPERCETGIGKLDLTKVATLTFEEPDMERFPALRLAFDALKAGQTYPAVLNAANEIAVAAFLDKKIGFTDIAGTVDKTMQAHEAWTPITLEEYLQADKWARETARQLIG

SEQ ID NO: 5150 - protein, 202 aa, Oryza sativa
MASGSIVKKEVGENHDVLRFGFNNSVKGDLAPQHPIQATVHKEAKFWADKKRFGAEAIYGSAFNIRKDLDAQILSKFQRPPGALPSSMLGYEALTGSLDDFGFEDYLNSPSRSDLACPASLTDGMEVNTVMTGSPMMVGQCALCSDETPSMGAVKSGGEREREGMGMRLLGRDTTCSLVHVHASKAVKSPAATTSGSEGSQL

SEQ ID NO: 5151 - protein, 350 aa, Staphylococcus epidermidis ATCC 12228
MKAAVWYGQKDVRVEDREPKAIKDNEVQVKVSWAGICGTDLHEYLEGPIFISTDQPDPLLGQTAPVTLGHEFSGVIENVGKDVSRFKKGDRVVVNPTVSKREKPENVDLYDGYSFIGLGSDGAFAEFTNAPETNVYHLPDNVSAREGALVEPTAVAVQAVKEGELLFGDTVAVFGAGPIGLLTIVAAKAAGASKIFVFDLSEERLAKAKSVGATHVYNSGNVDPVQTVYEHTDNGVDVSFEVAGVGITLQQSIEVTRPRGTAVIVSIFGHPVEFNPLLQMNKGVKLTTTIAYTPTTFQQTIDLIANGSLNVKDVVTDQIELENIVESGFNQLVNDKSQAKILVRLNGDQK

SEQ ID NO: 5152 - protein, 335 aa, Zea mays
EREMSALKKSDKKAALDFAAWSFNVTTSVGLIMVNKALMATYGFSFATTLTGLHFVTTTLMTIVFRWLGLSQPSHLPLADLVKFVIFSNLSIVGMNVSLMWNSVGFYQIAKLCMIPASCLLEVVFDHVHYSRDTKLSIMVVLIGVAVCTVTDVSVNARGLIAAVIAVWSTALQQYYVHFLQRKYSLNSFNLLGHTAPAQAGSLLLVGPFADYLLTGKRVDHFSFSSLALFFLALSCFIAIGVNLSQFICIGRFSAVSFQVLGHMKTVLVLSLGFLFFGKEGLNLQVVLGMVLAVLGMIWYGNASAKPGGKERRSILPVRSASLKGSSEEKGGAEK

SEQ ID NO: 5153 - protein, 151 aa, Oryza sativa (japonica cultivar-group)
MASALAVARPAALVPRGGSESITGNLPMLPAVPSTRFVSGRMRSRNVVAAKAAQDSSEPSSGSVVKYVQSSFSSPEDLFALAGIGFAGIAALWASINLVEVIDKLPVLPLLFELIGILVAWLFIYQNLLFKPDREKFLNNIKSSVSRVLGQ

SEQ ID NO: 5154 - protein, 262 aa, Emericella nidulans
MSDAYGGLSLRWTLRGKKALITGATKGIGLAVANEFLSLGAEVIIVARNSQDVDQQLIIWRELGLPAYGITADVATAEGRQAIFEQVGKTWDKLDILVNNVGTNISKKVLDYTAAEYQFIIQTNQISIFEMCRLFYPLLQNRENSSIVNISSVAGLVSNRTGAPYGMTKAAINQLTRSLSVEWACDQIRVNTVAPWAIRTPLTESVLDNQDFLKLVLSQTPMGRVGQPEEVAGLVAFLCMPAASFITGQCITVDGGFLAFGF

SEQ ID NO: 5155 - protein, 329 aa, Triticum aestivum
RRYKQVPEWWFICILTVNIAVTVFACEYYIEQLQLPWWGVLLACAIAFFFTLPIGIITATTNQTPGLNIITEYIMGYLYPGRPVANMCFKVYGYISMSQALTFLQDFKLGHYMKIPPRTMFMAQVVGTLIAAFVYLGTAWWLMDSIPNICDTELLPAGSPWTCPGDHVFYDASVIWGLISPRRIFGDLGTYSAVNWFFLGGAIAPLLVWFAHKAFPGQNWILLINMPVLIGSTGQMPPATAVNYITWIFVGFLSGYVVYRYRRDWWERHNYLLSGALDAGLAFMAVLIYLCLGLENISLNWWGNDLDGCPLASCPTAKGIFVEGCPVYT

SEQ ID NO: 5156 - protein, 321 aa, Escherichia coli CFT073
MGKAVIAIHGGAGAISRAQMSLQQELRYIEALSAIVETGQKMLVAGESALDVVTEAVRLLEECPLFNAGIGAVFTRDETHELDACVMDGNTLKAGAVAGVSHLRNPVLAARLVMEQSPHVMMIGEGAENFAFAHGMECVSPEIFSTPLRYEQLMAAREEGATVLDHSGAPLDEKQKMGTVGAVALDLDGNLAAATSTGGMTNKLPGRVGDSPLVGAGCYANNASVAVSCTGTGEVFIRALAAYDIAALMDYGGLSLAEACERVVMEKLPALGGSGGLIAIDHEGNVALPFNTEGMYRAWGYAGDTPTTGIYREKGDTVATQ

SEQ ID NO: 5157 - protein, 828 aa, Geobacter metallireducens
MEYTMETLSDVFATFSQRGDTTAFVHRTGVRRYVFTYLDLHALSLRMNRWLADQGVGEGDRVVLWGPNSPWWAVAFWGIVTRGAVAVPVDFMSGAERAEIIAGLTDAKLVIQSRDKLDRLTGRPSVLLEELGFLLEAVEPLATTHRPAPDDMAELIYTSGTTGNPKGVILTHRNLVANILQVNRHIPVVTPDFSFLSLLPLSHMFEQMGGFFTPLYRGAAIVYIRTLKPSAIMEALGEEDIYAIIAVPRLLQLLKGSVERELEAKGLGSIFRWLLKVGERMSRGGRSVLFRPIQRKFGRNFALFVSGGAPLDPEVFRFWNGLGFRVVEGYGLTECSPVLTANTMERQVMGSVGTPLDGVELRLEEGEILARGDNIFPGYFRNEEATRGAFVDGWFRTGDLGELDPDGWLRIKGRSKELIVTGAGVNVYPDEIEAILNRTQGVREGCVIGLDRGKGEEVHGVLILDGSGRPTEEIVNEVNAKFDELHRITSFSVWPEAEFPKTTTLKIRKFQVKERIEQGGGALGDGRGADRLTALVATITGSPLEQVTEGALLVNDLGLTSIARLELVNALEMEFRLDLEDSVIGPQTRVADLREIVSRREKVHIREHFRIWAMGGVALAVRRLLDTVLHGPLLRAFVTLKSLGIENLEAADGPVMFVSNHLSYLDQPAIMCVLPDAWRYNTATAAWEEFFFRNFKNLPQRLWKRFTYEYASVAFTVFPLPQSRGFRGALHFMGTLADQGMNILLFPEGERSRDGRLLPFQQGLGVMIRELGVPVVPVRIRGLEKVLPRGASWPQKGEVSITFGKPIHFRGESPTEIVDRARRAVEDL

SEQ ID NO: 5158 - protein, 248 aa, Oryza sativa (japonica cultivar-group)
MEQLFVDDPAFASSMSSLEADIFSGAGQLPSSPWLDLDLDDDVQDLSMAPTTANAVSSGYGSGGSGSHRKLSHNAYERDRRKQLNELYSSLRALLPDADHTKKLSIPTTVSRVLKYIPELQKQVENLERKKKELTTTSTTNCKPGVLGSQLMSEGMAPIVSATCINDMEIMVQVSLLSNVAGSVLPLSKCIKVLENEGLHFISSSTSSGFGNRTFYSIHLQRSEGTINEECPAFCERLEKVVRNKAKL

SEQ ID NO: 5159 - protein, 335 aa, Pseudomonas syringae pv. syringae B728a
MTDLSNRQFLLAKRPSGDARREDFTYQEVPVSALADGQILVRSKYLSLDPAMRGWMNEGKSYIPAVELGEVMRAIGVGEVIESKNPKFAVGDHVQGRLGVQDYFAGEPKGFYKVDTNLAPLPLYLSALGMTGMTAYLALLDVGQPKSGDTVVISGAAGAVGSIAGQIAKLKGCRVVGIAGGTKKCRLLTEELGFDAAIDYKSEDVMDGLKRHCPDGVNVYFDNVGGDILDAALSQLAVGARVVICGAISQYNSTKAIKGPANYMSLLVNRARMEGFIVLDHPERYAEAGQVMAGWIKEGKLKSKEHIVEGLETFPETFQMLFSGENQGKLILKVE

SEQ ID NO: 5160 - protein, 368 aa, Xanthomonas campestris pv. campestris str. ATCC 33913
MKTRAAVAWGPHQPLSIEEVDLQPPRPGEVLVRLVATGICHGDAHALAHAPASSFPAILGQEGSGVVEEVGIGVTSVRVGDHVIPLDMPECGVCKFCRSGRTNLCQAIRSSQERGLMPDGSSRFSLDGRPILHHMGTSTFSEYTVLPEIAVARIHPDAPLDQVCLLGCTVTTGVGAVLNSIHVRPGDCVAVFGLGGIGLSVIQGAVLAQAGRIIVVDIAPGKFALARALGATDCLDPRDYGAPIQQVIVDLTDGGADHSFECIGDVGAMRAALECCHKGWGESVILGVADGAQEISTRPFQLVTGRVWRGSAFGGVKGRSELPGYVERYLRGDLQLAPLITRTLALDDINQALADLRAARGIKSIVLY

SEQ ID NO: 5161 - protein, 145 aa, Oryza sativa
  unsure (1)..(145): unsure at all Xaa locations
XRRRQEDRSAVDMATAGASSWEDEIMESDIELEGEAVEPDNDPPQKMGDGAVEVSYEKRDQAQLCKNKGVDAFSEGKLDEAIEHLTEAIVLNPTSAIAYATRAVIFVKSKKPNAAIRDADAALKINPDSAKGYKSRGMAKAMLGX

SEQ ID NO: 5162 - protein, 398 aa, Hernandia lychnifera
DFEPVKPYEVPMTAAGALQSYKLAAKAIARLQSLSSGSMQKLVDTVVEEVYELTGYDRVMAYKFHDDDHGEVISEIKKPDLEPYLGLHYPATDIPQASRFLFMKNKVRMICDCNMKPVKVYLDEKLTYDLTLCGSTLRAPHSCHLQYMANMGSIASLVMAVVINEGEEERIAQKLHNHHHSQKRKRLWGLVVCHHTTPRFVPFPLRYACEFLMQVVAIHVNKEFELENQIQEKNILRTQTLLCDMLLRDAPLGIVTQSPNIMDLVKCDGAALLYGNKIWKLGTTPTELQIRDISLWLSEYHMDSTGLSTDSLYDAGYPGALSLGDAICGMAAVTITPKDFLFWFRSHTAAKVRWGGAKHDPTDKDDGRTMHPRSSFKAFLEVVKTRSLPWKDYEMDAI

SEQ ID NO: 5163 - protein, 149 aa, Ceratopteris richardii
MAEQLTTDQIAEFKEAFGLFDKDGDGCITTKELGTVMRSLGQNPTEAELQEMINEVDADGNGTIDFPEFLNLMARKMKDTDSEEELKEAFKVFDKDQNGFISAAELRHVMTNLGEKLTDEEVDEMIREADVDGDGQVNYEEFVRMMLSK

SEQ ID NO: 5164 - protein, 256 aa, Hordeum vulgare subsp. vulgare
MAAKCYPTVSDEYLAAVAKARRKLRGLIAEKNCAPLMLRLAWHSAGTFDVATKTGGPFGTMKCPAELAHGANAGLDIAVRLLEPIKEQFPILSYADFYQLAGVVAVEVTGGPEVPFHPGRQDKPEPPPEGRLPDATQGSDHLRQVFSTQMGLSDQDIVALSGGHTLGRCHKERSGFEGAWTANPLIFDNSYFTELLSGEKEGLLQLPTDKVLLTDPAFRPLVDKYAADEDAFFADYAEAHLKLSELGFGEASEGCC

SEQ ID NO: 5165 - protein, 308 aa, Glycine max
  unsure (1)..(308): unsure at all Xaa locations
MVQDMKQQDNGESKKKERHIVTWTQQEDDILREEIGIHGTENWAIIASKFKDKTTRQCRRRWYTYLNSDFKKGGWSAEEDILLCEAQKIFGNRWTEIASGXKVVSGRTDNAVKNRFSTLCKKRAKYEALANENNTSYINSNNKRIFLQHGCDTDVASESASGKMRRSHISDATEKINFGDRSHKQNGILLNQQSRAPFAVLAQNSHNVNLPDQHRVCNLKFSDYAQNNKIQGTFLKKDDPRINTLMXXXELLSSLALKVGAENMDQSLENAWKVLQEFLXRTKELDIPGCKIPDLQLVDLKDLLAGLK

SEQ ID NO: 5166 - protein, 197 aa, Bacillus halodurans
MEIEDIYGDLPTLETERLRLRKFYKDDAAAIYDYASNEQVTKYVLWETHQSIKDSEAFLAFALNKYDEKDVSPWAIELKRNERMIGTVDFVWWKPKDKTAELGYVLSEPYWGQGIMTEAVNALVEFGFNNMELERIQAKCFAENISSARVMEKAGLIYEGTHRRAIYVKGAHRDFKVYAIIREDYEQKHQPLVRTRS

SEQ ID NO: 5167 - protein, 240 aa, Thermobifida fusca
MSSTGAAQKTFSTFPSASQASSTPISGSWPILPKTAVRNRTRTTCASAGRTDRKPHERRTGMSRSAVIITGPGFQDHDVVYTYYRLLEEGWHVDVATKEAAPVTGKYGVPLPMDKTAAPLISFSDLDVNNYDAVILTGGHEAPDRVRQDQQVLAFVAAMADAGKVVAGLCHGPWIMVSAGVLKGRRACAYIGLRDDVINAGAEVVDSDVIVDGNIITCSYYAYVGAFMRAVFETVEKLDQ

SEQ ID NO: 5168 - protein, 178 aa, Streptomyces avermitilis MA-4680
MTHKALITGIGGKDPKVDQEAFTAPTSVVIGEVTLHAGASLWYGAVLRADCGPIVVGADSNIQDNCTLHVDPGFPISIGERVSVGHNAVVHGATVEDDCLVGMGATVLNGAVIGAGSLVAAQALVPQGMRVPPGSLVAGVPAKVKRPLTDEEREGIKLNGTYYVELAKSHRAVHAQED

SEQ ID NO: 5169 - protein, 348 aa, Agrobacterium tumefaciens str. C58 (U. Washington)
MEYRYLGKSGLKVPVLSFGTGTFGGSGPLFSNWGTSDATEARRLVDICLEAGVNLFDTADVYSNGASEEVLGEAVRGRRDSVLISTKTSLPMGDGPNEAGSSRFRLVRAVEDALRRLQTDYIDILQLHAFDAFTPVEEVLSTLDMLVRSGKVRYTGVSNFSGWQVMKSLGVADRYGWPRYVINQVYYSLVGRDYEWDLMPLGADQGLGAMVWSPLGWGRLTGKIRRGAPLPEGSRLHETASFGPPVDEEHLYRVIDTLDAVAEETGRTVPQVALNWLLRRPTVSTVIIGARNEQQLRQNLGAVGWELTPEQVARLDEASETTAPYPHFPYQRQAGFARLNPPAVTMPF

SEQ ID NO: 5170 - protein, 322 aa, Pseudomonas aeruginosa PAO1
MSLPALLDQRLRLPMVAAPMFLVSNPQLVLACCRSGIVGSFPALNQRESSGFEGWLEEIGAGLQALDNPAPYAVNLIVHNTNPRLQADLRICVEHRVPIVITSLGAVREVVDAVHSYGGLVFHDVTTRRHAEKAAEAGVDGLIAVAAGAGGHAGTWSPFALVAEIRQFFDKTLLLAGCINHGHEILAAQMLGADLAYLGTRFIATRESNASDAYKQMILEARAADIVHTPAVSGVPASFMRQSLEAAGYDLKRLTDKADMNYGEKLKPVNDEAKAWKTVWSAGQGAGNIDDLPGVDELVARLDREYRDALRNMDSLANRWPR

SEQ ID NO: 5171 - protein, 237 aa, Triticum aestivum
MCSLEATRAELGLAVLYLNKAEARDKICRAIQYGSKFISNGQPGTAQNVDKSTTLARKVFRLLKWVNDLHALISPAPKGTPLTLVLLGKSKNALLSTFLFLDQFVWLGRSGIYQNKERTDRIARMSLYCWMASSVCASLVELGELKRLSKAMRKRAKELRGADKYEDEQYLGKMKQSDDRLLALVKAGMDVVVAVGLLQLAPKKITPRVTGAFGFVTSLISCYQQLPSRAPLAKLKA

SEQ ID NO: 5172 - protein, 335 aa, Streptomyces antibioticus
MNLLVTGAAGFIGSRYVHHLLEATRRGREPAPVITVLDKLTYAGVLGNVPDDPAVTFVRGDIADAPLVDSLMAEADQVVHFAAETHVDRSITSPGTFVRTNVLGTQVLLDAALRHGVGPFVHVSTDEVYGSIEHGSWPEHQPLCPNSPYSASKASSDLLALSYHRTHGLDVRVTRCSNNYGPHQFPEKIVPLFVTNLLDGLRVPLYGDGLNVREWLHVDDHCLGVDLVRTQGRPGEVYHIGGGTELTNRDLTGLLLDAFGVGWDVVDPVADRKGHDRRYALDCAKAADELGYRPRRDFAEGIARTIDWYRDNRAWWEPLKKRPAGPAAPPRGSGP

SEQ ID NO: 5173 - protein, 375 aa, Glycine max
MKKHIHIALFLLLVSPLIPIAVAQAQSQPNDFSDANLNQFSPSIAIIIVILVAALFLMAFFSIYVRHCADSPSTTVSPLTTARSRRAARGLDPAVIQTFPILEYSEVKIHKIGKEALECAVCLCEFEDTETLRLIPKCDHVFHPECIDEWLGSHTTCPVCRANLVPTDSEDAIANGNANGVVPVPETFTRDIEAQNDAVEAAPEQQNAEADPVLPEPEVVSLDKTLNRNRTRGSRSNRPRRFPRSHSTGHSLVQPGENTDRFTLRLPLEVRKQLINRQLQRASSLIVLPREGSLRQGYRTGGEGSSRAKISRRLDRSLKSDRWIFSMAAPFFARALSIRSPRVRNNDVEGAASSSSSPTAPIMPPTAVDSARPPV

SEQ ID NO: 5174 - protein, 297 aa, Rhizobium sp. USDA 4007
RGKTQIKEFAEFPTLEQLPLWGFDGSSTQQAEGHSSDCVLKPVAVYPDPARTNGVLVMCEVMMPDGVTPHASNKRATILDDEGAWFGFEQEYFFYKDGRPLGFPESGYPAPQGPYYTGVGYSNVGSVARQIVEEHLDQCLAAGINHEGINAEVAKGQWEFQIFGKGSKKAADQMWMARYLMQRLTEKYGIDIEYHCKPLGDTDWNGSGMHANFSTAYMREVGGKAYFEALMAAFDKNLMDHIAVYGPDNDKRLTGKHETAPWNKFSYGIADRGASIRVPHSFIKNDYKGYLEDRRPN

SEQ ID NO: 5175 - protein, 237 aa, Glycine max
  unsure (1)..(237): unsure at all Xaa locations
MSTLDATRAELGLLVLYLGKAEARDKICRAIQYGPKILSNGEPGTAQNVDKTTSLARKVFRLFKFVNDLHALISPTPQGTPLXPLILLGKSKNALLSTFLFLDQFVWLGKNRHLPGIKERXELIGRISLYCWLGSSVCTTLVELGELGRLSXSMKKLEKDLKNKNKYDNEQYRAKLNKSNERTLSLIKAGIDTVVAVGLLQLAPKTVTPRVTGAFGFVSSLISCYQLLPAPAKSKTL

SEQ ID NO: 5176 - protein, 216 aa, Streptomyces coelicolor A3(2)
MDAELFPRTRAETAPGAVHLPDWLSPGQQRELLDACREWARPPAGLRTVRTPGGGTMTARQVCLGRHWYPYGYAATAVDGDGAPVKPFPARLDGLARRAVTDALGAEAVAPAPYDIALINFYDADARMGMHRDADERTDAPVVSLSLGDTCVFRFGNPETRTRPYTDTELRSGDLFVFGGPSRLAYHGVPRVHPGTAPPELGLRGRLNITLRVSGF

SEQ ID NO: 5177 - protein, 162 aa, Triticum aestivum
  unsure (1)..(162): unsure at all Xaa locations
MADVEYRCFVGGLAWATDDQSLQNAFSKYGDVIDSKIITDRETGRSRGFGFVTFASDEAMRQAIEAMNGQDLDGRNITVNEAQSRXSGEGGGGFNGGGGGGYGGQRREGGGGGYGGGGGGYRGGRSGGGGGYGSRDGGGGYCCGGVGYRGSRGGSGGCNWKE

SEQ ID NO: 5178 - protein, 305 aa, Miscanthus condensatus
IESVGEGVTDVAPGDHVLPVFTGECKECAHCRSAESNMCDLLRINTDRGVTIGDGKSRFSINGKPIYHFVGTSTFSEYTVMHVGCVAKINPEAPLDKVCVLSCGISTGLGASINVAKPPKGSTVAIFGLGAVGLAAAEGARIAGASRIIGVDLNPSRFEEARKFGCTEFLNPKDHKKPVQEVLAEMTNGGVDRSVECTGNINAMIQAFECVHDGWGVAVLVGVPHKDAEFKTHPMNFLNERTLKGTFFGNFKPRTDLPNVVELYVKKELEVEKFITHSVPFAEINKAFDLMAKGEGIRCIIRMEN

SEQ ID NO: 5179 - protein, 279 aa, Glycine max
  unsure (1)..(279): unsure at all Xaa locations
TEYGPYLQNEPSPXDDYKNMLCQATEPLSTFLEYITYGHMIDNVVLIVTGTLHERDVQELLEKCHPLFMFDSIATLAVAQNMRELYRLVLVDTPLAPYFSECITSEDLDDMNIEIMRNRLYKAYLEDFYRFCQKLGGATAEIMSDLLAFEADRRAVNITINSIGTELTRDDRRKLYSNFGLLYPYGHEELAVCEDIDQVRAVMEKYPPYQSIFAKLSYGESQMLDKAFYEEEVKRLCLAFEQQFHYAVFFAYMRLREQEIRXLMWIXECVAQIRSQSHD

SEQ ID NO: 5180 - protein, 426 aa, Pseudomonas putida KT2440
MNLFNLRRSAPAAAAEPKRAPVIVPHASEQSPERLMPGTERAAQVFVRGQGSWLWDNEGHAYLDFTQGGAVNSLGHSPSVLVKALGNQAQALINPGSGFHNRGLLGLVNRLCQSTGSDQAYLLNSGAEACEGAIKLARKWGQLHRNGAYHIITASQACHGRSLGALSASDPLPCNRCEPGLPGFSKVPFNDLAALHAEVDSRTVAIMLEPIQGEAGVIPATQEYLKGVETLCRELGILLILDEVQTGIGRCGALLAEELYGVRADIITLGKGLGGGVPLAALLARGKACCAEPGELEGSHHGNALMCAAGLAVLDSVLEPGFLAQVQDNGRHLREGLSRLTGRYGQGEVRGHGLLWALQLKENLARELVAAALHEGLLLNAPQVDVVRFSPALTVSKGNIDEMLLRLARAFARLHAQQQARREMPA

SEQ ID NO: 5181 - protein, 343 aa, Nicotiana tabacum
MAEEVSNKQVILKNYVTGYPKESDMEIKNVTIKLKVPEGSNDVVVKNLYLSCDPYMRSRMRKIEGSYVESFAPGSPITGYGVAKVLESGDPKFQKGDLVWGMTGWEEYSIITPTQTLFKIHDKDVPLSYYTGILGMPGMTAYAGFHEVCSPKKGETVFVSAASGAVGQLVGQFAKMLGCYVVGSAGSKEKVDLLKSKFGFDEAFNYKEEQDLSAALKRYFPDGIDIYFENVGGKMLDAVLVNMKLYGRIAVCGMISQYNLEQTEGVHNLFCLITKRIRMEGFLVFDYYHLYPKYLEMVIPQIKAGKVVYVEDVAHGLESAPTALVGLFSGRNIGKQVVMVSRE

SEQ ID NO: 5182 - protein, 97 aa, Schizosaccharomyces pombe
MEKEYVRLISGDGFVFILEKEIACLSGTIRAILNEGIFSEAQKNECTFPDIRATLLEKVCEYLHYNYRYKNQLDIPKFDIPPEMVLELLVTAEYLEA

SEQ ID NO: 5183 - protein, 475 aa, Ralstonia metallidurans
MRQQQGFDAIVEREQGLHRGLSTGQLSMIAIGGAIGTGLFLGSGFAIGFAGPSVLVSYAIGALIALLLMGCLAEMTVAHPTSGSFGANAEHYIGPLAGFLVRYAYWSSIVFAVGTEVTAIAVYMKYWFPMVPGWYWIVGFSAALIGINATSVKVFGAVEYVFSMLKIVAIVGFILLGAYVVTRAPTGSGIGLANYTAHGGFFPKGMWGTWVAVIVSIFSYLSIEMIAVAAGEARDPETAITRAFRATMVRLVFFYLLTLALMLMIVPWTAAGAGESPFVRVMAATRVPGAAAVFNFVILVAALSAMNSQLYITTRMMFSLSRAGYAPKALGQVNGRGVPMTALLLSTVGIAFAVVLNVVYPDASFMLMMAISMFGAMFTWLMIFITHLFFRRQHRGRPLAFRMWGFPVTTLLGAGLMFATLVTTWFTPEFRMTLVAGVPFMLALSAAYWLWYRKRGGAAQGDGEDAGRAEVRNSW

SEQ ID NO: 5184 - protein, 73 aa, SINNINGIA TUBEROSA
ISGTNGEVMPGQWKFQVGPSVGIEAGDHIWCARYLLERITEQAGVVLSLDPKPIEGDWNGAGCHTNYSTKSMR

SEQ ID NO: 5185 - protein, 363 aa, Salmonella typhimurium LT2
MSKNYHIAVLPGDGIGPEVMAQALKVMDAVRSRFDMRITTSHYDVGGIAIDNHGHPLPKATVEGCEQADAILFGSVGGPKWENLPPESQPERGALLPLRKHFKLFSNLRPAKLYQGLEAFCPLRADIAANGFDILCVRELTGGIYFGQPKGREGSGQYEKAFDTEVYHRFEIERIARIAFESARKRRRKVTSIDKANVLQSSILWREIVNDVAKTYPDVELAHMYIDNATMQLIKDPSQFDVLLCSNLFGDILSDECAMITGSMGMLPSASLNEQGFGLYEPAGGSAPDIAGKNIANPIAQILSLALLLRYSLDANDAATAIEQAINRALEEGVRTGDLARGAAAVSTDEMGDIIARYVAEGV

SEQ ID NO: 5186 - protein, 152 aa, Zea mays; identical to SEQ ID NO: 631

SEQ ID NO: 5187 - protein, 144 aa, Gossypium schwendimanii
LGTSTFSEYTVVHVGQVAKINPEAPLDKVCVLSCGMSIGFGATVNVAKPKKGGSVAVFGLGAVGLAAAEGARVCEASRIIGIDLNPNRFEEAKKFGCTEFVNPKDHNKPVQEVIAEMTEGGVDCSIECTGSTQAMVSAFECVHD

SEQ ID NO: 5188 - protein, 623 aa, Zea mays
  unsure (1)..(623): unsure at all Xaa locations
QHQSDSDDNNSHYLPSSLHRSVSWRRLVLLKTMATFFSTSTNQRDLAGGGGDMSSFHHYAYSDPPAGGLMPFPATIVSSEGHVAHGGDDGGRGAFVDVNARDGPTGGAEMGLQTQLLMANAASAVQHQGLSLSLGTQGVPVSLYQYRQAEAGMAAAAFLSPNQASVAATRSAQSIYVQNSRYLKAARELLDEVVNVQDAIKRKGDKSQQGKDSGGGGGGGEGKDAETSDEKAGEHEGNSSAPELSPSERQDLQNKVSALMALLDQVDRKYRHYHHQMQMVMSSFDAVAGAGAARPYTALALQTISRHFRSLRDAVGAQVQSLRRSLGEKDGSAQGGGLPRLRYIDQQLRQQRAMQQFGMMQQPQHAWRPQRGLPESAVSVLRAWLFEHFLHPYPKDSEKLMLARQTGLSRGQVSNWFINARVRLWKPMIEEMYREEFGAEMDSHSSSENAAGNKGKDEAISSEDHEEFQSPSSAAAAAVPLPALPGHLSAFKSEAIGVMDAAGIGASSSLDGAVIGPYATSLNLGGGGGILQEALAHHHHHHXGGADARFVQAYGDMAGFGGYDGGSVSLTLGLQHCNEAGAGAGPAEPQALLYGSAGDFDFISGSEDRQRFGSSQLLHDFVA

SEQ ID NO: 5189 - protein, 392 aa, Ectopopterys soejartoi
DLEPVNPADVPVTAAGALKSYKLAAKAISRLQSLPSGNISLLCDVLVKEVRDLTGYDRVMVYKFHEDEHGEVVSECRRSDLESYLGLHYPATDIPQASRFLFMKNKVRMICDCMAPPVEVIQDERLPQPLSLCGSTLRSPHGCHAQYMTNMGTTASLVMSVTINEDDHMMDGDQQQMTKKLWGLVVCHHTNPRFVPFPLRDACEFLIQVFGVQINKEVELAAQVREKHILQIQTMLCDMLLRDAPVAIITQSPNVMDLVKCDGAALYFKNKTWLLGVTPTEEQIRDIAEWLLEYHSGNTGLSTDSLMEAGYPGASALGDAVCGMAAVSITSRDFLFWFRSHTAKEIKWGGAKHDPDDKDDGRKMHPRSSFKAFLEVVKWRSMPWEDVEMDAI

SEQ ID NO: 5190 - protein, 481 aa, Mycobacterium tuberculosis CDC1551
MVGPRTRGYAIHKLGFCSVVMLGINSIIGAGIFLTPGEVIGLAGPFAPMAYVLAGIFAGVVAIVFATAARYVRTNGASYAYTTAAFGRRIGIYVGVTHAITASIAWGVLASFFVSTLLRVAFPDKAWADAEQLFSVKTLTFLGFIGVLLAINLFGNRAIKWANGTSTVGKAFALSAFIVGGLWIITTQHVNNYATAWSAYSATPYSLLGVAEIGKGTFSSMALATIVALYAFTGFESIANAAEEMDAPDRNLPRAIPIAIFSVGAIYLLTLTVAMLLGSNKIAASDDTVKLAAAIGNATFRTIIVVGALISMFGINVAASFGAPRLWTALADSGVLPTRLSRKNQYDVPMVSFAITASLALAFPLALRFDNLHLTGLAVIARFVQFIIVPIALIALARSQAVEHAAVRRNAFTDKVLPLVAIVVSVGLAVSYDYRCIFLVRGGPNYFSIALIVITFIVVPAMAYLHYYRIIRRVGDRPSTR

SEQ ID NO: 5191 - protein, 424 aa, Prochlorococcus marinus subsp. pastoris str. CCMP1378
MKSLGSVVELVDAPHSKCGTFGYVGSSPTAPTLMNTYTRFDISFKKGNGCWLWDEKGKKYLDAVAGIATCSLGHSNRILRKKLSAQLKKVQHISNLYKIEEQEELSKYLTKQSCAESVFFCNSGAEANESAIKLIKKYGNTVHKGKESFILAAESSFHGRTLATLSATGQPKYQKGFEPMVKGFKFFKYNDIASVKKLFEELKANNQKASGILVEPIQGEGGVIPGDKKFFKELREICNKYNSLLILDEVQSGVGRTGKMWGYENLEIEPDGFTLAKGLGGGHAIGALLVQKKANIFTPGDHASTFGGNPFACRAAITVLEEIKRRKILKNVLERGNQLNEGFTKISAKFPKIISGIRGLGLIQGLVINDSYTDAKTITLKAFDKGLLLVPAGGNVVRFVPPLIISRNEINILLKKLDLIFEEM

SEQ ID NO: 5192 - protein, 328 aa, Zea mays
MGVKGFVEGGIASIVAGCSTHPLDLIKVRMQLQGEAAAAVAPQPALRPALAFHAGGHAVALPHHHHHDIPAPPRKPGPLAVGAQILRSEGAAGLFSGVSATMLRQTLYSTTRMGLYDILKTRWARENGGVLPLHRKILAGLVAGGVGAAVGNPADVAMVRMQADGRLPLAERRNYRGVGDAIGRMARDEGVRSLWRGSSLTVNRAMIVTASQLATYDQAKEAILARRGPGADGLATHVAASFTAGIVAAAASNPVDVVKTRMMNMKVAPGAPPPYAGAVDCALKTVRSEGPMALYKGFIPTVMRQGPFTVVLFVTLEQVRKVFKGVEF

SEQ ID NO: 5193 - protein, 107 aa, Zea mays
PRVRPRVRCENTAALCDNGRANIECKLNHTIDKPEEATIIEMQEPVSLTFALRYMNSFTKGVFTGPSKVTISLSSELPVVVEYKIAEMGFITFYLAPKIDDDEEMKP

SEQ ID NO: 5194 - protein, 76 aa, Glycine max
MDLSDLNSAEMQKFYSEEQQRAMVNEMVAKLTSECWDKCITGTPGNKFSSSESNCLSTLGALLGKSEPMPIMGLPK

SEQ ID NO: 5195 - protein, 154 aa, Saccharomyces cerevisiae
MVQAVAVLKGDAGVSGVVKFEQASESEPTTVSYEIAGNSPNAERGFHIHEFGDATNGCVSAGPHFNPFKKTHGAPTDEVRHVGDMGNVKTDENGVAKGSFKDSLIKLIGPTSVVGRSVVIHAGQDDLGKGDTEESLKTGNAGPRPACGVIGLTN

SEQ ID NO: 5196 - protein, 208 aa, Zea mays
  unsure (1)..(208): unsure at all Xaa locations
MNSLYDVSCFAAGLAGNVFALALFLSPVPTFKRVLKAKSTEQFDGLPYLLSLLNCCICLWYGLPWVSDGGRALVATVNCTGALFQLAYISLFIFYADSRTTRLKVAGLLVLVVFAFALIAHASIAFFDQPLRQLFVGSVSMASLVSMFASPLAVMGXVVVRTECVEFMPFYLSLSTFLMSASFAVYGLLLRDFFIYFPNGLGVILGAC

SEQ ID NO: 5197 - protein, 352 aa, Methanopyrus kandleri AV19
MALVYHEEYLRHEQHPTHPERRERLSYTVDRFEEEGLFEIEGIDLVEPDPVDREVIELVHDPEHVELIRRMSESGGGMIDLDTAVAPETYDQALLAAGGSVLAVELVVRGEYDTAFAMVRPPGHHAGRAKAAGFCYFNNAAIAAEYAIRELGVDSVAILDWDAHHGDGTQEIFYDRDDVLYVSIHQDGRTLYPGTGFPYEAGEGPGEGYTVNIPVLPRSGDRTYREAFQRIVEPVVREFDPDLILISAGQDCHFTDPITDLAVTAEGYRWMMQRATELAEDLGASGPVAVLEGGYSVEDGLPYTNLGVVCGMAGVPADLREPMDPQEENPRGPEGVRKVAREHSRYWTSVKA

SEQ ID NO: 5198 - protein, 346 aa, Escherichia coli O157:H7 EDL933
MKSVVNDTDGIVRVAESVIPEIKHQDEVRVKIASSGLCGSDLPRIFKNGAHYYPITLGHEFSGYIDAVGSGVDDLHPGDAVACVPLLPCFTCPECLKGFYSQCAKYDFIGSRRDGGFAEYIVVKRKNVFALPTDMPIEDGAFIEPITVGLHAFHLAQGCENKNVIIIGAGTIGLLAIQCAVALGAKSVTAIDISSEKLALAKSFGAMQTFNSSEMSAPQMQSVLRELRFNQLILETAGVPQTVELAVEIAGPHAQLALVGTLHQDLHLTSATFGKILRKELTVIGSWMNYSSPWPGQEWETASRLLTERKLSLEPLIAHRGSFESFAQAVRDIARNAMPGKVLLIP

SEQ ID NO: 5199 - protein, 124 aa, Glycine max
MALSKFLGFILLAAFFVSFTVAQSPAPAPSSGGRRISPAHSPKKAMSPAPAVSPTPQTALTPESSSSPPSPPSADSPSDLPAFSPSSISNSPAQAPAPVSGTVSNNYAVFGSVAFMLTAAVLAM

SEQ ID NO: 5200 - protein, 373 aa, Candida maltosa
MSVKTKTITILPGDHVGTEIVNEAIKVLEAIEAATPYQKIHFDFKHHLIGGAAIDATGVPLPDDALESAKNSDAVLLGAVGGPKWGTGALRPEQGLLKIRKELNLYANIRPCNFASDSLLELSPLRPEVVKGTNLIIVRELVGGIYFGDREEQEESADKQTAWDTEKYTVDEVTRITRMAAFMALQHTPPLPIWSLDKANVLASSRLWRRTVDKVISEEFPTLSVQHQLIDSAAMILIQNPTKLNGIIITSNMFGDIISDEASVIQGSLGLLPSASLASLPDTNTAFGLYEPCHGSAPDLPANKVNPIATILSAASMLRLSLDCVKEAEALEEAVKQVLDKGIRTADLRGTSSTTEVGDAIVEAVTKILKEKA

SEQ ID NO: 5201 - protein, 221 aa, Hemerocallis hybrid cultivar
MGRGKIEIKKIENSTNRQVTYSKRRSGIMKKAKELTVLCDADVSIIMFSSTGKFSEYCSPGTDTKTVFERYQQATQTNLWSTQYEKMQNTLNHLKEINHNLRKEIRQRIGEELDGMDFKELRGLEQNLDEALKSVRARKYHVITTQTDTYKKKVKNSQEAHKTLLHELDDAVYGYADEDPGNYDSSLALAHGGSNMYAYRVQPSQPNLHGMSYGPHDLRLA

SEQ ID NO: 5202 - protein, 594 aa, Glycine max
MAIATCDHDKNAKALQFIEDMTQNTESVQERVLAEILSQNSQTEYLKRFELNGATDRDTFKSKVPVVSYDDLKHDIHRIANGDRSPILCAHPISEFLTSSGTSAGERKLMPTIRQEMDRRQLIFSLPMPVMNQYVTDMDKGKALIFLFTKAEQKTPSGLVARPVSASMYKSDQFKNRPYDPYNVYTSPDEAILCPDSFQSMYTQMLCGLIMRHQVLRVGANFASGLLRSIHLLQLNWAQLSHDISTGTLNPKITDPAIKQRMTQILKPDPELAEFIVKECSGENWERIIPRIWPNTKYVEVVVTGAMAQYVPTLDYYSGGLPLASNIYGSSECFFGINLNPFCNPSDVSYTIMPNMGYFEFLPQDHDDDASSSSGSSFTLSRLIDLDDVELGKSYEIVVTTYSGLCRYRVGDILRVTGFHNTAPQFSFVRRKNVLLSIDSDKTDEAELQNAVEKASVLLKEFKTSVVEYTSFADTKSIPGHYVIYWELLMKDSSNAPTTEALEQCCLTMEESLNAVYRQGRVADHSIGPLEIRVVKNGTFEELMDYAISRGASISQYKVPRCVTFTPITELLDSRVESVHFSPSEPHWTPERRR

SEQ ID NO: 5203 - protein, 123 aa, Triticum aestivum
MAGVSRSMVAPLLVLNLVMYIVVIGLASWNLNHFINGTTNYAGVAGNGATFYFLLFAILAGVVGAASKLAGVHHVRTWRGDSLATSASSALVAWAITALAFGLACKEIHVGGHRGWRLRVLEV

SEQ ID NO: 5204 - protein, 159 aa, Microbulbifer degradans 2-40
MASIYDINIQSLQGQLIGFSDFKGKALLIVNTASKCGFTPQYEGLQQLHQQYASEGLVIIGCPCNQFGKQEPGDAKAISEGCLINYGVDFLITEKIHVNGANTHPLYRYLKTALPGFMGNNIKWNFTKFLIGKDGTPIKRFAPFTKPASMEGAVKKALG

SEQ ID NO: 5205 - protein, 63 aa, Cryptoperidiniopsoid sp. brodyi
MRGILADWLVEVHLKFKLVPETLYLTVNIIDRFLQIHKVSRPKLQLVGVTSLLIASKYEEIYP

SEQ ID NO: 5206 - protein, 194 aa, Saccharomyces cerevisiae
MVTSNVVLVSGEGERFTVDKKIAERSLLLKNYLNDMHDSNLQNNSDSESDSDSETNHKSKDNNNGDDDDEDDDEIVMPVPNVRSSVLQKVIEWAEHHRDSNFPDEDDDDSRKSAPVDSWDREFLKVDQEMLYEIILAANYLNIKPLLDAGCKVVAEMIRGRSPEEIRRTFNIVNDFTPEEEAAIRRENEWAEDR

SEQ ID NO: 5207 - protein, 161 aa, Oryza sativa (indica cultivar-group); identical to SEQ ID NO: 2167
  unsure (1)..(161): unsure at all Xaa locations

SEQ ID NO: 5208 - protein, 337 aa, Ferroplasma acidarmanus
MLKIGLIGKPNAGKSTLFSAITSIDVDIANYPFTTIKPNVGISFVKDKCPENEINAKCNPREGKCLDGIRYIPVEIIDVPGLIEGASEGKGMGNEFLDNIRDADLIINLFDASGMTDMEGNPSESGHDPLDDIKFVNNEIISWMNGKISKDWQKFARKEDNSPERLDVKILQKAATFGLSEKDVSFIMTKESFPDKLIHWTDNDINRFSEAILKYVKPVFSIGNKLDLLTDDSIKALKERENKMYLISAEYELLIEKAYNNGYISSDAIDFTFTDKSGEAQKTVLNRIKEKYRNGEIMRFYDVLTSIIKSLGYIVVYPVLDETNGRIKMAMCFLMLT

SEQ ID NO: 5209 - protein, 512 aa, Triticum aestivum
  unsure (1)..(512): unsure at all Xaa locations
MSAAAQETTAGGGGDGKRQGPCRPGHLKLGYHIVVSNAVYVLLAPFAAALALRASRLTPSDLAAARAYLLANLHLAVSLVSVATALATVYLARRPRAVYLLDFACYKPGPDHVVTRETFMKQSSKAGVFTDDNLAFQRKILERSGLGQGTYFPAAVLNSPPNPCMAEARREAEAVMFGAIDSLLAKTGVRARDIGVVVVNCSLFNPTPSLSAMVVNHYKLRGNVASYNLGGMGCSAGLISIDLAKQLLQVHRNSYALVVSMENITLNWYWGNDRSMLMSNCLFRMGGAAILLSNRAADKRRSKYQLVHTVRTHHGADDRAYRCVFQEEDKAGRVGVALSKDLMAVAGEALKTNITTLGPLVLPMSEQILFLTSLIGKKIFGLKMKPYIPDFKMAFEHFCIHAGGRAVLDTIEKNLELSDWHMEPSRMTLNXGNTSSSSLWYELAYTEAKGRVRRGHRAWQIAFGSGFKCNSAVWRALKDIHPSKEAGSNPWIEEIHRFPVEVPKVESVVSSP

SEQ ID NO: 5210 - protein, 180 aa, Aeropyrum pernix
MPRALIISADGFEDVELLYPYYRLVEAGFETLVAAPSRGEIKGKMGYKVEAKLSFEEVKPEEFDVLVIPGGRAPERVRLHEAALNIVRHFFEKNKPVATICHGPQVLISAGVVKGRRLTSYWGVKDDVIAAGGNWVDEPVVVDGNLVSSRYPPDIPYWMREFMRLLEARGLLAPTPVPKA

SEQ ID NO: 5211 - protein, 362 aa, Zea mays
MSCFACCGDEDTQVPDTRAQYPGHHPARADAYRPSDQPPKGPQPVKMQPIAVPAIPVDEIREVTKGFGDEALIGEGSFGRVYLGVLRNGRSAAVKKLDSNKQPDQEFLAQVSMVSRLKHENVVELLGYCADGTLRVLAYEFATMGSLHDMLHGRKGVKGAQPGPVLSWSQRVKIAVGAAKGLEYLHEKAQPHIIHRDIKSSNVLLFDDDVAKIADFDLSNQAPDMAARLHSTRVLGTFGYHAPEYAMTGQLSSKSDVYSFGVVLLELLTGRKPVDHTLPRGQQSLVTWATPRLSEDKVRQCVDSRLGGDYPPKAVAKFAAVAALCVQYEADFRPNMSIVVKALQPLLNAHARATNPGEHAGS

SEQ ID NO: 5212 - protein, 120 aa, Zea mays
  unsure (1)..(120): unsure at all Xaa locations
MSQKMLPRQAKMQGKGGGGKMNRKPGDXWDCRACQHLNFSRRDACQRCSEPRGVGDRSGGGGDLGGRGGSSFGGGFGAGSDVRPGDWYCSCGAHNFAQPRXNCFRCSAYXEEAAGAFDSD

SEQ ID NO: 5213 - protein, 370 aa, Zea mays
MSDGKDSLDLSALGAAIPNSAELSAEDKANLVASIKNTLEGLASRHTDVLENLEPKVRKRVEKLREIQGEHDELEAKFFEERAALEAKYQKLYEPLYSKRYEIVNGVVEIEGITKESAAETPEEQKSGDETSAEQKEEKGVPAFWLNAMKNHEILAEEIQERDEEALKYLKDIKWYRISEPKGFKLEFHFGTNMFFKNSVLTKTYHMIDEDEPILEKAIGTEIEWYPGKCLTQKVLKKKPRKGSKNTKPITKTEDCESFFNFFSPPQVPDDDEEIDEDTAEQLQNQMEQDYDIGSTIRDKIIPHAVSWFTGEAAQDEDFEVMDGEDDDDEDDDDEDDEDEDDDDYDTKKTKGTAGGEGQQGERPAECKQQ

SEQ ID NO: 5214 - protein, 473 aa, Antirrhinum majus
MGSRNIVQQQNRAEAAVPGAMKQKNIAGEKKNRRALGDIGNLVTVRGVDGKAKAIPQVSRPVTRSFCAQLLANAQTAAADNNKINAKGAIVVDGVLPDRRVAAARVPAQKKAAVVKPRPEEIIVISPDSVAEKKEKPIEKEKAAEKSAKKKAPTLTSTLTARSKAASGVKTKTKEQIVDIDAADVNNDLAVVEYVEDMYKFYKSVENESRPHDYMGSQPEINEKMRAILIDWLVQVHHKFELSPETLYLTINIVDRYLASETTIRRELQLVGIGAMLIASKYEEIWAPEVHELVCISDNTYSDKQILVMEKKILGALEWYLTVPTPYVFLVRFIKASMTDSDVENMVYFLAELGMMNYATLIYCPSMIAAASVYAARCTLNKAPFWNETLQLHTGFSEPQLMDCAKLLVAFPKMAGDQKLKSIYRKYSNLERGAVALLSPAKSVFVFLIELLMNAIEKIQCSLFFTSEIWCRF

SEQ ID NO: 5215 - protein, 329 aa, Zea mays
  unsure (1)..(329): unsure at all Xaa locations
LLWAIGYLEAGRCTVTVMPHMKRLTFDIISLLLFGLERSPLQDALAGDFARVMDGIWAVPVNLPFTAFSRSLRASARARRLIAGIARETRAKLERGEASRSSDLIACLLSLTDHSGARLLSEEEIVDNSMVALVAGHDTSSILMTFMVRHLANDPDTLAAMVQEHDEIAKNKGDGQTLDWEDLAKMKYTWRVALETLRLVPPIFGNFRRAMQDIEFDGYLIPKGWQVFWAASVTHMDTGIFHEPAKFDPSRFENQSAASAPACSFVAFGGGPRICVXMEFARIETLVTMHYLVRRFRWKLCCKNDTFARDPMPSPLHGLPIELEQKASP

SEQ ID NO: 5216 - protein, 577 aa, Saccharomyces kluyveri
MFTRGVNGANRDIDALADNIGQLSFDASDPNKFIFEPTTPSKYKENGSTTGTPSPTKSTLYDDNAGDVSKLSMMDIDERTQDEIDVTKSPKKLPLNFYAKASSSKTKRLVNVCQMYFLDYYCDMFDYVISRRERTRQVMKYLEQQRGQGIQPQQISNEWQGYLNKETNTLRKRRLKPKNKDFEMITQVGQGGYGQVYLARKKDTKEICALKILNKKLLVKLNETNHVLTERDILTTTRSDWLVKLLYAFQDPQSLYLAMEFVPGGDYRTLLINTRFLQAPHARFYISEMFCAVDALHQLGYTHRDLKPENFLIDSKGHIKLTDFGLAAGTVSMERIESMKLRLEEVKNLEFPEFKERSMDDRRRMYKKLRESDVNYASSTVGSPDYMALEVLEAKSYDFTVDYWSLGCIMFESLVGYTPFSGSSTNETYENLRRWKQVLRRPRCENGRYAFSDRTWDLITRLIADPVNRVRSFEHVKRMKYFAEIHFDSLRSMSPPFIPQLDSETDAGYFDDFSNEADMAKYADVFKRQDRLTAMMDDSSADSKLVGFTYRHRKGKNGSSGVLYGGAEHADPFATFY

SEQ ID NO: 5217 - protein, 355 aa, Zea mays
MVSAVLRTILVTGGAGYIGSHTVLQLLQQGFRVVVVDNLDNASEAALARVAELAGHDGANLVFHKVDLRDRHALVDIFSSHRFEAVIHFAGLKAVGESVHKPLLYYDNNLVGTITLLEVMAANGCKKLVFSSSATVYGWPKEVPCTEEFPLCATNPYGRTKLVIEDICRDVHRSDPDWKIILLRYFNPVGAHPSGYIGEDPCGVPNNLMPYVQQVAVGRLPHLTVYGTDYSTKDGTGVRDYIHVVDLADGHIAALRKLHEDSDKIGCEVYNLGTGKGTSVLEMVAAFEKASGKKIPLVFAGRRPGDAEIVYAATAKAEKELKWKAKYGIEEMCRDLWNWASKNPYGYAGSRDNSK

SEQ ID NO: 5218 - protein, 230 aa, Zea mays
PRVRFGKPRGFGTNDKGDDIGFNTEVYSASEIDRIARVAFEVARKRRGKLCSVDKANVLEASMLWRKKVTALASEFPDIELSHMYVDNAAMQLVRNPKQFDTIVTNNIFGDILSDEASMITGSIGMLPSASVGESGPGLFEPIHGSAPDIAGQDKANPLATILSAAMLLRYGLGEENAARRIEAAVTETLNHGFRTGDIYSPGTTLVGCKRMGEEVLKTVESLKEVAAVN

SEQ ID NO: 5219 - protein, 136 aa, Rosa hybrid cultivar
MMEVCRAQGFVYGIIPEKGKPVSGASDNLREWWKDKVRFDRNGPAAISKYQADNSIPGLMEDCISVASTPHTLQELQDTTLGSLLSALMQHCDPPQRRFPLEKGVSPPWWPTGNEEWWPQLNLANQGPPPYKKPHG

SEQ ID NO: 5220 - protein, 227 aa, Pyrococcus abyssi
MGFAEYYRAFPTYTDINSQEYRDRLENLEPLLMKYMKRRGKVLDLACGVGGFSFLLEDYGFEVVGLDISEEMISKAKMYAKEKSSNVEFIIGDAKKLPFEDNNFDYVIFIDSLVHFSPLELNQVFKEVKRVLKPTGKFIIYFTDMRELLPRLRESLVVGEKYWINKIIPDQEEKTVVIEFKSEENSFRVRFNVWGKTGVELLAKLYFNKEAQEKVGNYSYFIVYTPK

SEQ ID NO: 5221 - protein, 173 aa, Helicobacter pylori
MNLEKLEISHDANALCVVIEISKHSNIKYELDKESGALMVDRVLYGAQNYPANYGFVPNTLGSDGDPVDALVLSDVAFQAGSVVKARLVGVLNMEDESGIDEKLLALPIDKIDPTHSYVKDIDDLSKHTLDKIKHFFETYKDLEPNKWVKVKGFENKESAIKVLEKAIKAYQG

SEQ ID NO: 5222 - protein, 555 aa, Linum usitatissimum
MATSAYFLTLLNLLIIILASSTSTFVASTRTYSSLSASRCAILTSSCSNTRHPDLCFSSLASAPVHVSLNTQMDVIKASINVTCTSVLRNIAAVNKALSTRTDLTPRSRSALKDCVETMSTSLDELHVALAELDEYPNKKSITRHADDLKTLLSAATTNQETCLDGFSHDDSEKKVRKTLETGPVRVEKMCGNALGMIVNMTETDMASATNAVNTEGGSSGSWPIWMKGGDRRLLQAGTTVTPNVVVAADGSGKYRRVSEAVAAAPSKSSKRYVIRIKAGIYRENVEVPKDKTNIMFVGDGRSNTIITGNKNVVDGSTTFNSATVAVVGQGFLARDITFQNTAGPSKHQAVALRVGADLAAFYRCDFLAYQDTLYVHSNRQFFINCLVVGTVDFIFGNSAAVFQNCDIHARRPNPGQKNMLTAHGRTDPNQNTGIVIQKSRIAATSDLQSVKGSFGTYLGRPWKAYARTVIMQSTISDVVHPAGWHEWDGNFALNTLFYGEHKNSGAGSGVNGRVKWKGHKVISSDAEAAGFTPGRFIAGGSWLGSTTFPFTLGL

SEQ ID NO: 5223 - protein, 319 aa, Burkholderia fungorum
MALPAVLQKLALPVVASPMFIVSYPELVLAQCKAGIVGSFPALNARPAELLDEWLTQIQTQLAEHKAANPDAIIGPIAVNQIVHQSNTRLEHDVRVCVEHKVPIFITSLRAPAREIVDAVHSYGGIVLHDVINLRHAQKALEAGVDGLILVASGAGGHAGTTSPFALVGEVRRMFDGPIVLSGSIANGGSILAAQAMGADLAYMGTRFIATKEAHAVDSYKQAIVNSTASDIIYTNLFTGVHGNYIRESIVNAGLDPDALPESDKTKMNFGSDKAKAWKDIWGAGQGVGLMDDVPSVSELVQRLSKEYDDAKARLGIAR

SEQ ID NO: 5224 - protein, 368 aa, Tropheryma whipplei str. Twist
MQRVIIVGSTGSIGTQAIDFILKNRDSFLVVGLAASTQTSLLREQAQVLGTKNTAQGASEAAELIEATEADVVLNAITGAAGLLSTYATLKTGKRLALANKESLIMGGKYFLDMTTFKGQITPVDSEHSAIAQAMKSGKFSEVNKLILTASGGPFYDRESLEGITLKDALDHPTWNMGPMISINSATMFNKGLEIIEAHLLFGIPYSQIDVVIHPQSIVHSMVEYKDGSVIAQASVADMTLPIGYALSWPNRALNAVRPLEWGARQRWDFLPPTENSMRSINLARRAGEAGGVYPAVLNASNECAVEAFMAGKISFARIIHVTETVFNLYTKQHTNRESAKNPIEVILEEDARTRELAKTVIENMSAD

SEQ ID NO: 5225 - protein, 367 aa, Monascus purpureus
MAEPQIPTKQKAAIYDKPGTVSTKVVEIDVPEPGPGEVLVNLTHSGICHSDYGVMTNSWKLLPYPTQPGQIGGHEGVGKVVKFGPGANGTGLKIGDRVGIKWVSSACGNCHPCHAGADGICLNQKISGYYTPGTFQQYATGPANYVTPIPENLSSAEAAPLLCAGVTVYAALKRSKAQPGQWIVISGADGGLGHLAVQIASRGMGLRVIGIDHGSKAALVKESGAEHFVDITAFPKDDNGAAIAAHVKSLTTEKLGAHAVIVCTASNAAYAQAFLFLRFNGTLVCVGMPEHESQAIATAYPAAIVFNQATITGSAVGNRIEAIEVLDFAARGIIKSHVRMAKLEDLTDLFNEMAEGKLQGRVVLDLS

SEQ ID NO: 5226 - protein, 171 aa, Zea mays
  unsure (1)..(171): unsure at all Xaa locations
MAGIGRNMVAPLLVLNLIMYIIVIGFASWNLNHFINGQTNYPGVAGNGATFYFLVFAILAGVVGAASKLAGVHHVRAWRHDSLATNAASSLIAWAITALAFGLACKEIHIGGHRGWRLRVLEAFVIILAFTQLLYVLMLHTGLFGGSGGYRDHDYGVGXGAAGEPKGVTRV

SEQ ID NO: 5227 - protein, 376 aa, Glycine max
PYSSFGPPPIDFISIPKMNNPNGGICFLLFLFLFPFAAAQPATNQNQSYYNKFSPSMAIIIVILIAALFLMGFFSIYIRHCSDSPSASIRNLAAATGRSRRGTRGLEQAVIDTFPTLEYSAVKIHKLGKGTLECAVCLNEFEDTETLRLIPKCDHVFHPECIDEWLASHTTCPVCRANLVPQPGESVHGIPILNAPEDIEAQHEAQNDLVEPEQQQQDPKPPVPTEPQVLSLNQTLNRNRTRGSRSGRPRRFPRSHSTGHSLVLPGEDTERFTLRLPEEVRKQILQNPQLHRARSLVILPREGSSRRGYRTGEGSSRGRSSRRLDRGFKSDRWVFTMAPPFLVRASSIRSPRVANNGGEGTSAAASLPPPPAVESV

SEQ ID NO: 5228 - protein, 339 aa, Schizosaccharomyces pombe
VFVDEIVNYLKTINIPDDVTEWYKNSLFHNTLGGKYNRGLSVIDSYEILLGHPLDEAAYMKAAVLGWMVELLQSFFLIADDIMDASKTRRGQPCWYLMPGVGNIAINDAFMVESAIYFLLKKHFRQESCYVDLIELFHDVTFQTELGQQLDLLTAPEDSVDLSKFSLQKHSFIVIYKTAFYSFYLPVELAMHLAGVATPENLKCAQDILIILGKYFQVQDDYLDCYGDPTVTGKIGTDILDNKCSWIINLALAKCTPEQRVILDDNYGRKDSESEKRVKAVFEELNIRGEFENYEESEVSEIKKLIDGVDESTGLRKSIFTTFLGKIYKRISKFLVLCF

SEQ ID NO: 5229 - protein, 60 aa, Gossypium hirsutum
MSRPGDWNCRSCQHLNFQRRDSCQRCGEFRSGDHFGSYGGGRGGSSFGFATGSDVRPGDW

SEQ ID NO: 5230 - protein, 93 aa, Glycine max
  unsure (1)..(93): unsure at all Xaa locations
SFQWPQKRPKWDCLIKWSINNADGTCPAHGLKSEAPRWCMDSMQSHATDAAXRLIESTLGRRTPXPDLRDHGFFCAHIDNLYAEAQDHAETMD

SEQ ID NO: 5231 - protein, 395 aa, Prochlorococcus marinus subsp. marinus str. CCMP1375
MLDTYKRLPLKIVKGNGCWLWDETGKKYLDAVAGIATCSLGHSDKKLSKVLSQQLRKIQHVSNLYRIPEQEDLAQWLVNQSCADSVFFCNSGAEANEAAIKLARKYGQIKRGIKRPIILSAKSSFHGRTLAALSATGQTKYQKGFEPLVEGFEFFSFNDSNSVQDLYENLEKDEPRVAAILIEPIQGEGGLNLGDQKFFYFLRDYCNKNNILLLFDEVQSGMGRTGKLWGYEHFNVEPDAFTLAKGLGGGHSIGALLVKENASIFEPGDHASTFGGNPFACKAGLTVAKEIQNRNLLENTYCRGNQLREGLQKLINNYPHHLEEVRGIGLMLGLAIKKNSNLTSQKIVELAIKEGLLVIGAGEKVIRMLPPLIITKREIETLLTRLNACFRKLNN

SEQ ID NO: 5232 - protein, 186 aa, Bradyrhizobium japonicum USDA 110
MDLTGKKIAILATNGFEQAELEVPQERLKQAGATVDVVSLAAGEIKGWDQKDWGRPVKVDKTLDEASAADYDAIVLPGGQINPDLLRVEPKALKFIKDIFDAKKVVAAVCHAPWLLIETGIARGRKMTSFRSIKTDVANAGAKWEDAEVVVDQGVITSRNPGDLDAFCAKIVEEVKEGRHTQRSGA

SEQ ID NO: 5233 - protein, 214 aa, Paeonia cambessedesii
  unsure (1)..(214): unsure at all Xaa locations
IVESVGEGVTDLKPGDHVLPVFTGECKECRHCKSEESNMCDLLRINTDRGVMLNDGKSRFSINGQPIFHFVGTSTFSEYTVVHVGCVAKINPEAPLDKVCVLSCGISTGLGATLNVAKPKKGSSVAIFGLGAVGLAAAEGARIAGXSRIXGVDLNPKRFEEAKKFGVTEFVNPKDYNKPVQEVIAEMTGGGVDRSVECTGSIMAMISAFECVHD

SEQ ID NO: 5234 - protein, 380 aa, Lotus corniculatus
MSSTAGQVIKCRAAVSWEAGKPLVIEEVEVAPPQAGEVRLKILYTSLCHTDVYFWEAKGQTPLFPRIFGHEAGGIVESVGEGVTHLKPGDHALPVFTGECGECPHCKSEESNMCDLLRINTDRGVMISDNQSRFSIKGKPIYHFVGTSTFSEYTVLHAGCVAKINPAAPLDKVCILSCGICTGFGATVNVAKPKPGSSVAIFGLGAVGLAAAEGARVSGASRIIGVDLVSSRFEGAKKFGVNEFVNPKDHDKPVQEVIAEMTNGGVDRAVECTGSIQAMISAFECVHDGWGVAVLVGVPNKDDAFKTHPVNFLNERTLKGTFYGNYKPRTDLPNVVEMYMRGELELEKFITHTVSFSEINKAFDYMLKGESIRCIIRMEE

SEQ ID NO: 5235 - protein, 85 aa, Triticum aestivum
EVDTLNGRTLTWLNPRGHIFTRESCFHLSGDPTRKLNPTHYRHPTFYTKVFNECHSYDQDGNSFELSLVTSKCIGPYLTSTKIPN

SEQ ID NO: 5236 - protein, 461 aa, Escherichia coli CFT073
MADNKPELQRGLEARHIELIALGGTIGVGLFMGAASTLKWAGPSVLLAYIIAGLFVFFIMRSMGEMLFLEPVTGSFAVYAHRYMSPFFGYLTAWSYWFMWMAVGISEITAIGVYVQFWFPEMAQWIPALIAVALVALANLAAVRLYGEIEFWFAMIKVTTIIVMIVIGLGVIFFGFGNGGQSIGFSNLTEHGGFFAGGWKGFLTALCIVVASYQGVELIGITAGEAKNPQVTLRSAVGKVLWRILIFYVGAIFVIVTIFPWNEIGSNGSPFVLTFAKIGITAAAGIINFVVLTAALSGCNSGMYSCGRMLYALAKNRQLPAAMAKVSRHGVPVAGVAVSIAILLIGSCLNYIIPNPQRVFVYVYSASVLPGMVPWFVILISQLRFRRAHKAAIASHPFRSILFPWANYVTMAFLICVLIGMYFNEDTRMSLFVGIIFMLVVTAIYKVFGLNRHGKAHKLEE

SEQ ID NO: 5237 - protein, 451 aa, Enterococcus faecium
MELKEDLGVKSKSTELKRKLGLGTVIALGVGTTVGSGIFSSLSEVAGAAGSSLILVLSFLIGGLVQIPANLCYAELASAYPEDGGGYIYFREAGSKPLAFLGGWISFWATDPPSISIMALAIANYLGFFIPISGLSLKLVSVLFVLVFMYLHIRTVEGGGTFQNIITVLKILPFILIIGIGLFNLNGELLLSSTPLQGASTGFMALIAGISATTWSFDGMSAPVYMSGEIKNPKKNIPKGLIFTTFIVLAIYVGLTFVASGILSVDELASSDAPIALLASKIPVIGSFAGTFVAVTAVIVIIGSLSSCIMFQPRIEYAMAKDGLFFKSFGKVHPKYETPYFSIMIQCFYAIVLIFATDISGLLGYFTLVALLKSFLTFGTIFILRRKKSGYDPSYKTPFGYLMPVVAMFMNGTLIYSTFLWAPVGGLIAAVVAVATGLPAFYFWNKRNSVG

SEQ ID NO: 5238 - protein, 247 aa, Gossypium hirsutum
MMMSSNNMECSAKAREEEEITKISLMRSLVETQDPSSKEVDDMTIRRFLRARELDVEKASSMFLKYLKWRRSFVPNGFISPSELTHEIQQNKMFLQGSDNKGRPISVLLAARHFQHNGGLDEFKRFILYIFDKILARMPPGQDKFIVIGDLDGWGYANCDIRAYLAALSLLQDYYPERLGKMFIVHAPYVFMAAWKIVHPFIDVKTRKKIVFVENKSLKSTLLEEIDESQLPEMYGGTLPLIPIQDS

SEQ ID NO: 5239 - protein, 231 aa, Triticum aestivum
MAGASSWSSSCSCTSSLGSLDDDDVFCVVKPGSPGAAAEGSVKFLCSYGGMILPRHPDGALRYVGGNNRVLSVDRSLQFHELQRKLTDMCGWEALSLRCQLPTEDLDALVSVTTNDDLGHLLEEYDAASRDRLQPLKIRAFLFPRAKTPPLSPSTPSSRPTAGVRPPPPPAPHGSPPFGSWAFGPPAPTPAPAPPQRQSVAITAGLAAACWCISLAVVRSSMGRCAAVTDL

SEQ ID NO: 5240 - protein, 469 aa, Bacillus subtilis
MNQSQSGLKKELKTRHMTMISIAGVIGAGLFVGSGSVIHSTGPGAVVSYALAGLLVIFIMRMLGEMSAVNPTSGSFSQYAHDAIGPWAGFTIGWLYWFFWVIVIAIEAIAGAGIIQYWFHDIPLWLTSLILTIVLTLTNVYSVKSFGEFEYWFSLIKVVTIIAFLIVGFAFIFGFAPGSEPVGFSNLTGKGGFFPEGISSVLLGIVVVIFSFMGTEIVAIAAGETSNPIESVTKATRSVVWRIIVFYVGSIAIVVALLPWNSANILESPFVAVLEHIGVPAAAQIMNFIVLTAVLSCLNSGLYTTSRMLYSLAERNEAPRRFMKLSKKGVPVQAIVAGTFFSYIAVVMNYFSPDTVFLFLVNSSGAIALLVYLVIAVSQLKMRKKLEKTNPEALKIKMWLFPFLTYLTIIAICGILVSMAFIDSMRDELLLTGVITGIVLISYLVFRKRKVSEKAAANPVTQQQPDILP

SEQ ID NO: 5241 - protein, 880 aa, Saccharomycopsis fibuligera
MLLILELLVLIIGLGVALPVQTHNLTDNQGFDEESSQWISPHYYPTPQGGRLQGVWQDAYTKAKALVSQMTIVEKVNLTTGTGWQLGPCVGNTGSVPRFGIPNLCLQDGPLGVRLTDFSTGYPSGMATGATFNKDLFLQRGQALGHEFNSKGVHIALGPAVGPLGVKARGGRNFEAFGSDPYLQGIAAAATIKGLQENNVMACVKHFIGNEQDIYRQPSNSKVDPEYDPATKESISANIPDRAMHELYLWPFADSIRAGVGSVMCSYNRVNNTYSCENSYMINHLLKEELGFQGFVVSDWAAQMSGAYSAISGLDMSMPGELLGGWNTGKSYWGQNLTKAVYNETVPIERLDDMATRILAALYATNSFPTKDRLPNFSSFTTKEYGNEFFVDKTSPVVKVNHFVDPSNDFTEDTALKVAEESIVLLKNEKNTLPISPNKVRKLLLSGIAAGPDPKGYECSDQSCVDGALFEGWGSGSVGYPKYQVTPFEEISANARKNKMQFDYIRESFDLTQVSTVASDAHMSIVVVSAVSGEGYLIIDGNRGDKNNVTLWHNSDNLIKAVAENCANTVVVITSTGQVDVESFADHPNVTAIVWAGPLGDRSGTAIANILFGNANPSGHLPFTVAKSNDDYIPIVTYNPPNGEPEDNTLAEHDLLVDYRYFEEKNIEPRYAFGYGLSYNEYKVSNAKVSAAKKVDEELPQPKLYLAEYSYNKTEEINNPEDAFFPSNARRIQEFLYPYLDSNVTLKDGNYEYPDGYSTEQRTTPIQPGGGLGGNDALWEVAYKVEVDVQNLGNSTDKFVPQLYLKHPEDGKFETPVQLRGFEKVELSPGEKKTVEFELLRRDLSVWDTTRQSWIVESGTYEALIGVAVNDIKTSVLFTI

SEQ ID NO: 5242 - protein, 160 aa, Bacillus anthracis str. A2012
MTVYDFSAKTITGEEKSLKDYEGKVLLIVNVASKCGFTPQYKGLQEVYDKYKEQGLEILGFPCNQFGGQEPGTEADITSFCELNYGVNFPMFAKIDVKGDKAHPLYTYMTEQAPGLLGMKAVKWNFTKFLIGKDGKVVGRFAPQTKPVDLEVEIEKVLGE

SEQ ID NO: 5243 - protein, 1126 aa, Ceratodon purpureus
  unsure (1)..(1126): unsure at all Xaa locations
MASAKMAYSSGSGIKSKHSVRVAQTTSDAKLQAVYEESNDSGDSFDYSKSVAQAAKSTGQQQVPAQAVTAYLQRMQRGGLTQTFGCMLAVEENTFRVIAYSENAPELLDVMPQAVPSLGQQDVLGIGTDARSLFTPSSATALERAAGAADLSLVNPISVHSRASGKPFYAIIHRIDVGIVMGFEPVRPNDVIVSTAGTLHSHKLAAKAIARLQALSGGDIGLLCDTVVEEVRELTGYDRVMAYKFHEDEHGEVLAEIRRSDLEPYLGLHYPSTDIPQASRFLFMKNRVRMIVDCWAPPVKVIQDKDLRQPISLAGSTLRAPHGCHAQYMGNMGSVASVTMAVIXNDQEDDFGGQQTRARRLWGLVVCHHTSARTISFPLRSACEFLMQVFGLQLNMEVELENQKREKHILRTQTMLCDMLLRDAPVGIVSQCPNIMDLVKCDGAALYYGKRFWLLGITPSEEQIEEIANWLLEHHQDSTGLSTDSLADAGYPGANLLGDAVCGMAAARITPTDFLFWFRSHTAKEIKRGGAKHEADDKDDGRKMTPRSSFNAFLEVMKRRSVPWEDIEMDAIHSLQLILRGSFQDIDDSDTKTMIHARLNDLKLQGMDELSTVANEMVRLIETATAPILAVDSNGFINGWNAKVAELTGLPVGDAMGRSLVQDLIVDESVEVVERLLYLALQGDEEQDVEIQLRTFGPQKGKGAVILIVNACSSRDVQDNVVGVCFVGQDVTSQKQVHDKFTRIHGDYKSIVQNPNPLIPPIFGSDELGYCTEWSPSMEKLTGWKRDEVLGKMLVGEVFGTQQICCRLKGQDSVTKFMIVLNNAMDGQDTDKYPFSFYDRQGKFVEALLTANKRTDADGYITGVFCFLHIASPELLQALTVQRATEKVAFAKLKELAYIRQEIKNPLYGIMFTRNLMEDTDLSDEQKQFMDTSAVCERQLRKILDDMDLESIEDGYLELETAESELGSMMDAVVSQGMITSREKGLQLIRETPREINDMSLFGDQVRLQHVLADFLLNAVRLTPSSEGWVGIKVVPTKKRLGGGFHVVHLEFRVAHPGSGLPEELVHEMFDRGRGMTQEGLGLSMCRKLVKLMNGEVKYIRDTGKSYFLVNLELPLTVRDESGMLR

SEQ ID NO: 5244 - protein, 157 aa, Chloroflexus aurantiacus
MNIYQFTVRTIDGEQQSLAVYRNKVLLIVNVASHCGLTPQYGDLESLYRRYKDRGFVVLGFPSNQFNQEPDDEATIKSFCARTYAVTFPLFAKVEVNGPNTHPLFAYLKAQQPGLSPDGEIKWNFTKFLVNRNGTVVRRYAPTDTVGAIERELVELL

SEQ ID NO: 5245 - protein, 583 aa, Schizosaccharomyces pombe
MSSPDRSIDIDLEKYPSTATKSVYGQSKDDKNVFDIHPTESEVIPGEVEYADTPSHQNFLQKFFSDFKPVKADREDGVALKRHLKGRHMQMIAIGGAIGTGLFVGSGSSLADGGPASVIIDYTLIGIMMFFTVYALGELAVSYPVAGGFYNYAVRFIDPAWGFAVGWNYFMNYFVTFPLELTTCAITFRYWTDINSCAWITIFLVFVICINLFGVRGYGEVEFILSTLKVVATTGFIILAIIINCGGVPTDPRGYIGGKIIKNKPFRHSFKGFCSVFTTAGFSFSGTEVVGLAAAEAEDPQKSLPRATKQVFWRIAIFYVVSLILIGLLVSPDDPRLMGNSSDGSTSPFVLAIKEANIRGLPSVFNAVIIISTVSVANSCTFTASRTLHAMAAKGDAPRFFAYTDRLGRPLLAMAVCLLFGFFAYINAAGDVSDTVFDWLLAISGISNFFSWGSINLCHIVFRLAMKKQGRSLDQLGFVSPMGIWGSAIGLAFNILCLMAEFYVSLFPIGSKPNANDFFQGYLAAPIVIAFFIGYKIYDRSHIPSLSKLDLDTGLRTYPPKDKESEKIRDAKGFFKWIWQSLC

SEQ ID NO: 5246 - protein, 1490 aa, Neurospora crassa
MNGQIKWKENGNGIGTCECRSKRNTPFVIECQCPDDRGNKRISSVNLNEQLRYENGTFKCFGASGKTEDVSYRLPGTSGQGGDIFGIVVRVVVSRKTVRHGSLWLGKAVVRLYPSRTLDEDSLSEPDYVLDYIGWHFSRPLGIIFECDSSPGRSASSTAMAPNPPYMSSLFEPTSAPPEPGHPQFQQSQPQHPGISQQQQQQQAAQPQQSQPRQKQPRKPRQPRKQTQQQQQQQQQQQQQQQQQQQQQQQQQVQQQQQQQQQQVAAQQQPLVSIDAQRFAQLQAEVGQLHQLVQGIIHRLDAYGVPSLPGGHHAPLLLPQQHAPVSAAATSTLVATSANAGTNNINFNALLTAGQSHDGGGSGGGVGGGESSVSGLVNGDHGHHHDDGSAANVGITHHQDAGGGGGGMDHDVDDDDDDEESRQLQLLSANLVGDQSLPSVSWGVGDNNNNGGSGPGAAGAAGFDMAYPPQGHIFHIQLSTSAGGKNYVGGGPNGASVVVNNWTRQHGYRVITRRSKIKNDRYHLTMSCALSGNKYRPVPGPTQEQIEEARRNGQRKPYQRRIGTDKCNCPFRAEDVVFAKPLKGVGFVGPAGKELTRSVAVANQQTNPPSPTVEIAEDVDGGTTQRRVSSHDPEKIQSSAGTTHKFSEQIPHEMLEELAPNGESDYICEKVDNMSEDEAIAIVQESVRFHADDWNFPSEMRERMKRLLEGPKAYGEFYDRDLRIDATLMRYSSPYPGVCAVQELKDDPTVPIETIRAYFLGVAWAVIGTFMSTFFNSRFPSIGLSGSVIQILLFPCAKFLEWVLPDWGITVWGVRHSLNPGPWTFKEQMFSTICYNIAIYTTNSYGMILVQRLDGYYGLKFVNFGYQLMLTLFVQLMGMGFAGYLRRFSVYPVKALWPTILPTIAMNRALTRPEPKENIYGWTISRYRFFYICTLTMAIYYWFPGYLFTALSTFNWMTWIAPDSVVLSLLTGSITGLGLFNPITTFDWNVATSSYAALSQPFFATCTMYFGGILGGLIILGIYYKNMNYTAFLPINSSSAFANDGTPYQVQKVVVNNQLDQTKYQNYSPPFYSAGYILTVGANFCFYPVYFFYIMVNQWKTIGQAYVDFYHGLRYGKGNYENAMDIHSRLMAQYPEVPDWWFLIILVGAIVVSVLFLKIYPLDTPIWLVFLVIGINLVFAVPLSFLSATTGTNLGLGALIQVITGFLLPGNTNAFLFAQTLGSWALAGYGDNMVQDLKMGHYVRIPPRAVFRSQIGTIIITVFVAVGTQDFIMTNVKGLCTPNQPSRFTCANDGNPLYASSLMWGLLGSDRMFNSLYPLFKWCFLIGTCIALVFLFGQTYGPRYLPGVKDQLRQRLSRRMFSLLDRTLFPFVASLLWLNPILVIQGVQHWAPSNMSYKTPGFILSYVFMYWMPKHRLAWWEKYNYVLSAALTAGVAVSGLIIFFAVGYNPKKLEWWGNTVSGAGVDGRGTGVLEIPKDRGYFGPEKGTFP

SEQ ID NO: 5247 - protein, 580 aa, Oryza sativa
  unsure (1)..(580): unsure at all Xaa locations
MSENRFYQYNLMEDHFQSAPWNVLIRFLYLQQTNAYNTSPRSDFDSGRHPFMPVPGEPSPGAFPARSYVEVGHRMIMDSRCSRHDSIPKLDGVSITMDPPTPSMKLQLQLQFQLQLHQLKARSSVAGFPHSHRASSCRRPWPPYGSRGSKLQRHRDRRNPPRRQSSHSQSPSTRLKIRHADVQKCRSSLTSSPIENNVKLAYKFFKEISNTVFLKTNKLTDMYFQKRTNLKLTYTQMAYQSTDVESSINSVRVAMALKVVSFPGDLAAVSFLDSNRGGAFNQLKVDLPFQTRDRRAVSLRRTCCSMQQAPPPAWPGRAVVEPGRRSWDGPKPISIVGSTGSIGTQTLDIVAENPDKFRVVALAAGSNVTLLADQVKTFKPKLVAVRNESLVDELKEALADCDWKPEIIPGEQGVIEPTVAAIEAGKDIALANKETLIAGGPFVLPLAQKHKVKILPADSEHSAIFQCIQGLPEGALRRIILTASGGAFRDWPVDKLKEVKVADALKHPNWNMGKKITVDSATLFNKGLEVIEAHYLFGAEYDDIEIVIHPQSIIHSMIETQDRAGHLQGGGADMRRSSEX

SEQ ID NO: 5248 - protein, 319 aa, Triticum aestivum
MMESQPLQAPTAEPHGAGAADDQAGAGAPPAVVPGKEFTRTCKGLVVVLIGGYVLLQLLPSSLNYLAIIPAKTIPFVWTVFTAGYIEQVLPGAIGSSLGLLFCGKDIEPVWGRKEFLKFIILINSICGILAFCIAVALYYVTGKESFLVTPLSGFHGALAGFLVGLKQLLPNLELPMCFFWKIKAKWMPFFVMCFSTIMAFIVPDSINFLPTLLSGMYVSWLYLRYFQKNPLTGLKGDPSDDFSFPSLFPDAMRPVTDPVANLFDRMLCARSKPSEIALPVTDPTKASRRRERGERVLEERMAADHAADAEAPAHSAED

SEQ ID NO: 5249 - protein, 173 aa, Thermoplasma volcanium
MIYEFEGRVPDIDPSAYVSESATVIGKVKIGKEVWIGPGAVLRGDYGEIEVGDYSAIEDNCVIHARPGEKTFIGQHVTIGHLSVIHTGRIRDWAVIGMGSTVSDFAVVGVWAAIGEGAVVKNRQEIPDESIAVGVPAKVIGKIDEDYKKLWTDYKHNYNTFSSRYKTNLKKMK

SEQ ID NO: 5250 - protein, 315 aa, Leptospira interrogans serovar lai str. 56601
MLQHIEIGRILKMKLNTRITKMLGIDLPIIGAPMFLVSYPDLVVAVSEAGGIGCFPSLNYRSPEQLKDGLQEIRSKTKKPIGVNLILHKSHNPNWSKQLQVVLDAKVELLITSLGSPRTVVNEAKSVGAKVFCDVTTLKHANIVAKAGADALIAVAQGAGGHAGNISPFSLYPYLKKETGLPIVAAGAISSGAQMLAAFSLDADAVYVGTRLIATPEAQASEEYKKMLIDSGPEEIVYTEKISGIPANWLKKSVEKAGDLSHSGQSQNLDQEYKRWRDIWSAGHGVAQIQGLIPAREVVLGMAKEYSDILNRLPR

SEQ ID NO: 5251 - protein, 121 aa, Oryza sativa
  unsure (1)..(121): unsure at all Xaa locations
XVDPRAAGGTLRYFXQRRLETGLKGDPSEEFSFSSFFPEFLRPVLDPIASIFHRLLCGRSEXXADARGQTLDTTPLPGSDSIEANRRRERGQRALEQRLXXEKLAAVKSSEGTSQDASDKV

SEQ ID NO: 5252 - protein, 267 aa, Glycine max
  unsure (1)..(267): unsure at all Xaa locations
MLELRLVQGSLLKKVLESIKELVNDANFDCSSTGFSLQAMDSSHVALVALLLRSEGFEHYRCDRNTSMGMNLNNMAKMLKCAGNDDIITIKADDGSDTVTFMFESPTQDKISDFEMKLMDIDSEHLGIPEAEYHAIVKMPSSEFXARICQDLSSIGDTVAFSITKEGVKFSPEGDIGTPNIXCRQDIFVGRPEEVTVIEMNELVSLIFALRYMNFFTKAAPLSNTVPISLSNDLPVVVEYKIAEMGYVRFYLAPKIKEDEEDTNPQV

SEQ ID NO: 5253 - protein, 368 aa, Mycobacterium tuberculosis H37Rv
MKTTAAVLFEAGKPFELMELDLDGPGPGEVLVKYTAAGLCHSDLHLTDGDLPPRFPIVGGHEGSGVIEEVGAGVTRVKPGDHVVCSFIPNCGTCRYCCTGRQNLCDMGATILEGCMPDGSFRFHSQGTDFGAMCMLGTFAERATVSQHSVVKVDDWLPLETAVLVGCGVPSGWGTAVNAGNLRAGDTAVIYGVGGLGINAVQGATAAGCKYVVVVDPVAFKRETALKFGATHAFADAASAAAKVDELTWGQGADAALILVGTVDDEVVSAATAVIGKGGTVVITGLADPAKLTVHVSGTDLTLHEKTIKGSLFGSCNPQYDIVRLLRLYDAGQLMLDELVTTTYNLEQVNQGYQDLRDGKNIRGVIVH

SEQ ID NO: 5254 - protein, 706 aa, Cryptococcus neoformans var. grubii
MGKGKNHDRKANPGFGKVKSKSGTSTGEFTLKRVKGENFYRDAKSASRVKMLNGGKAVRDRDGKIVEAAAFQKGEKEAEPGRVKPDRRWFGNTRVISQSALDHFRTALKEQKADPYSVLLKRNKLPMGFGSCSKQRPHIVETEPFGNTFGPKAQRKRPRLDIGKGNGTADLADIYHPTTSTAREPIYAKGTSRRIWGELYKVLDSSDVVIHVLDARDPLGTRCKPVVEYLRKEKAHKHLVYVLNKVDLVPTWVTSGPYAYPYANGPHFGARWVKHLSLSAPTIAFHASINNSFGKGSLIQLLRQFSVLHSDKKQISVGFIGYPNTGKSSIINTLKKKKVCTVAPIPGETKVWQYITLMRRIYLIDCPGIVPVSAKDSDTDTVLKGVVRVENLATPAEHIPALLERVRPEYLERTYGLEHVEGGWHGEEGATFVLTAIAKKSGKLLKGGEPDQEAAAKMVLNDWIRGKVPFFVAPPTKPESGADAHVSSATTEKVQEQEQKELAEEKETKEMLEEQERSLGKVLGIKRVKGVEQPISKIVTMTKFLGDDARRYVEEEEVDVDDVDKEMAEEDEDEDEDDDDDVEESGEDQEEEELAWDDVFPEEAAGVDAADGEEVEEDDEEEEGDEDDEDVPSAKQLGKRKAIDSDEEEQTAIKAKRMTTNKQKASNFYTHANVKNRNRDRKVPKNPGKRSRGDDEPTGKKAKKRR

SEQ ID NO: 5255 - protein, 376 aa, Heteropogon contortus
ALSIAGAVQSQKLAVRAISRLQALPGGDVKLLCDTVVEHVRELTGYDRVMVYRFHEDEHGEVVAESRRDNLEPYLGLHYPATDIPQASRFLFRQNRVRMIADCHATPVRVIQDPGLSQPLCLVGSTLRAPHGCHAQYMANMGSIASLVMAVIISSGGEGEQTARGGISSAMKLWGLVVCHHTSPRCIPFPLRYACEFLMQAFGLQLNMELQLAHQLSEKHILRTQTLLCDMLLRDSPTGIVTQSPSIMDLVKCDGAALYYHGKYYPLGVTPTEAQIKDIIEWLTVCHGDSTGLSTDSLADAGYLGAVALGDAVCGMAVAYITPSDYLFWFRSHTAKEIKWGGAKHHPEDKDDGQRMHPRSSFKAFLEVVKSRSLPW

SEQ ID NO: 5256 - protein, 266 aa, Gossypium robinsonii
  unsure (1)..(266): unsure at all Xaa locations
LSIEEVEVAPPQKDEVRIKILFTSLCHTDVYFWDAKGQNPLFPRILGHEAGGIVESVXKGVTDLKPGDHVLPIFTGECKECPHCLSEESNMCDLLRINTDRVGMINDGKSRFSINGKPIYHFLGTSTFSEYTVVHVGQVAKINPHAPLDKVCVLSCGMSTGFGATVNVAKPKKGQSVAIFGLGAVGLAAAEGARVSGASRIIGIDLNPSRFEQAKKFGVTEFVNPKDYNKPVQEVIVEMTGGGVDRSVECTGSIQAMISAFECVHD

SEQ ID NO: 5257 - protein, 386 aa, Glycine max
MTPNDSSLAVFVLHSLHSFAMSDLGSDLPAAAAALSAEDRAGLVNALKDKLQLLAGQHVDILETLPPKVRQRVEILRDLQSQHDEVEAKFLEERSKLEAKYQKLYEPLYTKRYEIVNGVVEVEGVTNVAVPEEANKAAEDKGVPEFWLTAMKTNEALAEEITERDEGSLKYLKDIKWCRIDDPKGFKLDFYFDSNPYFKNSVLTKTYHMIEDDDPILEKAIGTEIEWHPGKCLTQKILKKKPSKGSKNAKPITKTEKCESFFNFFNPPQVPEDDDDIDDDAVEELENLMEHDYDIGSTIRDKIIPHAVSWFTGEAAQSDFEDIDEDDYEDEEGDDDDDEDEDEDEDEEDEEEKKGKSKSKSKLQSGGRAIPGKDQPMERPPECKQQ

SEQ ID NO: 5258 - protein, 395 aa, Peridictyon sanctum
EPARTEDPALSIAGAVQSQKLAVRAISRLQALPGGDVKLLCDTVVEHVRELTGYDRVMVYKFHDDEHGEVLAESRRVDLEPYLGLHYPATDIPQASRFLFRQNRVRMIADCHAAPVRVIQDPAMPQPLCLVGSTLRSPHGCHAQYMANMGSIASLVMAVIISSGGEDEHNMTRGVIPSAMKLWGLVVCHHTSPRCIPFPLRYACEFLMQAFGLQLSMELQLAHQLSEKHILRTQTLLCDMLLRDSPTGIVTQSPSIMDLVKCDGAALFYHGKYYPLGVVTPTEAQIKDIIEWLTVCHGDSTGLSTDSLADAGYPGATALGDAVCGMAVAYITPSDYLFWFRSHTAKEIKWGGAKHHPEDKDDGQRMHPRSSFKAFLEVVKSRSLPWENAEMDAIE

SEQ ID NO: 5259 - protein, 149 aa, Candida albicans
MAEKLSEQQIAEFKEAFSLFDKDSDGKITTKELGTVMRSLGQNPSESELTDMINEVDVNSDGSIDFPEFLTMMARKMKDTDSEAEIAEAFKVFDRNGDGKISAAELRHLLTSIGEKLSDADVDQMIKEADTNNDGEIDIQEFTSLLAAK

SEQ ID NO: 5260 - protein, 751 aa, Geobacillus stearothermophilus
MENQNRQNAAQCPFHGSVTNQSSNRTTNKDWWPNQLNLSILHQHDRKTNPHDEEFNYAEEFQKLDYWALKEDLRKLMTESQDWWPADYGHYGPLFIRMAWHSAGTYRTGDGRGGASTGTQRFAPLNSWPNNANLDKARRLLWPIKKKYGNKISWADLFILAGNVAIESMGGKTIGFGGGRVDVWHPEEDVYWGSEKEWLASERYSGDRELENPLAAVQMGLTYVNPEGPDGKPDPKAAARDIRETFRRMGMNDEETVALIAGGHTFGKAHGAGPATHVGPEPEAAPIEAQGLGWISSYGKGKGSDTITSGIEGAWTPTPTQWDTSYFDMLFGYDWWLTKSPAGAWQWMAVDPDEKDLAPDAEDPSKKVPTMMMTTDLALRFDPEYEKIARRFHQNPEEFAEAFARAWFKLTHRDMGPKTRYLGPEVPKEDFIWQDPIPEVDYELTEAEIEEIKAKILNSGLTVSELVKTAWASASTFRNSDKRGGANGARIRLAPQKDWEVNEPERLAKVLSVYEDIQRELPKKVSIADLIVLGGSAAVEKAARDAGFDVKVPFFPGRGDATQEQTDVESFAVLEPFADGFRNYQKQEYSVPPEELLVDKAQLLGLTAPEMTVLVGGLRVLGANYRDLPHGVFTDRIGVLTNDFFVNLLDMNYEWVPTDSGIYEIRDRKTGEVRWTATRVDLIFGSNSILRSYAEFYAQDDNQEKFVRDFINAWVKVMNADRFDLVKKARESVTALQTGFYHRSSTKVSLQ

SEQ ID NO: 5261 - protein, 581 aa, Zea mays subsp. mays
MKREYQDAGGSGGDMGSSKDKMMAAAAGAGEQEEEDVDELLAALGYKVRSSDMADVAQKLEQLEMAMGMGGVGGAGATADDGFVSHLATDTVHYNPSDLSSWVESMLSELNAPPAPLPPATPAPRLASTSSTVTSGAAAGAGYFDLPPAVDSSSSTYALKPIPSPVAAPSADPSTDSAREPKRMRTGGGSTSSSSSSSSSMDGGRTRSSVVEAAPPATQASAAANGPAVPVVVVDTQEAGIRLVHALLACAEAVQQENFSAAEALVKQIPMLASSQGGAMRKVAAYFGEALARRVYRFRPPPDSSLLDAAFADLLHAHFYESCPYLKFAHFTANQAILEAFAGCRRVHVVDFGIKQGMQWPALLQALALRPGGPPSFRLTGVGPPQPDETDALQQVGWKLAQFAHTIRVDFQYRGLVAATLADLEPFMLQPEGDDTDDEPEVIAVNSVFELHRLLAQPGALEKVLGTVRAVRPRIVTVVEQEANHNSGTFLDRFTESLHYYSTMFDSLEGAGAGSGQSTDASPAAAGGTDQVMSEVYLGRQICNVVACEGAERTERHETLGQWRSRLGGSGFAPVHLSSNA

SEQ ID NO: 5262 - protein, 254 aa, Glycine max
LCSGWKEMVDEWVKATTTKSITGSEEGTPDSVNPSVVDDDEEEGLPSPPLDEGAFFVTQAGSMELSQFFDGMDDDGNPRPTGPFSKNHENGRKPAFDSHVLEMRKLQPSHDTVVINRDVKSQQQAKENKAAVMPVRPNKPVTADSGPGRPPKSNVQRKSNMEPKMQQKMENNSITRRPPTAQLDKSKRSDDDAVQVKLEATKRKLQESYQQAEKAKRQRTIQVMEINDLPKQGLHRNTHFKPGYHSRHWANGRR

SEQ ID NO: 5263 - protein, 193 aa, Streptomyces coelicolor A3(2)
MRARPRDPGKIQTAPPSILCMTSAPNTRNDDNLPLDVEIGALQGGAADLSQYAGRVVLVVNVASKCGLTPQYAGLERLHERYAEQGFTVLGVPCNQFMGQEPGSADEIAEFCSATYGVTFPMTGKAEVNGEGRHPLYDRLTGFADAEGHSGDIRWNFEKFLIGRDGKVAARFSPQTEPEAAEVVAAVEERLAG

SEQ ID NO: 5264 - protein, 368 aa, Zea mays; identical to SEQ ID NO: 385

SEQ ID NO: 5265 - protein, 342 aa, Mycobacterium tuberculosis CDC1551
MEAAGMCRSDHHLVTGDIPMAGFPVLGGHEGAGIVTEVGPGVDDFAPGDHVVLAFIPSCGKCPSCQAGMRNLCDLGAGLLAGESVTDGSFRIQARGQNVYPMTLLGTFSPYMVVHRSSVVKIDPSVPFEVACLVGCGVTTGYGSAVRTADVRPGDDVAIVGLGGVGMAALQGAVSAGARYVFAVEPVEWKRDQALKFGATHVYPDINAALMGIAEVTYGLMAQKVIITVGKLDGADVDSYLTITAKGGTCVLTAIGSLVDTQVTLNLAMLTLLQKNIQGTIFGGGNPHYDIPKLLSMYKAGKLNLDDMVTTAYKLEQINDGYQDMLNGKNIRGVIRYTDDDR

SEQ ID NO: 5266 - protein, 165 aa, Hordeum vulgare subsp. vulgare
MAAASSATSVHDFTVKDASGKDVDLSVYKGKVLLIVNVASQCGLTNSNYTELSQLYPKYKDQGFEILAFPCNQFGGQEPGTNDEIVQFACTRFKAEYPIFDKVDVNGNNVSPLYKFLKSSKGGFFGDSIKWNFSKFLVDKEGHVVDRYAPTTSPMSIEKDIKKLL

SEQ ID NO: 5267 - protein, 237 aa, Cucumis sativus
MFQNQEEKMSDSPQRKMGRGKIEIKRIENTTNRQVTFCKRRNGLLKKAYELSVLCDAEVALIVFSSRGRLYEYANNSVKATIDRYKKASSDSSNTGSTSEANTQFYQQEAAKLRVQIGNLQNSNRNMLGESLSSLTAKDLKGLETKLEKGISRIRSKKNELLFAEIEYMRKREIDLHNNNQMLRAKIAESERNVNMMGGEFELMQSHPYDPRDFFQVNGLQHNHQYPRQDNMALQLV

SEQ ID NO: 5268 - protein, 186 aa, Bacillus cereus ATCC 14579
MENDNQVFWRTDCLVLRRFSMDDTNYFHFYRSNPEVAKFQSWVNYQYHEAKTFVNEQVKNNPNLPGTWFQFAIALTENNKIIGDCALHTLVNEPRIVEIGFTLSPEYQGKGYATKAVCALLSYIFHSLGKHKVIAFSDVRNNKSISVLERVGMRREGHLLQNYMLKGQWIDEYQYSILKSEWKDAT

SEQ ID NO: 5269 - protein, 729 aa, Pirellula sp.
MFGATSVGVGAIVGGGILALAGVAFATTGPSAILAFGLNGVIAILTALSFAEMASKFPESGGTYTFSRKVLSVESAFTVGWVVWFASIVASVLYAIGFGSFATLLLSELYSTQGSVPHWLGEPWSVPVVSLATTVGIGGLMTFRTSGGGAWINVAKVAVFSVLIIGGFWMLTGQPVSKTTAELRPFLASGWGGLVQAMGYSFIALQGFDLIAAVGGEVREPTKNIPRAMLLSLVIALLIYLPLLFVLTTVGTDGSQSIRELAASDPEAVVALAARHYLGTSGYWLVLIAAVLSMFSALQANLFAASRIALAMSRDNTLPNALSRLAAGSGSPWISVLVTTGLVCLLIQLLPDIAAAGAASSLIFLVTFAIAHWLAILVRQRSVLTPPPFRVPGYPAVPVVGGLACLALAIFQGIAVPEAGIIAVMWIAIGGVLFLSLFARRARLTDVSNIASNPELSRLRGNSPLVLVPIANPNNARAMIALADTLVPAALGRVLVQTVVVAPHDWDPLVNHRPSAQLHSVMNEILHASASLGVRCETLTTVSAEPMMEIARVAKLHQCQSVLLGLSEITPEARDTPLEGLLGQLSSDVVVLRAPKDWQLDQSQQILVPVGGRGGHDYLLTRLLSSLSREQQRQVKFLRVIPTDTLRADQKRIRKELDRTTRVNAGRVCEREVVRSNDPVKTIADRAGTAGLIILGAQRLGPRQKLFGDFTRKVALESDCPVIIISRRG

SEQ ID NO: 5270 - protein, 211 aa, Saccharomyces cerevisiae [sequence omitted]

SEQ ID NO: 5271 - protein, 361 aa, Burkholderia fungorum
MPSRASAVNSALSDTEAHMKALAKLERAPGLTLTDVKKPEVGHNDVMIRITRTAICGTDIHIWKWDDWAQKTIPVPMHVGHEYVGEIVEMGQEVRGFAIGDRVSGEGHITCGFCRNCRAGRRHLCRNTVGVGVNREGAFAEYLVIPAFNAFKIPPEISDDLAAIFDPFGNATHTALSFNLVGEDVLITGAGPIGIMAVAIAKHVGARNVVITDVNDYRLELARKMGATRAVNVSRESLRDVMADLHMAEGFDVGLEMSGVPSAFTGMLEAMNHGGKIALLGIPPAQTAIDWTQVIFKGLEIKGIYGREMFETWYKMVAMLQSGLDLSPILTHHFKVDDYREAFATMLSGESGKVILDWTAA

SEQ ID NO: 5272 - protein, 223 aa, Zea mays
MGDWVPRGRPGKKKYIPTLRLLSGAARVPSSIRSAECTPPFPTPIESMAAEGEKKMITLKSSDGEEFEVEEAVAMESQTIRHMIEDDCADNGIPLPNVNSKILSKVIEYCNKHVHAAAAAAAASKAGSDDVGAASANSTAASGEDLKNWDADFVKVDQATLFDLILAANYLNIKGLLDLTCQTVADMIKGKTPEEIRKTFNIKNDFTPEEEEEIRRENQWAFE

SEQ ID NO: 5273 - protein, 184 aa, Glycine max
  unsure (1)..(184): unsure at all Xaa locations
SPTRPYGCEKTTDWDDIITIKGDDGSDTVTFMFESPTQDKISDFEMKLMDIDSEHLGIPEAEYHAIVKMPSSEFARICKDLSSIGDTVVISITKEGVKFFTKGDIGTANIVCXRNPSVDQPEEATGIEMYEPVSLTFALRPMNSFTKALPLSKTVTISLSNDLPVVVEYKXAEMGYVRFPFGLP

SEQ ID NO: 5274 - protein, 343 aa, Listeria monocytogenes EGD-e
MKAVVKTNPGYDQMELKDVEEPQVYGDKVKIKVAFTGICGSDIHTFKGEYKNPTTPVTLGHEFSGVVVEVGPDVTSIKVGDRVTSETTFETCGECIYCKEHDYNLCSNRRGIGTQANGSFAEFVLSREESCHVLDERISLEAAALTEPLACCVHSALEKTTIRPDDTVLVFGPGPIGLLLAQVVKAQGATVIMAGITKDSDRLRLAKELGMDRIVDTLKEDLAEVVLGMTGGYGAERVFDCSGAVPAVNQGLPLTKKKGDFVQVGLFAEKKNAIDEESIIQREIAYIGSRSQKPSSWILALDLLANGKIDTDKMITKVYGLDDWREAFEAVMAGNEIKVLVKS

SEQ ID NO: 5275 - protein, 336 aa, Bifidobacterium longum NCC2705
MFEPTAIYAPNPHRYDTMTYNRAGTSGLKLPAVSLGFWHNFGDITPFDQMKSLVFTAFDNGITHFDLANNYGPEPGQAEKNCGLLLAKYFKHHRDELVISTKAGYEMWTGPYGDLGSRKYLLASLDQSLERLGLDYVDIFYHHHPDPETPLEETMGALAQAVNSGKALYVGLSNYDGPTMEKAAAILAELHVPFIINQNKYNILDRTVEKNGLKETAFKLGKGLITFCPLAQGLLTNRYLNGIPADSRMAHDPRFLNDSALTEKLHKQVMDLNNLAAERGQTLAEMSLAWLLHDGKVTSVLTGASKPQQILDNIGALKNTHFSDEELKLIDEISAR

SEQ ID NO: 5276 - protein, 256 aa, Selaginella remotifolia
ETWLVTTTSSSNPEVGLATGLAATGGAQDLLNPPLNKQKEPPVGRGKIEIKRIENATSRQVTFSKRRGGLLKKAHELSVLCDAQVALIIFSSTGKLFEYASTSMKEILDRYGKYPESVQGGNMASHHEASDFISHEIRRLKQQLQRSQQSRRHLLGDDLSHLPIKDLQNLEQQLEVGLSRVRSRKDQVLMDQVDELRRRELTLHKDNEMLRRRLSDVQGMAESGRSTLIVNPWRQGNLLQTWQMYPCHFLDTKAAA

SEQ ID NO: 5277 - protein, 397 aa, Haemophilus influenzae Rd
MQKQNIVILGSTGSIGKSTLSVIENNPQKYHAFALVGGKNVEAMFEQCIKFRPHFAALDDVNAAKILREKLIAHHIPTEVLAGRRAICELAAHPDADQIMASIVGAAGLLPTLSAVKAGKRVLLANKESLVTCGQLFIDAVKNYGSKLLPVDSEHNAIFQSLPPEAQEKIGFCPLSELGVSKIILTGSGGPFRYTPLEQFTNITPEQAVAHPNWSMGKKISVDSATMMNKGLEYIEARWLFNASAEEMEVIIHPQSIIHSMVRYVDGSVITQMGNPDMRTPIAETMAYPHRTFAGVEPLDFFKIKELTFIEPDFNRYPNLKLAIDAFAAGQYATTAMNAANEIAVQAFLDRQIGFMDIAKINSKTIERISPYTIQNIDDVLEIDAQAREIAKTLLRE

SEQ ID NO: 5278 - protein, 751 aa, Geobacillus stearothermophilus
MENQNRQNAAQCPFHGSVTNQSSNRTTNKDWWPNQLNLSILHQHDRKTNPHDEEFNYAEEFQKLDYWALKEDLRKLMTESQDWWPADYGHYGPLFIRMAWHSAGTYRIGDGRGGASTGTQRFAPLNSWPDNANLDKARRLLWPIKKKYGNKISWADLFILAGNVAIESMGGKTIGFGGGRVDVWHPEEDVYWGSEKEWLASERYSGDRELENPLAAVQMGLIYVNPEGPDGKPDPKAAARDIRETFRRMGMNDEETVALIAGGHTFGKAHGAGPATHVGPEPEAAPIEAQGLGWISSYGKGKGSDTITSGIEGAWTPTPTQWDTSYFDMLFGYDWWLTKSPAGAWQWMAVDPDEKDLAPDAEDPSKKVPTMMMTTDLALRFDPEYEKIARRFHQNPEEFAEAFARAWFKLTHRDMGPKTRYLGPEVPKEDFIWQDPIPEVDYELTEAEIEEIKAKILNSGLTVSELVKTAWASASTFRNSDKRGGANGARIRLAPQKDWEVNEPERLAKVLSVYEDIQRELPKKVSIADLIVLGGSAAVEKAARDAGFDVKVPFFPGRGDATQEQTDVESFAVLEPFADGFRNYQKQEYSVPPEELLVDKAQLLGLTAPEMTVLVGGLRVLGANYRDLPHGVFTDRIGVLTNDFFVNLLDMNYEWVPTDSGIYEIRDRKTGEVRWTATRVDLIFGSNSILRSYAEFYAQDDNQEKFVRDFINAWVKVMNADRFDLVKKARESVTALQCFNDARSVRTGTLQ

SEQ ID NO: 5279 - protein, 143 aa, Triticum aestivum; identical to SEQ ID NO: 4154

SEQ ID NO: 5280 - protein, 454 aa, Glycine max
  unsure (1)..(454): unsure at all Xaa locations
MATWVLSECSLKPLAXPVIPRPRTGAVLSSTSKVGFLETNKVLEGSKFQPLRCNLRERNWGLKVSVPLRIASIEEEEQKSVDVINGSNGVEHEKLPEFDPGAPPPFNLADIRAAIPKHCWVKDPLKSMSYVVRDVIAVFGLASAAAYLNNWLVWPLYWAAQGTMFWALFVLGHDCGHGSFSNNPKLNSVVGHLLHSSILVPYHGWRISHRTHHQHHGHVENDESWHPLPEKLFRSLDTVTRMLRFTAPFPLLAYPVYLWGRSPGKTGSHFDPSSDLFVPNERKDVITSTACWAAMLGLLVGLGFVMGPIQLLKLYGVPYVIFVMWLDLVTYLHHHGHEDKLPWYRGKEWSYLRGGLTTLDRDYGLINNIHHDIGTHVIHHLFPQIPHYHLVEATEAAKPVFGKYYREPKKSSPLPFHLIGELIKSFKTDHFVSDKGDVVYYQTDSEINGSSKSE

SEQ ID NO: 5281 - protein, 166 aa, Triticum aestivum
  unsure (1)..(166): unsure at all Xaa locations
MASSSHQEELHEQGQEDEEGEDHDQHGDQITAPLXSSSPEEGEEWEEAENSPVEQVALTVPVGDDPSTPVLTFRMWVLGATACVALSFLNTFFGYRKEPLEITAISAQVAVVPLGRLMAAALPERAFFRGRRWEFTLNPGPFNVKEHVLITIFANAGAGSVFAINL

SEQ ID NO: 5282 - protein, 91 aa, Fragaria x ananassa
MMMISLLVFNPVEADGVVVNYGQHASLLAKIDCGGACKARCRLSSRPHLCKRACGTCCQRCSCVPPGTAGNYDVCPCYATLTTHGGKRKCP

SEQ ID NO: 5283 - protein, 172 aa, Triticum aestivum
GYVERLGHGGFESSWRKDAMDWICKVHSYYNFGPLTLCLSVNYMDRFLSSFDLPHDKSWMQQLMSVACLSLAVKMEETVAPLPVDLQVCDEYYAFEPRNIKRMELIVMETLKWRMHSVTPFSFLCYFLDKFNEGKPPSYMLVSRCAELIVATVKDYRFLSFRPSEIAAAVVL

SEQ ID NO: 5284 - protein, 305 aa, Oenococcus oeni MCW
MTKEIQIGKSEVKTGKLGLGTNKVGGHNLFNDLQDSDGSQIIEEALKENISLLDTAFMYGLGRSEEIIGQVLRAHDRSKVILATKAAQDPNDGLHLNNKPDFLKASVDSALKRLKTDYIDIFYIHFPDEKTPKDEAVEALAEEKKAGKIRAIGVSNFSLTQIKEANKNHQIDIVEDNYSLVHRDAEKNLFPYLKEEGISFVPYFPLASGLLTGKYTINDQPKFKKFSTAEYEKIIHALDKVRDLAKEHDSTISQIILAWYIANPNIGVVIPGARKAEQVKSNAQALKINLSNQEFQQIDQLFREF

SEQ ID NO: 5285 - protein, 164 aa, Oryza sativa (japonica cultivar-group)
MAAEKKEVADAAAGSGSDTILLISSDGEHFNVPSAAASLSQLVSNMIEDDCTTNGVPLPNVASKVLAKVIEYCIKHAAAGEEEEKDLKSFDAEFIDVDKNMLYDLLLASNFMNIKSLLDLCCQHTANLIKGKSPEQIRKEFGIKNDFTPEEEEEIRKENTWAFE

SEQ ID NO: 5286 - protein, 235 aa, Oryza sativa
MAPRTSDKTMSPAAAATGLALGVGGVAGAAAVGTGQHFRGVRKRPWGRYAAEIRDPAKKSRVWLGTFDTAEEAARAYDAVAREYRGAKAKTNFPYPSAPAAGVNSGSSNSSTVESFGSDRQAPMKAMPIPPSLELDLFHRAAAAAAAGAGGMRFPFEGYPVSHPYYFFGQAAAAAAASGCRMLKIAPAPVTVAALAQSDSDSSSIVDLAPSPPAALAKKAIAFDLDLNCPPPMEV

SEQ ID NO: 5287 - protein, 314 aa, Vibrio cholerae
MVNNSIQWFPGHMHKARKEIEEAIPQVDVIIEVLDARIPFSSENPLISHIRGEKPCVKVLNKRDLADPELTELWIAHLEQEKGVKAMAITTSNPQEVHKILELCRKLAPQREEIGKNIRTMIMGIPNVGKSTIINTLAGRAIAQTGNQPAVTRRQQRINLQNGIVLSDTPGILWPKVENPHSGFRLAATGAVKDTAMEYDEVAFYTVEYLAKHYPERLKERYQIDELPETDVELMEEIGRKRGALRAGARVDLHKASEILLHELRQGVLGQITLERPEMITEELQQVEIDEALKAEEKAKRKEERRKRYLRNKR

SEQ ID NO: 5288 - protein, 324 aa, Nostoc punctiforme
MQRQIITTAFLLVSLIFPIKVLAKDYDNIYVFGDSLSDIGNVFNATNGIIPPSPTYYDGHFSNGPNWVDYLASDLGLTSNLKNNFAFGGATTGIENIGLATLPGLQQQINNFVAAETADPNALYIIWAGTNDYLSYFFDGEPNPSNTVANLSTALTSLVADGAKDIMVVNLPDLGKSPFANFTSERSNLFSTFSSEHNSSLNTELKTLSQQLSPDINIIELNVNSLFDRIVAAPEEFDFTNVTNSCISKDLSVVPIDVPTQQVFCNPEEFLFWDEVHPTTTAHKLIGELAFSALQPVPEASAGLGILAYSILGAVSLLKRKITN

SEQ ID NO: 5289 - protein, 361 aa, Salacia nitida
QSQKLAVRAISQIQSLPGGDIKLLCDTVVESVRDLTGYDRVMVYKFHEDEHGEVVAECKRPDLEPYIGLHYPATDIPQASRFLFKQNRVRMIVDCHASPVRVIQDDGLMRPLRLVGSTLRAPHGCHAQYMENMGSIASLAMAVIINGNDEEVIGGRNPTRLWGLVVCHHTSARCIPFPLRYACEFLMQAFGLQLKMELQLAAQLLEKHVLKTQTLLCDMLLRDSPTGIVTQSPSIMDLVKCDGAALYFQGNYYPLGVTPTEAQIKDIVEWLLAFHGDSTGLSTDSSADAGYPGAALLGDAVCGMAVAYITNRDFLFWFRSHTAKEIKWGGAKHHPEDKDDGQRMHPRSSFKAFLEVVKRRS

SEQ ID NO: 5290 - protein, 486 aa, Bifidobacterium longum DJO10A
MDLFRKKSVDQLVAESTPLKRTMRTFDLTMLGIGAIIGTGIFVLTGKGALTAGPALSVSFLLAAVCCGFAGLCYAEFAAMAPVSGSAYSYAYLAFGELIAFVIGWDLILEYALQAATVSAGWSGYFNKLLEGFGLHLPVELTAAYGTNPDVTTYFNLPGFVIVLIITWVLSIGINQTKRTNDVMVLIKLAIIVLFIVCAVWYVKPSNWQPFSPYGVYTFQPGSTQPYGIVPAASIVFFSFIGFDAVSSSAEETINPNKTLPRGILLSLAVSTVLYVIMTLIMTGVVPYKEFAKYIDAPVAGVILETGMNWLAVIVNLGALIGMTTVMLVQLYGQSRICYAMSRDGLFPKFFGHVHEKYRTPFKGTWFFGLLTAFAGGFININVLFELVNIGTLSAFIIVSAGILWMRKTQPNAPRGFRAPGVPVTPILAIVFCFVLIAGLNWETWVRFAVWFGLGLIVYFGYSRKRSKLGLEQKAGADAKVAATED

SEQ ID NO: 5291 - protein, 368 aa, Ralstonia metallidurans
MKTKAAIAWKAGAPLTIEEVDLDGPRAGEVLVEIKATGICHTDYYTLSGADPEGIFPAILGHEGAGIVTDVGPGVTSLKPGDHVIPLYTPECRQCKFCLSRKTNLCQAIRATQGKGLMPDGTSRFSIDGKPIFHYMGTSTFANHIVVPEIALAKIRPDAPFDKVCYIGCGVTTGVGAVIFTAKVEAGANVVVFGLGGIGLNVIQGAKMVGADKIIGVDLNPAREAMARKFGMTHFVNPKDVDNVVDHIVQLTDGGADYSFECIGNTQVMRQALECCHKGWGKSIIIGVAEAGAEISTRPFQLVTGREWKGSAFGGARGRTDVPKIVDWYMDGKLNIDDLITHTLPLDRINEGFDLMKRGESIRSVVLY

SEQ ID NO: 5292 - protein, 506 aa, Antirrhinum majus
MSTLVYSTLFILSTLLLTLLTRTRRKTRPPGPLALPLIGHLHLLGPKLHHTFHQFSQRYGPLIQLYLGSVPCVVASTPELAREFLKTHELDFSSRKHSTAIDIVTYDSSFAFAPYGPYWKFIKKLCTYELLGARNLSHFQPIRALEVNSFLRILYEKTEQKQSVNVTEELVKLTSNVISNMMLGIRCSGTEGEAEVARTVIREVTQIFGEFDVSEIVWFCKNLDLQGIRKRSEDIRRRYDALLEKIISDRERLRLRGGGGGGGGEVKDFLDMLLDVMESEKSEVEFTREHLKALILDFFTAGTDTTAITTEWAIAELISNPNVLKKAQEEMDKVIGSQRLLQESDAPNLPYLNAIIKETFRLHPPIPMLTRKSISDVVVNGYTIPAKTLLFVNLWSMGRNPNYWENPMEFRPERFLEKGTGSIDVKGQHFELLPFGTGRRGCPGMLLGMQELFSIIGAMVQCFDWKLPDGVKSVDMTERPGLTAPRANDLVCQLVPRIDPVVVSGP

SEQ ID NO: 5293 - protein, 330 aa, Zea mays
MALVRQRRQLPHLTLPLDHFALRVPPQPQPTAAPSTSTSDARLSDYERLSVLGHGNGGTVYKARHRRSAQPVALKLFADGDTSAAREAEILMLAADAPHVVRLHAVIPSAAGEAPAALALELMPGGSLSGLLRRLDRPMGERPIAAVARQALLGLAAVHALRVVHRDLKPSNLLVGADGEVTIADFGAGKVLRRRLDPCASYVGTAAYMSPERFDPEAYSGDYDPYAADVWSLGVAILELYRGHFPLLPAGQRPDWAALMCAICFGEAPEPPAAASEEFRDFVARCLEKKAGRRASVAELLEHPFVAEREAAGAQEALAALVKEAEQLDL

SEQ ID NO: 5294 - protein, 461 aa, Pteridophyllum racemosum
SGKPFYAILHRIDVGFVIDLEPVNPLDVPVTAAGALKPYKLAAKAISRLQSLPSGNISLLCDVLAREVSELTGYDRVMVYKFHEDEHGEVVSECRKIDLESYRGLHYPATDIPQASRFLFMKNRARIICDCSATPVKVIQDEKLAQPLSLCGSTLRAPHGCHAQYMANMGSIASLVMFVTINDDDDDIKIETHKGRKLWGLVVCHHTSSRFVPYPLRYACEFLIQVFGIQLNKEVELAVQSREKRILRTQTLLCDMLLRDSPVGIVTQSPNVMDLVRCDGAALYFRNKFWLLGVPPTEKQIRDIVGWLMEHYVGTTGLSTDSLMEAGYPDSSVLGDAVCGMAAINFTSKDFLFWFRSQTAKELKWGGAKHDPVDMDDVRKMNPRSSFNAFLEVVKWRSLPWEDVEMDAIHSLQLILRESMKNEIVNDVKTIVNTTPVIDARLRGMDQLCVVTGEMVSLMET

SEQ ID NO: 5295 - protein, 173 aa, Helicobacter pylori J99
MNLDQLEVSHDADSLCVVIEISKHSNIKYELDKESGALMVDRVLYGAQNYPANYGFVPNTLGSDGDPVDALVLSDVAFQAGSVVKARLVGVLNMEDESGMDEKLLALPIDKIDPTHSYVKDIDDLSKHTLDKIKHFFETYKDLEPNKWVKVKGFENKESAIKVLEKAIKAYQG

SEQ ID NO: 5296 - protein, 380 aa, Zea mays
  unsure (1)..(380): unsure at all Xaa locations
MARLRVAPPLAVLLLVLLSTAARPSLAQPSNNNSTSSQRHSRTTTGGGFTPTTVIVLVALISALVVLTLFSIYINRCAPTRPAPPRRPSRYAPPDHHQQAGGSAAHPDRRGGGARAGLDKEVVESFPTAVYGDVKARVAARSGSGSGPLECAVCLAAFEDQDELRVLPACCHVFHPDCIDPWLAGAVTCPLCRADLTAAAAPYYPPXSSDGSGSGSNLAARPHEAVREETDDDEERGEARLVAACTPEXVVASLGAAPHHHEFHYRRTQSAMDVPDRHTLRLPEHVMKELTAVRGHRRAASLXAYPXXAXXTPGWLAXIXRSVSWQRPSRTDPDAVDDSGGSKRVVPINGTPAERPSGGSGDDATDDMEKPGHDALLNQV

SEQ ID NO: 5297 - protein, 333 aa, Bradyrhizobium japonicum USDA 110
MSGSINRQILLVEKPSGKLGPEHFKMVDGAMPEPKDGEALLRVRYISLDAANRAWMHGATYRSAVEANSVMAGGGIAEVVSSKAPGLAAGDIVFGDTGWQEFAAVPAKHLTKMPKLEPMTHLLSVFGIAGLTAYFGLLEVGKPKEGETVVVSAAAGSVGSIVGQIAKIKGCRVIGIAGGADKCNWLTSELGFDAAVDYKDGAVFKALRAAAPTGIDVYFDNVGGDILEACLPQMNNYGRIACCGAISQYDGAPAAHGPRGVPGLIVVKRLVMQGFIVMDYMKDSQRALAELQGWVKSGKLKVQEDIIDGLENTPKALIGLLAGENRGKRMVKL

SEQ ID NO: 5298 - protein, 249 aa, Pyrococcus furiosus DSM 3638
MPFEIVFEGAKEFAQLIDTASKLIDEAAFKVTEDGISMRAMDPSRVVLIDLNLPSSIFSKYEVVEPETIGVNMDHLKKILKRGKAKDTLILKKGEENFLEITIQGTATRTFRVPLIDVEEMEVDLPELPFTAKVVVLGEVLKDAVKDASLVSDSIKFIARENEFIMKAEGETQEVEIKLTLEDEGLLDIEVQEETKSAYGVSYLSDMVKGLGKADEVTIKFGNEMPMQMEYYIRDEGRLTFLLAPRVEE

SEQ ID NO: 5299 - protein, 318 aa, Triticum aestivum
LLLYSLFYRKKRPRRSRDGPNSVSETIRRWKEVNQQLEHDPQGSKRSRKPPAKGSKKGCMQGKGGPENTQCGFRGVRQRTWGKWVAEIREPNRVSRLWLGTFPTAEDAARAYDEAARAMYGALARANFPVHPAQAPAVAVAAAIEGVVRGASASCESTTTSTNHSDVASSLPRQAQALEIYSQPDVLESTESVEHYSHQDSVPDAGSSIARSISEEDVFEPLEPISSLPDGESDGFDIEELLRLMEADPIEVEPVTGGSWNGVEIGQQEPLYLDGLDQGMLEGMLQSDYPYPMWISEDRAMYNPAFHDAEMSEFFEGL

SEQ ID NO: 5300 - protein, 99 aa, Zea mays; identical to SEQ ID NO: 1666
  unsure (1)..(99): unsure at all Xaa locations

SEQ ID NO: 5301 - protein, 296 aa, Rhizobium sp. USDA 1088
  unsure (1)..(296): unsure at all Xaa locations
RGKTQIKEFDAFPTLEQLPLWGFDGSSTQQAEGRSSDCVLKPVAVYPDPVRTNGALVMCEVMMPDGKTPHPSNTRATVLDDESAWFGFEQEYFFYKNGRPLGFPEQGYPAPQGPYYTGVGYKNVGDIARQIVEEHLDICLAAGINHEGINAEVAKGQWEFQVFGKGSKKAADEVWLARYLLLRLTEKYGIDVEFHCKPFGDTDWNGSGMHANFSTAYLREVGGKDYFEALMAAFEKNLHDHINVYGPDNHLRLTGKHETAPWDKFXYGVADRGASIRVPHSFVNNGYRGYLEDRRP

SEQ ID NO: 5302 - protein, 358 aa, Desulfovibrio desulfuricans G20
MEMRICLLAGDGIGPEIMEQGVRVLETVAGKFGHDMEFTDALIGGAAIDETGDPLPQETVEACKAAQAVLLGAVGGPRWDNLTGAERPEAGLLGIRKALGLFANLRPAKLFPELASACFLRPDIVANGIDVMVVRELTGGIYFGTPAGEETRDGLRTAFNTMVYNEEEVRRIARVAFEAARKRSGRVCSVDKANVLAVSRLWREIVTATHADEFPDVELSHMYVDNAAMQLVRDPSQFDVIVTGNLFGDILSDEASVITGSIGMLPSASLGAGGPGLFEPIHGSAPDIAGQNKANPLATILSTAMMLRHSFGLEKEAEAVEGAVQQVLKAGYRTGDIMDQGGTLVGCNTMGNLVNERI

SEQ ID NO: 5303 - protein, 464 aa, Agrobacterium tumefaciens str. C58 (Cereon)
MALWRSPSAIWPSTVEESPMSATTKEILDLNRFDASRTEGFPAELAERVAKRQATFGASSVLFYEQPIEMVSAQGAYLYDAGGRKYLDVYNNVPSVGHCHPRVVEAIARQVGELNIHTRYLNRVVEAYTENLLSKFPAGLSNVVLTCTGSESNDLALRIARIGTGAEGFIVTEAAYHGNTALVTEVSPSSLRKRKPAAFVAIIPAPAARDGMSVASNFAASVEQAINELNSRGIKFAALIVDTIFSSDGIYADPAGFLKEAVDVVHRAGGLLIADEVQPGFGRTGGSLWGFERHGVTPDIVTMGKPMGNGFPMGGVVTRPDLLQRFCEETGYFNTFGGNPVAAAAGHAVLRVIEEEGLIERSATVGGYFKQSLQALQSRHSEIGDVRGAGLFIGLDFVDPATGEPDSTRATHAINQLRHNSILIGAAGKYGATLKIRPPLCFSNEDVDLFTGTLDIILQARRAA

SEQ ID NO: 5304 - protein, 371 aa, Oryza sativa
MVEAATIIHTTQHDLRMAHSVALVADVLMRCPRQQRLRVFFRGKELASYLRDESLCKEREKKNFDLEGRERETETSQTEETNRHEEKEEHEEEIQANRRLRLRFLPMKKIFGAKKNQEPPPSIQDATDRVSFCLSCFDSIFNSILFNSSTKQSNESNQTNPQISKRGDSVDDKIKKLDAELARYKDQIKKTRPGPAQEAIKARAMRVLKQRRMYEGQRDMLYNQTYNLDQVAFASEGLKDAQQTMTAMKAANKELKGMMKTVKLEDIDSLQDEMMDLMDVSNEIQETLGRSYNVPDDIDEEELMGELDALEADMDFESNSVPSYLQPDKESDLDSELNLPAAPTGHTPAPPNRQQEDELGLPTVPQASIRS

SEQ ID NO: 5305 - protein, 184 aa, Glycine max
MVALFSPPVFSTKGWLLEEDPLSYDVSSEYSFPYQFYSPQTQIELEIERSTSPSPEDPAMVKKLSHNASERDRRKKVNHLVSSLRSLLPVADQTKKMSIPTTVSRVIKYIPELQQQVEALSKKKEDLLCRISRQLQGDAVNKESQRRISHHNSDFAVSTSRLNDCEAVVHISSYEAHKAPLSDI

SEQ ID NO: 5306 - protein, 755 aa, Pseudomonas putida KT2440
MTGAFSIMTADNSLADAMERCAQEPIQVPGSIQPHGFLLVLDATDLRVLQASENVEHWLGLPARELIGCHFADLVHEGFDLHAHLTRLPEDEVFPFHIGDVRLRQGAPISALLHMLVHCHDQVLIAEFEPPRLPADLVGQGDYYPLVRSFVASLQVASSIEDLLQQTVLQLKRITGFGRVKAYRFDAEGNGQVLAEVVDPGYPSYAGLCFPAADIPRQARELYRVNRIRVIEDANYQPSPLLPATNPRTGKPLDMSFAALRSVSPVHLQYMRNMGTLASMSLSIVVDGQLWGLISCHHQQPRPVDLRTRTACELLASVLSLQIESRESHASTRKLLTLRQHIVRMISSMADHDSVSDGLRDLPEVLLAFADAQGAAVISAERCDLIGQTPPEAQVTALVHWLGQRDEDKVFHSDNLRRDITELPELANHAGGVLAVAISQIHSHYLLWFRPEQIRTVNWAGQPTKQVGPQGNLDPRHSFERWQEEQRGYSQAWDPLVIEGVIELRAAVLGIVLRKAEELAQLAGELRRSNKELEAFSYSVSHDLRAPLRHIAGYTELLGEIEGQGLSERGKRFLQHIGEAAHFAGSLVDNLLNFSQMGRSALRLSDVDLNALVEAIRSELAPDYEGRAIVWDIAPLPKVIGDPAFINMALHNLIANAIKYTRGRTPARIEISAVQHPEETEVCIRDNGVGFDMAYANKLFGVFQRLHRMEDFEGTGIGLASVRRIIERHDGRVWATGQVDQGASFHFTLPRNTAT

SEQ ID NO: 5307 - protein, 63 aa, Brassica napus
MRGILVDWLVEVSEEYTLVPDCVYLTVYLIDWFLHGKYLERQRLQLLGITCMLIASKYEEIYP

SEQ ID NO: 5308 - protein, 216 aa, Rhodopseudomonas palustris
MTADLFDGLDDAPRRQDIAPGAALLSGFARANERELLAAIDAVVARAPFRHMMTPGGHTMSVAMTSCGSVGWVTDRRGYRYSPNDPDSATPWPKMPAVLRDLAQRAAADVGFAGFDPDACLINRYVPGAKMALHQDKDEADFSAPIVSVSLGLPAIFQFGGMARSDKPRRYELRHGDVLVWGGPSRLVYHGVLTLKDGEHPLLGRQRINLTFRKAL

SEQ ID NO: 5309 - protein, 490 aa, Triticum aestivum
  unsure (1)..(490): unsure at all Xaa locations
MALKAASFPGELSSLLDSGTTRSRSRRGAAAPFHQRKVDFTFQRRDKRAAYLRTCCSMQQGPPPAWPGRAVIEPERRSWEGPKPISIVGSTGSIGXTQTLDIVAENPDLTSSGVVALAAGSNVTLLADQVKTFKPKLVAVRNESLLXELKEALAGCEXEMPEIIPGEQGVIEXVARHPDAVTVXVTGIVGSCRTASQTVAAIECSEKILRWQVVVSHSSGRRSRFVLPLAHNRTMXKIPADSEHSAIFQCIQGLSEGSLRRVILTASGGAFRDWPVEKLKDVKVADALKHPNWSMGKKITVDSATLFNKGLEVIEAHYLFGAEYDDIEIVIHPQSIIHSMIETQDSSVLAQLGWPDMRLPILYTLSWPDRVYCSEVTWPRLDLCKLGSLTFKAPDNVKYPSVDLAYAAGRAGGTMTGVLSAANEKAVELFIDEKISYLDIFKVVEMTCDAHRNELVTRPSLEEIIHYDQWARKFAANLQPSSSGRSPVLA

SEQ ID NO: 5310 - protein, 359 aa, Magnetococcus sp. MC-1
MQKLFTDETLTIESPQARLGEFMKAILVTGGAGYIGSHVCKVLSQSGFLPITYDNLSEGHPWAVRWGPLVVGGLDDGAKLAGLFAQYQPQAVIHLAGRAYVGESMTDPALYYRNNVQAALVLLECMRQYGCKNIIFSSSCATYGEHRQMPITEAMSQHPINPYGRSKLMFEWMLQDYQVYGLQSVALRYFNASGADLEGEIGEQHQPEPHIIPRLLEAARKGSPFTIYGTDYESEDGTCVRDYIHVSDLAQAHLLALQWLWRGGESRAFNLGNGQGFSIRQLIKVAETVTGKSIAVQLGARRPGDPAVLVGSAEKAREELGWQPQYGTLEIILTSAWRWMQRRQDPPVVDGIEESIGEP

SEQ ID NO: 5311 - protein, 370 aa, Rhodospirillum rubrum
MPVSKKILFLAGDGIGPEVMAQVRRVMDWLNQTGRTAFEVEDALVGGAAYDAQGTPLHDDTVALALAADAVLLGAVGGPKWDASLPFELKPERGLLRLRKDLELFANLRPAMVFDALAEASTLKTELVSGLDVMIVRELTGGVYFGQPRGISALPNGERRGVNTQVYDTHEIVRVAKVAFDLAGKRGKRLCSVEKANVMESGLLWREEVTKLGADYPEIALSHMYADNCAMQLVRQPKQFDVIVTDNLFGDILSDCAAMLTGSLGMLPSASLGAADAAGNRRAMYEPVHGSAPDIAGQDKANPLATILSFSMMLRYSFDLAEEADLVDNAVRGVLAKGLRTGDIFQPGKTLVGTTGMGDALLAEMAQLAN

SEQ ID NO: 5312 - protein, 512 aa, Septoria lycopersici
MARTKATARKTVPAQQEAHGYEFGGPIGASLISFGLPIACYAFGFLCNDVSGCPPPSLLSPSKLFTPPTLSNKVPWQHALDTLAAEVGWPGWSGLINTEAVLGVFFWYGLSLLLWVLLPAHEVEGTELRTGGRLKYRFNACLSAVTIFVACAAGTIVRGPDFQVWTFINRNYIQLLTVNIIIAYALAIYVYLKSFEVKAGNTEQRELAAGGHSGHILYDWYMGRELNPRITIPFIGEVDIKSFMELRPGMIGWVLLDLAFAAKQYKSYGYITDSMRKWTPLLLGIHVLTIHPVIVIISQSVYVFDALYMEPAILTTMDLTTDGFGFMLSFGDLVWVPFIYSIQAKYLSVHPVALGPLYVALILTIQATGYYIFRATNNDKNIFRTNPNDPKVAHLKYIETGTGSRLLTTGWWGTARHINYLGDWLMSWSYCLPTLAAGYKLTPTILFENSRLVSTDGMKGAGIPITYFYMLYFAILLIHRERRDEAKCRRKYGAHWEKYCQIVRWRILPGVY

SEQ ID NO: 5313 - protein, 159 aa, Zea mays; identical to SEQ ID NO: 4510

SEQ ID NO: 5314 - protein, 338 aa, Oenococcus oeni MCW
MYQASNNRYDKMLYRRVGNSGLELSVLGLGLWHNFGSVDSFENQKSIVHEAFDLGITYFDLANNYGPVPGSAEKNFGRIISEDMKPYRDEMIIASKAGYDMWPGPYGNWGSKKSIIASADQSLKRLGIDYIDIFYSHRPDPKTPFEETTLALDQLVREGKALYIGISNYNGEQTKKICEIFEDLKTPFIIEQPRYNMFNRQAEQDLFPILKEKHKAAVGFSSLSQGLLTEKYLNGIPKNSRADKASSPFLQEKQVKATIETVKKLNHIAAVRQQSLAEMALAWNLRIPEIACVLIGASRPEQLLDNIKALDNLTFSDYELLEIDRVLAKQDKIDWSHN

SEQ ID NO: 5315 - protein, 294 aa, Populus tremula x Populus tremuloides
MSSTRFASYGVRGWSASAPPVIPGEEEKPKAAANSFTTEDGKAIVSYWGVSPPKITKEDGTAWKWNCFRPWESYKPDISIDVKKHHKPGTTMDKFAYWTVQVLKYPTYLFFQRRHMCHAMLLETVAAVPGMVGGMLLHFKSLRRFEQSGGWIKALLEEAENERMHLMTFVEIAKPQWYERALVFAVQGVFFNAYFLAYLASPKLAHRIVGYLEEEAVNSYSEFLEDLDNCSFENVPAPAIAIDYWRLPPNSTLRDVVFVIRADEAHHRDLNHYASDIQCQGQELRYTPAPIGYH

SEQ ID NO: 5316 - protein, 95 aa, Oxalis flagellata
LYAGINISGTNGEVMPGQWEYQVGPSVGIEAGDHIWASRYILERITEQAGVVLTLDPKPIDGDWNGAGCHTNYSTKSMRDEGGFEVIKKAILNLS

SEQ ID NO: 5317 - protein, 339 aa, Escherichia coli
MNILVTGGAGYIGSHTSLCLLNKGYNVVIIDNLINSSCESIRRIELIAKKKVTFYELNINNEKEVNQILKKHKFDCIMHFAGAKSVAESLIKPIFYYDNNVSGTLQLINCAIKNDVANFIFSSSATVYGESKIMPVTEDCHIGGTLNPYGTSKYISELMIRDIAKKYSDTNFLCLRYFNPTGAHESGMIGESPADIPSNLVPYILQVAMGKLEKLMVFGGDYPTKDGTGVRDYIHVMDLAEGHVAALSYLFRDNNTNYHVFNLGTGKGYSVLELVSTFEKISGVRIPYEIVSRRDGDIAESWSSPEKANKYLNWKAKRELETMLEDAWRWQMKNPNGYI

SEQ ID NO: 5318 - protein, 109 aa, Triticum aestivum
  unsure (1)..(109): unsure at all Xaa locations
SGRILTCVVRGGHIFIRVSCLGESGDPEMKLEMRRYREPRFYTKVYTGCQSXGHDGNSFELSLVSSRCIGAYVNCMTSHCHICWLWDKVICTVDTGFXRFLNIVHYRST

SEQ ID NO: 5319 - protein, 388 aa, Salmonella enterica subsp. enterica
QNGKLNVPENPIIPFIEGDGIGVDVTPAMLKVVDAAVEKAYKGERKISWMEIYTGEKSTQVYGQDVWLPAETLDLIRDYRVAIKGPLTTPVGGGIRSLNVALRQELDLYVCLRPVRYYQGTPSPVKHPELTDMVIFRENSEDIYAGIEWKADSADAEKVIKFLREEMGVKKIRFPEHCGIGIKPCSEEGTKRLVRAAIEYAITNDRDSVTLVHKGNIMKFTEGAFKDWGYQLARDEFGGELIDGGPWLKIKNPNTGKEIVVKDVIADAFLQQILLRPAEYDVIACMNLNGDYISDALAAQVGGIGIAPGANIGDECALFEATHGTAPKYAGQDKVNPGSIILSAEMMLRHMQWFEAADLIVKGMEGAIAAKTVTYDFERLMEGAKLLK

SEQ ID NO: 5320 - protein, 394 aa, Lentinula edodes
MQSLLRWGIENSTPQNTNTNTNTTTTANNTANTNTTTANAPPSRRPDLNPEIIDLLLGKSDAVLMKEAMAIAVDEGNTEEDRVSALDNLEMLIEQIDNANNLTNLKMWEPLHALLTSSPDSVATQALWVIGTALQNNPSAQDAYLKLNPLPTLTSFLSPPPQSTNSNSTPPKSPKTPSKPLRSKAIYALSGLLKHNAPALLQLSVNDAHGCDGWDRLCLALQDPDITIRRKTLFLLNALLIPSPSPDPSPSPDRSPSPSLGNLHTPSQTQHSQNSQHPIHPNSHSIHLSDPSRVSTSAPTYQALLTHGIIDTLIAGLTRSLPYGGDGDTGDTKEEVDGEFKEMGVSLLNTYISLSQSHTHTQHPTTPLTPSQKTVSGNGSPLSLPPKNKNWLPS

SEQ ID NO: 5321 - protein, 457 aa, Escherichia coli K12
MMEGQQHGEQLKRGLKNRHIQLIALGGAIGTGLFLGSASVIQSAGPGIILGYAIAGFIAFLIMRQLGEMVVEEPVAGSFSHFAYKYWGSFAGFASGWNYWVLYVLVAMAELTAVGKYIQFWYPEIPTWVSAAVFFVVINAINLTNVKVFGEMEFWFAIIKVIAVVAMIIFGGWLLFSGNGGPQATVSNLWDQGGFLPHGFTGLVMMMAIIMFSFGGLELVGITAAEADNPEQSIPKATNQVIYRILIFYIGSLAVLLSLMPWTRVTADTSPFVLIFHELGDTFVANALNIVVLTAALSVYNSCVYCNSRMLFGLAQQGNAPKALASVDKRGVPVNTILVSALVTALCVLINYLAPESAFGLLMALVVSALVINWAMISLAHMKFRRAKQEQGVVTRFPALLYPLGNWICLLFMAAVLVIMLMTPGMAISVYLIPVWLIVLGIGYLFKEKTAKAVKAH

SEQ ID NO: 5322 - protein, 159 aa, Leuconostoc mesenteroides subsp. mesenteroides ATCC 8293
MIMSIYDYFATLENGETYSLNKLANHPVVIVNTATKCGYAPQFGELEKLYKKYKDKGLVILGFPSNQFKQELETASQAAQACQLTYGVTFPMHQLVAVNGKNTDPLFKYLKENSKGMLGSSTIKWNFTKFLVDKEGNVVKRYAPKTEPKDLEEDIEDVL

SEQ ID NO: 5323 - protein, 249 aa, Pyrococcus furiosus
MPFEIVFEGAKEFAQLIDTASKLIDEAAFKVTEDGISMRAMDPSRVVLIDLNLPSSIFSKYEVVEPETIGVNLDHLKKILKRGKAKDTLILKKGEENFLEITIQGTATRTFRVPLIDVEEMEVDLPELPFTAKVVVLGEVLKAAVKAASLVSDSIKFIARENEFIMKAEGETQEVEIKLTLEDEGLLDIEVQEETKSAYGVSYLSDMVKGLGKADEVTIKFGNEMPMQMEYYIRDEGRLTFLLAPRVEE

SEQ ID NO: 5324 - protein, 265 aa, Arundo donax
AESNMCDLLRINTDRGVMIGDGKSRFSINGKPIYHFVGTSTFSEYTVMHVGCVAKINPEAPLDKVCVLSCGISTGLGASINVAKPPKGSTVAIFGLGAVGLAAAEGARIAGASRIIGVDLNANRFEEAKKFGCTEFLNPKDHSKPVQEVLAEMTNGGVDRSVECTGNINAMIQAFECVHDGWGVAVLVGVPHKDAEFKTHPMNFLNERTLKGTFFGNFKPRTDLPNVVELYMKKELEVEKFITHTVPFSEINKAFDLMAKGEGIR

SEQ ID NO: 5325 - protein, 183 aa, Escherichia coli K12
MQDSILTTVVKDIDGEVTTLEKFAGNVLLIVNVASKCGLTPQYEQLENIQKAWVDRGFMVLGFPCNQFLEQEPGSDEEIKTYCTTTWGVTFPMFSKIEVNGEGRHPLYQKLIAAAPTAVAPEESGFYARMVSKGRAPLYPDDILWNFEKFLVGRDGKVIQRFSPDMTPEDPIVMESIKLALAK

SEQ ID NO: 5326 - protein, 333 aa, Burkholderia fungorum
MALRQFRSAPATPRAAGRRPCVEGISVPDSPHDPHDEQPPSGAGRGTGRTNDCLTGTCALFTKNMKFQDRICVVTGGASGIGAAICRAFDAQGAKLAVLDVDRDSGETFARSLRGAVFIECDVADAASVKRAFERIAQRWDRTDVLVNNAGIVGREEYGRVQTRRVQQIEDVRSGRKPGPLRATVSLTDEQWRRMIDIHLNGTFYCTREALLQMERLGQGAIVNMSSIAGLDGGFGNPHYAAAKAGILGFTRAVAKEAIQQGIRVNAVAPGFVDSPLRRSLSEALQQLQIAATPMGRAATGDEIASLVLFLASDDASYLVGETISPNGGYLTI

SEQ ID NO: 5327 - protein, 375 aa, Xanthomonas axonopodis pv. citri str. 306
MAWNTPGNKGGDGPDPNRRRSWGPRGGGNGGGWGNLPAPLKELFDGGVGRWILVAVVLMVLFSSFQLIGEQQRGVVLRFGQFSRILQPGPNFKLPWPIESVRKVNATEIKTFSNQVPVLTRDENIVNVSLNVQYQISDPRKYLFGSRNADLVLEQAAQSAVREQVGRSDLNTVLNNRGPLAIASKDRLQAALDAYNTGLAVTGVTLPDARPPEEVKPAFDEVNGAQQVRERLINEAQAYAAKVVPEARGQGARTRTGAEGYKQATISKAEGDADRFTLLQAQYAGAPEVTRKRLWLETVQKVLSENRKVIGSDGRQVIYVPLPADASKPAASGGTASMPSMVPQDVLLNPPQSASSETIRNPERGPRPTGREGTE

SEQ ID NO: 5328 - protein, 122 aa, Glycine max
GPGLFEPIHGSAPDIAGQVGVFYFRFFSFASTDMLNNSTITHIQDKANPFATVLSAAMLLRYGLGEEKAAERIENAVMDTLNRGFRTGDIYSAGTKLVGCKQLGEEILKSVESNVPAGAAAV

SEQ ID NO: 5329 - protein, 235 aa, Hordeum vulgare subsp. spontaneum
MATAGKVIKCKAAVAWEAGKPLSIEEVEVAPPQAMEVRVKILYTALCHTDVYFWEAKGQTPVFPRILGHEAGGIVESVGEGVTELVPGDHVLPVFTGECKDCAHCKSEESNLCDLLRINVDRGVMIGDGQSRFTINGKPIFHFVGTSTFSEYTVIHVGCLAKINPEAPLDKVCVLSCGISTGLGATLNVCKTKKGFHGGHFRSWSCRTGCHGRGQDGWGIKDHWCGFEPCKIRTS

SEQ ID NO: 5330 - protein, 317 aa, Lactobacillus gasseri
MSWGTIATWRMANEGVEKASTILKENGTAGDAVEKLINTVEAYPYYKSVGYGGLPNEEGVVQMDAAFMNGDTLAQGAVGAIENVMHAVSVARALSREHYNSFRVGEGATKFASLHGFEMTNMLTERAKKRWQKRCKEIEQQNLNPYDGHDTVGAITLDKNNSMAAATSTSGLFMKKDGRVGDSPLSGSGFYVDSKVGGAAATGLGEDIMKGCLSYEIVRRMQEGELPQDACNHAVYPFIKDLKKRYGKAGEFSLVAMNNKGEWGVATNVEFTFCVATDKQKSVILMANPIDNMKTKIEPVSQEWLDAYEKRIHAPIV

SEQ ID NO: 5331 - protein, 336 aa, Zea mays
MSGRALKDLNVSQSADLENGKDNSVKSCITKPVLNGNKCANKEEKAPSACHDAVTNGNAAAIADVEYIDSENLVDLPDVDAALSTLAKRLDSKDWVMTCEALNNVRQLAMYHKERLQELLEPLVPLIVKSVKNPRSAVCKTALMTCADIFKAYGDLMVHSIDPLLVQLFLKASQDKRFVCEAAEAALISMTSWISPLLLLPRMLPYLKNKNPRIRAKASVCFSKSVPRLDVVGIKEYGMDKLIQIAATQLSDQLPESREAARNLALELQAFYEKSQASTSDEHEVEASASPDAESWEAFCQSKLSALSAQAILRVTSTTTKECVTSAPKEGLAVGC

SEQ ID NO: 5332 - protein, 171 aa, Triticum aestivum
AHPSGYLGEDPRGVPNNLMPYVQQVAVGRRPSVTIFGNNYATKDGTGVRDYIHVLDLAEGHIAALRKLFDSSSNIGCEPYNLGTGKGTSVLEIVNAFEKASGKKIPLVIGQRRPGDAEILFAGTGKAERELNWKAKYGITEMCRDQWNWASKNPYGYGSPDSTKQNGSNSH

SEQ ID NO: 5333 - protein, 463 aa, Bradyrhizobium japonicum USDA 110
MTPTMLPSSQQARDVAYQLHAYTNARSHQRAGPLIIERGEGPYVFDTAGKRYLDAMAGLWSAGLGFSEKRLIEAAHRQMQILPFYHTFASRSNGPSIALAEKLVKMSPVPMSKVFFTNSGSEANDTVLKLIAYRSNAAGQPQRKKVISRLRGYHGVTIGAASLTGFPDNHRSFDLPLPNIMHTGSPHFYKDSRAGESEETFATRRAEELESLIQREGADTIAAFFGEPVMGAGGVIVPPPTYWDKIQSVLKKHSILLVADEVICGFGRTGKMFGCETYNIAPDVIVVSKQLTSSYFPLSAIIMNDYMFEPIADESNKVGLLAHGFTGGGHPVGAAVALENLKLIEERGLIANVGRIGAYMQERLRTLVDHPLVGEVRGVGLIAAIELVLDKKRKVAATTPGDVGSIASRLLHERGIIVRNVDDALSICPPLIVNKDQIDELIDGITGMLHDLKATVVNCREPH

SEQ ID NO: 5334 - protein, 189 aa, Streptococcus pneumoniae TIGR4
MESIFVKFAQYPSIETERLLLRPVTLDDAEAMFDYASDKGNTRYTFPTNQSLEETKNNIAQFYLANPLGRWGIELKSNGQFIGTIDLHKIDSVLKKAAIGYIINKKYWNQGLTTEANRAVIELAFEKIGMNKLTALHDKANPASGKVMEKSGMRFSHAEPYACMDQHEKGRIVTRVHYVLTKEDYFANK

SEQ ID NO: 5335 - protein, 578 aa, Thermoplasma volcanium
MIHENKIYDHVVNYSMGDLNSASTDANISYSENQDRKLRKALSTWDLLMLSVGGIIGSGWLFAAYAASVLSGPASILAWVLGGIIVIFIALVYAELGAMIPRSGAIVRYGHLSHGSFAGFLFGWAYFLSAVSVPAIEAEAVVTYAASYVTKPALIANGIMTVFGTLIAMLLMIAFFFLNYAGIHLMGKTNQGITWIKVIIPVITVIVLIAVHFNPSEIVPPNGFLPYGWAPVFAAISSTGIVFSYFGFRQAIDYGGEAKNPQRSIPIATIGSVLIGILLYSLLQVVFVGGIDWSKMGLEPGQWTLLNAYATAAHASTEHPLAYQLMNAPFATIALSAGLVWLTYTLYASAYIAPSGTLNVYLGTSTRTLYGMAVNGHLPKIFAKVADRNKIPVIPLITTLLVGFLFFLPFPSWYKMVGFISGATVFTYIVGGAALMNLRKQAPELKRPFKLWSANVLAPIAFILASEAVYWTGWPTTLYLAIAIFLGLVLYGALVGLHKIEQTFDKKNVKAGLWVPVFIVILTILSYLGEYGGINVLHFPLDLIVVAIASAIIYVWAIKSGIKTEEIAAMIANEDQYV

SEQ ID NO: 5336 - protein, 856 aa, Brassica rapa
QRCVRNIYYQSYTFSFVLAFVVLILFHPAISMHFNTLLSTESLTISGNRTLVSPGHVFELGFFKNTLNSRWYLGIWYKNLSDRTYVWVANRDSSLSNAIGTLKLCRSNVVLRGRSNKFVWSTNLTRGNERSPVVAELLANGNFVIRYSYNNDASGFLWQSFDFPTDTLLPEMKLGYYLKTGLNRFLTSWRNFNDPSSGEFSYKLETRRLPEFYLLKNGSPGQRSGPWNGGQFSGIPEDQTLSYMVYNFTENSEEVAYTFRMTDNSIYSRIQLSPEGLLERLTWTPTSGTWNLFWSAPVDIQCDVYMTCGPYAYCDVNTSPVCNCIQGFMPFDMQQWALRDGTGGCIRRTRLSCSSDGFTRMKNMKLPDTKMAIVDRSIDVKECEKRCLSDCNCTAFANADIRNGGTGCVTWTGELEDIRNYIGNGQDLYVRLAAADLVKKRKANGKIISLIVGVSVLLLLIMFCLWKRKKNRAKASATSIDNQQRNQNVLMNGMTQSNKRQLSRENKTEEFELPLIELEAVVKATENFSNCNELGQGGFGIVYKGMLDGQEVAVKRLSKTSLQGIDEFMNEVRLIARLQHINLVRILGCCIEADEKILIYEYLENSSLDYFLFGKKRSSNLNWKDRFAITNGVARGLLYLHQDSRFRIIHRDLKPGNILLDKYMIPKISDFGMARIFARDEIQARTDNAVGTYGYMSPEYAMDGVISEKTDVFSFGVIVLEIVSGKRNRGFYQVNPENNLPSYVWTHWAEGRALEIVDPVILDSLSSLPSTFKPKEVLKCIQIGLLCIQERAEHRPTMSSVVWMLGSEATEIPQPKPPVYCLIASYYANNPSSSRQFDDDESWTVDKYTWSVIDAR

SEQ ID NO: 5337 - protein, 81 aa, Solanum tuberosum
LGLKHKEHIAAYGEGNERRLTGKHETANINTFKWGFANRGASVRVGRDTEKAGKGYFEDRPASNMDPYVVTSMIAETTIVG

SEQ ID NO: 5338 - protein, 422 aa, Brassica maurorum
YDHFYTFSFVILVLFPHAFSTNTLSSNESLTISSNKTLVSPGDVFELGFFKTTTRSSRGGSTDRWYLGIWYKTTSQRRTYVWVANRDNPLHNSIGTLKISHASLVLLDHSDTPVWSTSLTGVAHLPVTAELLANGNFVLRDSKTKDLDRFMWQSFDFPVDTLLPEMKLGRKVNSSEKEKILTSWKSPTDPSSGDYSLILETEGFLHEFYLFKNEFKVYRTGPWNGVRFNGIPKKMQNWSYIVNSFIDNKSEVAYSFQVDNNRNIIHSRFRMSSTGYLQVITWTKTVPQRNMFWSFPEDACDPYQVCGPYAYCDMHTSPMCNCIKGFVPKNASRWDLRDASGGCVRSSKLSCGEGDWFLRMSQMKMPETTEAFVDKTIGLEECKEKCMRDCHCTAFANMDIMNGGSGCVTWTGELVDMRKYDA

SEQ ID NO: 5339 - protein, 580 aa, Novosphingobium aromaticivorans
MAIREQRRSHADPCASHPLFGPATRRTRGRREADDRGARACRRLCGRRARTRAAPAADPGESSRGRGQGPGGIPIAVRATRTGGKPRTMADRTLAQRRDRMGLRPYCRHAARGPSLSAALRLARRASRRDLPRPLCPGVGAGPRGLRSAAAARGRVWCRPRASAGRALARSGRPARKAGQGNRKPPACRSSRRCYGGPRDSAGSAEAHRRRLTSRRKKTPEKTDEGVSMKIAVLPGDGIGPEVTREAVRVIEALGLGDIEMKEAPVGGAAYKAYGHPLPPETLEIARLSDGILFGAVGDPDCDSLERHLRPEQAILGLRKALTLFANLRPARVFKGMEDFSALRPEVAGAIDLLIVRELNGDVYFGEKGFRTAANGDREGYDVMSYSESEVRRIAHVAFRAAMGRKKRLCSVDKANVLETSQLWRDVMLEVAKDYPEVALEHMYVDNAAMQLVRAPGNFDVVVTGNLFGDILSDQASMCVGSIGLLASASLGERETEYGTFGLYEPIHGSAPDIAGKGLANPMATILSAAMLLRHSLGLEVAADRIEAAVAKALADGVLGRDLGGTAGTTEIGDAVLARL

SEQ ID NO: 5340 - protein, 256 aa, Thermoplasma volcanium
MQAVVTVVLDMIRMNISVRNLKEITDLLSTIVSEAKFKVDENGMSVTAVDPAHVAMIRLEVPKEVFSEFRSDGTEEIALDIDRLKSVIRLANSSENVGITKDKEKLKFDLGNISKSVSLLDPSTIVTPKIPNIASEYYAIIKRSDFERGLRAAEDISDSIRFVLSSEGFRATSHSESEESEMVLPKDMLSDLSCSDTIKSSYPLEYLLKFIKAVSSADSLKISFRDDYPLSIEFYLDQNPSAKIKGLFLLAPRMEQ

SEQ ID NO: 5341 - protein, 113 aa, Zea luxurians
  unsure (1)..(113): unsure at all Xaa locations
MGRRACCAKEGVKRGAWTTKEDDALAAYVKAHGEGKWREVPQKAGLRRCGKSCRLRWLNYLRPNIRRGNISYDEEDLIIRLHKLLGNRWSLIAGRLPGRTDNEIKNYWXSTLV

SEQ ID NO: 5342 - protein, 334 aa, Desulfovibrio desulfuricans G20
MTGRHEAMQPQKVLVCGGAGYIGSHMVRALMRAGHLPVVFDNLSTGHLESIGQAEFVRGDLLDMQALRRVFGEYCFDAVMHFSAKSLVGESVVHPALYYTNNVTGTCNLLEAMRESGVGRLVFSSTAAVYGDPQAPVIAEDHPCLPVNPYGRSKLMVETMLADHAAAYGLRSVSLRYFNAAGADEDGGIGEAHSPETHLLPNVLLAALGRNDGLKIFGDDYTTPDGTCVRDYIHVTDLCSAHLAALEYMTLHAGAAVFNLGNGNGFSVREILDAACRVTGVDIPFTVEGRRAGDPPMLVADAARARTALGWTPVYTDIDRIIETAWRWHSDQRY

SEQ ID NO: 5343 - protein, 392 aa, Heladena multiflora
DLEPVNPFDVPVTAAGALKSYKLAAKAISRLQSLPSGNISLLCDVLVKEVRDLTGYDRVMVYKFHEDEHGEVVSECRRSDLESYLGLHYPATDIPQASRFLFMKNKVRMICDCLAPPVKVIQDERLPQPLSLCGSTLRSPHGCHAQYMANMGTIASLVMSVTINEDDDTMDGDQQQMARKLWGLVVCHHTSTQFVPFPLRYACEFLIQVFGVQINKEVELAAQAREKHILQIQTTLCDMLLRDAPVAIITQSPNVMDLVKCDGAALYYKNKFRLLGVTPTEAQIRDIAEWLLEYHSGNTGLSTDSLMEAGYPGASVLGDAVCGMAAVSITSRDFLFWFRSHTAKEIKWGGAKHDPDDKDDGRKMHPRSSFKAFLEVVKWRSLPWEDMEMDAI

SEQ ID NO: 5344 - protein, 216 aa, Triticum aestivum
MADVEYRCFVGGLAWATDDQSLQNAFSKYGDVIDSKIITDRETGRSRGFGFVTFASDEAMRQAIEAMNGQDLDGRIITVNEAQSRRSGGGGGGFGGGGGGGGYGGQRREGGGGGGYGGGGGGYGGGRSGGGGGLGCPGPSDLGRRVRQGRPGHPLRPHPGCQLPEHKGLLDLTCQTVADMIKGKTPEEIRKTFNIKNDFTPEEEEEIRRENQWAFE

SEQ ID NO: 5345 - protein, 327 aa, Prochlorococcus marinus subsp. pastoris str. CCMP1378
MASTLLFTALKEAIDEEMANDVNVCIMGEDVGQYGGSYKVTKDLYEKYGELRVLDTPIAENSFTGMAVGAAMTGLRPIVEGMNMGFLLLAFNQISNNMGMLRYTSGGNYKIPAVVRGPGGVGRQLGAEHSQRLEAYFHAVPGIKIVACSTPTNAKGLMKAAIRDNNPVLFFEHVLLYNLSEELPEGDYICSLDQADLVKEGKDITILTYSRMRHHCLKAVEELDKKNIDVELIDLISLKPFDMKTISKSIKKTNNVIIVEECMKTGGIGAELIALITEECFDDLDTRPIRLSSQDIPTPYNGNLENLTIIQPHQIVEKVEEVINGSI

SEQ ID NO: 5346 - protein, 466 aa, Escherichia coli O157:H7 EDL933
  unsure (1)..(466): unsure at all Xaa locations
MGQSSQPHELGGGLKSRHVTMLSIAGVIGASLFVGSSVAIAEAGPAVLLAYLFAGLLVVMIMRMLAEMAVATPDTGSFSTYADKAIGRWAGYTIGWLYWWFWVLVIPLEANIAAMILHSWVPGIPIWLFSLVITLALTGSNLLSVKNYGEFEFWLALCKVIAILAFIFLGAVAISGFYPYADVSGISRLWDSGGFMPNGFGAVLSAMLITMFSFMGAEIVTIAAAESDTPEKHIVRATNSVIWRISIFYLCSIFVVVALIPWNMPGLKAVGSYRSVLELLNIPHAKLIMDCVILLSVTSCLNSALYTASRMLYSLSRRGDAPAVMGKINRSKTPYVAVLLSTGAXFLTVVVNYYAPAKVFKFLIDSSGAIALLVYLVIAVSQLRMRKILRAEGSEIRLRMWLYPWLTWLVIGFITFVLVVMLFRPAQQLEVISTGLLAIGIICTVPIMARWKKLVLWQKTPVHNTR

SEQ ID NO: 5347 - protein, 1123 aa, Lycopersicon esculentum
MSSSRPSQSSTTSSRSKHSARIVAQTSIDAKLHADFEESGDSFDYSSSVRVTSVAGDEEKPKSDKVTTAYLHQIQKGKFIQPFGCLLALDEKTLKVIAFSENAPEMLTMVSHAVPSVGEHPVLGIGTDIRTIFTGPSGAALQKALGFGEVSLLNPVLVHCKNSGKPFYAIVHRVTGSLILDFEPVKPYEVPMTAAGALQSYKLAAKAITRLQSLPSGSMERLCDTMVQEVFELTGYDRVMGYKFHEDDHGEVVSEITKPGLEPYLGLHYPATDIPQAARFLFMKNKVRMICDCRAKHVKVVQDEKLPFDLTLCGSTLRAPHYCHLQYMENMNSIASLVMAVVVNDGDEEGESSDSSQSQKRKRLWGLVVCHNTTPRFVPFPLRYACEFLAQVFAIHVNKELELENQFLEKNILRTQTLLCDMLMRDAPLGIVSQSPNIMDLVKCDGAALLYKNKIHRLGMNPSDFQLQDIVSWLCEYHTDSTGLSTDSLYDAGFPGALALGDAVCGMAAVRISDKDWLFWFRSHTAAEVRWGGAKHEPGEKDDGRKMHPRSSFKAFLEVVKTRSIPWKDYEMDAIHSLQLILRNAFKDAEVVNSNTNSIYKKLNDLKIDGMQELESVTAEMVRLIETALVPILAVDVDGQVNGWNTKIAELTGLPVDEAIGKHLLTLVEDSSVDTVNKMLELALQGKEEKNVEFEIKTHGPSRDSSPISLIVNACASKDVRDNVVGVCFMAHDITGQKSIMDKFTRIEGDYRAIIQNPHPLIPPIFGTDQFGWCSEWNTAMTKLTGWRRDDVMDKMLLGEVFGTQAACCRLKNQEAFVNFGVVLNNAITGQESEKIPFGFFARYGKYVECLLCVSKRLDKEGAVTGLFCFLQLASHELQQALYVQRLSEQTALKRLKVLAYIRRQIRNPLSGIIFSRKMLEGTSLGEEQKNILHTSAQCQRQLNKILDDTDLDSIIDGYLDLEMLEFKLHEVLVASISQVMMKSNGKNIMISNDMVEDLLNETLYGDSPRLQQVLANFLLVSVNATPSGGQLSISGRLTKDRIGESVQLALLEFRIRHTGGGVPEELLGQMFGSEADASEEGISLLVSRKLVKLMNGEVQYLREAGQSTFIISVELAVATNSS

SEQ ID NO: 5348 - protein, 960 aa, Streptomyces coelicolor A3(2)
MSAATPPFRDPQLPFAKRVDDLMSRLTLDEKTAFLHQFAPAVERLGIAPFRTGQEALHGVAWMGPATVFPQAVGLGATWNEELVRRVGEAVSKEARAMRARDDRVGLNVWSPTVNLLRHPLWGRNEEGYSEDPRLTSAVATAYTRGLRGDHPAYWRTAPVLKHWLAHNNETDRDTSSSSVRPRVLHEYDLRAFRDTVEAGAVAGVMPAYNLVNGRPNHLSPHLGRHLRTWTQEDLLVCSDAGAPSNLVDSEHYFDTHEEATAAALRAGVDSFTDHGTDSSKIVARVRGALEAGLLTEADVDAAVRRQLSVRFRLGEFDPENDPYSGAADTGADFDTPEHRALARDAAEQAVVLLKNDGVLPLAPETRVAVVGLLADECKLDWYSGTLIHRSTPLEGLYERFGADRVSFAEGVDRVRLRTADGRFLHVLPADDASAEAPGTEGALDPALLAGRTDLPPLTTDAVGTELALIDWGEGVLTLRASDGRYLSVAEDGFVRASADQPGGWVVQETFRLEPHDDGHLLRHTGTGRPVQVAADGVKVAAPDAAAGAAAGGAGSADAEVFELVVVERGEDAVTRVAAGADVVVVVAGNDPHINGRETEDRTTLRLPAQQERLLRAARAANPATVLALVSAYPYAVGVETLPAVLWTAHGGQAAGTALARILAGDVSPAGRLPQTWYSDDADLPGLLDYDVIGGRQTYLYFEGTPLFPFGHGLSYASFGYGDLTAQVRDGAVAVSFTVTNTGEVSADEVAQLYVRAEAPSVPRPRRELLAHRRLTLAPGASDRVSFEVPLSALAFWDVAHDRWRLEPGPYALLVGASSEDVRLTTTVTIDGEPAVPRPVGARGVQAVDFDEQSGTEIVDRTKAAGDAVAAVSGRTGELLYRDCDFGAGAAGVTVSVAGAGSVEVALDGGPAVAVLSPDAPTAGPYDYVELASAFTAEGVHDLRVTLRGALRLAHVGFSG

SEQ ID NO: 5349 - protein, 398 aa, Glycine max
  unsure (1)..(398): unsure at all Xaa locations
MSARSEHQSVPLSVLLKRELANEKIEKPEVVILHGQASENKKGEDFTLLKTECQRVLGDGVSTYSVFGXDEWVAALPRALVAGFVKTDKDFQEKAQTSGTTVTFMIVEGWVLTVASVGDSRCILEPSEGGIFYLSADHRLESNEEERVRITSSGGEVGRLNTGGGTEVGPLRCWPGGLCLSRSIGDMDVGEFIVPVPHVKQVKLSTAGGRIILSSDGVWDALSAEMALDCCRGMPPEAAATHIVKESVQAKGLRDDTTCIVIDILPLEKPPTSVPTQKKPVKGMLKSIFRKKSSESSTFIEKEYLEPDVVQELYEEGSAMLSERLETKYPLCNMFKLFICAVCQVEIKPGEGISIHEGLTNPGRLRPWDGPFLCSSCQEKKEAMEGKRTSDRLSSGSD

SEQ ID NO: 5350 - protein, 151 aa, Zea mays
  unsure (1)..(151): unsure at all Xaa locations
YFNCTLTVACALLVGGEYLNNWSCKEHSCLTGNILSSAGLIINIVSVVLNSYGKIGTDIEXDYKCFWLVMHALEHPDEMHXNILLDCYGQSDSACVALVMDXCTELKLDEVFHACYTESYNMLIVYIEAHSNKEVQSVNKSLLDNIYTRDK

SEQ ID NO: 5351 - protein, 198 aa, Gossypium barbadense
GQNPLFPRILGHEAGGVVESVGEGVIDVQPGDHVLPIFTGECRECPHCLSEASNMCDLLRINTERGGMLHDGHTRFSKDGKPIYHFLGTSTFSEYTVVHVGQVAKINPEAPLDKVCVLSCGMSTGFGATVNVAKPKKGGSVAIFGLGAVGLAAAEGARVCEASRIIGIDLNPNRFEEAKKFGCTEFVNPKDHNKPVQE

SEQ ID NO: 5352 - protein, 155 aa, Guillardia theta
MNCPVPENQLPINEYNKLTSAWDFSWACKIGKLYYKFLLKMQLCLFLFFCICLNFLDSKYETGLYSLILSTLFICLICLRTYLGFRYIYVRLLKSALPYEESSWYDGQVWVKNINYLIKDRLVADYTVLPILSRLKISFTINFSFLICLLLRFIF

SEQ ID NO: 5353 - protein, 531 aa, Ferroplasma acidarmanus
MVDIETQNNVVKSKYKKDLGLWSVIMLALGGILGPAVAYAPVYTLAYAGPIGILAWPIAMVMIIPIGLVYAELGTTWPKAGGVAYYPSKSNGPIVGAINGWSSMVGYLFVGPVIVFAVVEYLSFYFPSLYANGTLTYLGIIVAEIVLILVFLVNILRIKHMGAINLILTAITLLLIGVVIIALAFYFKLSNITSTAGGVIPYGFTGFFGAITLTVFGYGGFRQPIDYSEEVKNPGKSIPIAIIVALLVSGLVFSLESLVFAGAINFSKLGISTGNWSALFAYSSPYATLSKVLVLPAIVIIAIIVALIATFKDGVIYYGGTARVGEVLAREDKFLPKLFDRMNVRGIPVYSIVLVLIITIVLVALGRSLATIIGIMVDGFLLSYAPGAISLMVFRKTDMVTKRPFKLPFAKILAPIAFIVANLLVYWSGWAAVEIIIPLDFAGILLVLVYSHYTKIDMKYAMYGIWMPVYLIFILIMSRIGSSLFHGLNYIAFPYDTIVFIIVTMVFYFVGVNLGVKSVNYITNKKAGNPE

SEQ ID NO: 5354 - protein, 122 aa, Zea mays
STWRSWLEDSQKIEETDEARKKFSNAKAISSSQFFGTQNREEKEAQLSLQKFAGSSSISSADLFGRNDADNSNLDLSAADLINRISFQASQDLSSLKDIAGETGKKLTSLASNFISDLDRIL

SEQ ID NO: 5355 - protein, 214 aa, Paeonia tenuifolia
IVESVGEGVTDLKPGDHVLPVFTGECKECRHCKSEESNMCDLLRINTDRGVMLNDGKSRFSINGQPIFHFVGTSTFSEYTVVHVGCVAKINPEAPLDKVCVLSCGISTGLGATLNVAKPKKGSSIAIFGLGAVGLAAAEGARIAGASRIIGVDLNPKRFEEAKKFGVTEFVNPKDYNKPVQEVIAEMTDGGVDRSVECTGSIMAMISAFECVHD

SEQ ID NO: 5356 - protein, 254 aa, Oryza sativa; identical to SEQ ID NO: 3710

SEQ ID NO: 5357 - protein, 497 aa, Staphylococcus aureus subsp. aureus N315
MSKVQNESNNVVKRGLKDRHISMIAIGGCIGTGLFVTSGGAIHDAGALGALIGYAIIGIMVFFLMTSLGEMATYLPVSGSFSTYATRFVDPSLGFALGWNYWFNWVVTVAADITIAAQVIQYWTPLQGIPAWAWSALFLVIIFSLNSLSVRVYGESEYWLALIKVITVIVFIAIGLLTIVGIMGGHVVGFEIFNKGEGPILGGNLGGSLLSILGVFLIAGFSFQGTELIGITAGESENPERAVPKAIKQVFWRILLFYILAIFVIGMLIPYDSSALMGGSDNVATSPFTLVFKNAGFAFAASFMNAVILTSVLSAGNSGMYASTRMLYSMSKDKLAFEAFGKTNKNGVPYMSLLVTAIIVVIIFVLQSLTKGAYEYIVAASGLTGFIAWVGIAVSHYRFRRAFDKQNYDKSKLKYTAKLFPFGPLFAGFLCIVVIIGQDVDFIKTGDFNFSRFLITYMGIPVFLAFFIYHKLRYKTKKIPLEQVDLRQDVSMDEIKG

SEQ ID NO: 5358 - protein, 130 aa, Rickettsia conorii
MLRGDVESIKIGNNTNVQDGSVIHASRFNGPVEIGDNITIGHLSLIHACTIHNNAFIGMRATIMDYAVIEEYAFIAAGSLILPKKIIKSQELWMGSPAKFVRYLTDQDLEYMQDNVRHYVELENVYKILV

SEQ ID NO: 5359 - protein, 529 aa, Oryza sativa
MAEDAPSAAAAEGSQHASAAEGGSAAAAASAAPAAKAAEALLPSLSIWPPSQRTRDAVVRRLVQTLVAPSILSQRYGAVPEAEAGRAAAAVEAEAYAAVTESSSAAAAPASVEDGIEVLQAYSKEVSRRLLELAKSRAAPSPAAAAPAEGAASESEAAAAPAPAEEPKKSLILVLNFTSKSLGIPEDSSRRGHTNATVANAAASARVGSETRNPARPIEASDLLARADPATSPPPGAIRPWSASEFEANGAPIRKSKSLPRLSLCSLLSSPSSLASCSASSLECAAIHPGGRDGDGAEIGLGLSGFGVLFSFLGIIMLFDKGFLAIGNILFVSGVSLTIGPKSTVQFFTKPKNHKGSIAFGIGFFLVLIGWPFFGMLAEAYGFVKLFRGFWPTAAVYLQKSPTFGWIFHHPLVTSVQGKTSPGVSRFAAGAGSLQGMPGHLQRNLSDTCGFFWLACDSLVLLDNRILTSVESRMYQFQKDLSSYVFRLLNAKPIFLDQFLGHTVLKNDSLGHTNLLLITPISTIVGKEE

SEQ ID NO: 5360 - protein, 246 aa, Glycine max
  unsure (1)..(246): unsure at all Xaa locations
MPLSAPPKALNSPIHHPHGPSFSSISKPKPKPNGLTLLPLNRAFRGLEISVPSPSSLHSNVAKHVDVATLSNLCVDIVLNVPQLPPPSPLQRKAFMDRLAQSPPDKKYWEAGGNCNMAIAAARLGLNCISIGHVGNEIYGKFLSDVLHDEGIGLVGMITNDDIVNSSGSSASCETLLCWVLVDPLQRHGFCSRADFCEEPILHWMSKLSSEVKMAIKNSKXVLVCNGYGFDELSPGAILSAMEYAV

SEQ ID NO: 5361 - protein, 201 aa, Azoarcus evansii
MPCYEIDGLRPVVHPSAYVHPDAVLVGDVHIGARCYVAPLASLRGDFGPIILREGANVQDCCVMHGFPGIDTLVEENGHVGHGAILHSCHVGRNALVGMNAVVMDRAVIGESSIVAACSFVKAGMEIPPQVLVAGVPAKVVRTLTRQEMDWKVEGTRCYHDLAARSLTTLKPCEPLTEAEADRPAMVLPEVVPLFELKRRT

SEQ ID NO: 5362 - protein, 108 aa, Zea mays
KKPVSLDDDRRSTYDQHYSRNSSLFAALDDERKLLVPVGVQQPHAYARSLARFASKLGPVGWDVAANRIRRALPPGTSFGPGWVVDGEPPQNSQWAPAASTNPSSEPT

SEQ ID NO: 5363 - protein, 248 aa, Rhodobacter sphaeroides
MNQIDLAGRVAVVTGGAQGIGRAVAERLIASGARVCLWDRDAGRAAATAAELGGNSFFQVVDQVDFTAVKAAADATEATGGRIDILIANAGIAGSNAPVADYPVEEWHRIIDINLNGVFHCCKAVVPGMKAHGYGRIVTVASIAGKEGNPNAAAYSASKAGVIALTKSLGKEVAGQDIAVNCVTPAAARTQIFDQMAQSHIDYMLSRIPRGRFLDLDEAAAMIAWLASAENSFTTGAVFDLSGGRATY

SEQ ID NO: 5364 - protein, 463 aa, Saccharomyces cerevisiae
MVAISEVKENPGVNSSNSGAVTRTAAHTHIKGLGLDESGVAKRVEGGFVGQIEAREACGVIVDLIKAKKMSGRAILLAGGPSTGKTALALAISQELGPKVPFCPLVGSELYSVEVKKTETLMENFRRAIGLRIKETKEVYEGEVTELTPEDAENPLGGYGKTISHVIVGLKSAKGTKTLRLDPTIYESIQREKVSIGDVIYIEANTGAVKRVGRSDAYATEFDLETEEYVPLPKGEVHKKKEIVQDVTLHDLDVANARPQGGQDVISMMGQLLKPKKTEITEKLRQEVNKVVAKYIDQGVAELIPGVLFIDEVNMLDIEIFTYLNKALESNIAPVVVLASNRGMTTVRGTEDVISPHGVPPDLIDRLLIVRTLPYDKDEIRTIIERRATVERLQVESSALDLLATMGTETSLRYALQLLAPCGILAQTSNRKEIVVNDVNEAKLLFLDAKRSTKILETSANYL

SEQ ID NO: 5365 - protein, 118 aa, Salvia columbariae
DLKPENVLVRDDGHIMLSDFDLSLRCAVSPTLIRNSALNSDRGSGFCVQPACIEPTSACIQPTCFLPRLFPQKSKKKSGKSRTEAGMLSGGTLPELVAEPTAARSMSFVGTHEYLAPE

SEQ ID NO: 5366 - protein, 162 aa, Zea mays
  unsure (1)..(162): unsure at all Xaa locations
MAAAGDAGEKKMITLKSSDGEEFEVEEAVAMESQTIRHMIEDDCADNGIPLPNVNSKILSKVIEYCNKHVQAKPADGAAAGAGAGASDAAPAAPAEDLKNWDAEFVKVDQATLFDLILXCQTVADMIKGKTPEEIRKTFNIKNDFTPEEEEEIRRENQWAFE

SEQ ID NO: 5367 - protein, 406 aa, Escherichia coli
MSQPITRENFDEWMIPVYAPAPFIPVRGEGSRLWDQQGKEYIDFAGGIAVNALGHAHPELREALNEQASKFWHTGNGYTNEPVLRLAKKLIDATFADRVFFCNSGAEANEAALKLARKFAHDRYGSHKSGIVAFKNAFHGRTLFTVSAGGQPAYSQDFAPLPADIRHAAYNDINSASALIDDSTCAVIVEPIQGEGGVVPASNAFLQGLRELCNRHNALLIFDEVQTGVGRTGELYAYMHYGVTPDLLTTAKALGGGFPVGALLATEECARVMTVGTHGTTYGGNPLASAVAGKVLELINTPEMLNGVKQRHDWFVERLNTINHRYGLFSEVRGLGLLIGCVLNADYAGQAKQISQEAAKRGVMVLIAGGNVVRFAPALNVSEEEVTTGLDRFAAACEHFVSRGSS

SEQ ID NO: 5368 - protein, 391 aa, Triticum aestivum
  unsure (1)..(391): unsure at all Xaa locations
MARLALSDCRGLTPLRARSRGGAIALPSPPHLAAGPRRPAAAAIHRDWALRVAAPTRLASVFEEDKRSLGGAEEAGSSSAGFNPGAPPPFGLAEIRAAIPKPSRPKDPWRSMSYVLRDVLVVLGLAAAAARADSWLVWPLYWAAQGTMFWALFVLGHDCGHGSFSSNPKLNSVVGHILHSSILVPYNGWRISHRTHHQNHGHVEKDESWHPLPQRLYNSLDNMTKKLRFSMPFPMLAFPLYLFARSPGKEGSHFNPNSDLSPPPPTRPVLTSTASWLAMIGVLAGLSFVMGPLKMLKLYAVPYVIFVMWLDFVTYLHHHGHEDKVPWYRGKEWSYLRGGLTTLDRDYGLINNIHHDIGTHVIHHLFPQIPHYHLVXATEAAKPVLGXYYKE

SEQ ID NO: 5369 - protein, 140 aa, Zea mays
MASGSMKREISETHDTLRFGLNAGVKADLAPPHPLQSSIQSEAKFWADKKKFGTEAIYGSALNIRKDLDAQILSRFQRPPGALPSSLLGYEALTGSLDDFGFEDYLNMPQDSEGFRQPDMHHGMEVRLGLSKGPICPSLS

SEQ ID NO: 5370 - protein, 1347 aa, Neurospora crassa
MVSFVQPPVLYGFDPEIQEDHPFDNVWSAGFVAKIYTNEQHNEVRRFMADSMAMQELKYANNVFVLFRALRRCGEFWGQPEFWNAMARGYSTKPSYVRELVYMLVDARKTALQRMRRVHNSPTTHVVDEFIAWLDQYGPQLTSQNAGRLTDPLLFSTAAGFFNDMRGTLINCNNIPTFVIGKPPRRTRILEAQRSLSSASPQVPLDSQMQPNQISPTRSKTPPTMPVKTEPRGTGWEFLLEPNRKSEQQPVPPRKRSGSPFAEDDVHPTKRHHSSGRYPEQHSAPQHWHPDNNRSPLRKSDKDEYHGWHQFGERLPPLGPRSEEAFLFRPPTAPRAQSQLERQHGHDQQRSDQQRLRQQQMENQKLRQRQVEEERLEAQKIKERRLELQKLEQEKLRLERELQEHQELLEKQRLEQQKLDQQKLQEQARPKECRSLDEQQGERIRLLDERTQKQAQEHRKQAEAQKQAVEARKRFEEQKRLEEQKRLAEERKKAEAQKRCEEERKQAEARKQAEEARKRIEEQKRLEEQKKLEEQKRLEEQKKLEEQKRIEEQKRIEEQKKLEEQKKLEEQKRIEEQKRIEEQKKLEEQKKLEEQKRLEEERQQAQARKQAEDQKRFEEERKRAEAEQAEAKKKAEEARVRIEEQKRLEEQKALEEERKRVETQKQVEAQKRFEEERKQAEEARKRLEEERKHAEIKKRREEERKETEAQQRLEQKRLDEERNQVEAQKQAEEARKGLEEQRKREVHKQVDDQSRMKVGEQERQEQNSQKERKLEEVRHPERTDDSKSIAHLSSSTIATVQPSAASFFLSGSNLRMRVEEANKKSPKLHRYRSQANQARSPYTTTRDHLLLWNGRLVVPESTLQMNIMSDCHRGPGGVHYPRKRTKKALFTKFYWPSRGEDLERFLANCPECRLRPEVQDQPHERKEKKPELNGSASTTQSFAPNKQEQQRDDSRTADNTGPPECSGTLLSTTNPPAASHHSDAVVPAPFVSERADIPGLRPSPHPSVVSSDEEVAGWKEMVSTLEKKLADTEGQLKAAAVIRPLERSISKFQSDVSGLHGDMSTLFDSFQVMVDRMAFVQDDIMCIKENFQSKERQHNGIAEFSVSVEDVKTSVALVLSEISDLRLQHQQLEKRVAATPLRTAPSRDSEALMNALATISQKVDALNNEVSDLRKEGQAQREIAPTPATNTGDLKDIMGVVKTISDNVDQLKNEVMDLKEERARMNDTADSSASISVSVDAELIKALFGEQKALIQSQSQKLDRMAKEISSLQAQVYASGRTQPQPKSLKQAMAAAEKDLQHHLITMQNYRNKMAERGNPPSTVVANMADMCQTLEECIQYSKTGQK

SEQ ID NO: 5371 - protein, 170 aa, Mesembryanthemum crystallinum
MASQSTDQPKSIHDFIVKDARGNDVDLSIYKGKVLLIVNVASQCGLTNSNYPELTKLYEQYKDKGLEILAFPCNQFGNQEPGDNEQIMEFACTRFKAEFPIFDKVDVNGSNAAPVYKYLKSSKGGLFGDGIKWNFTKFLVDRDGKVVDRYAPTTSPASIEKDIKKLIGTS

SEQ ID NO: 5372 - protein, 434 aa, Oryza sativa (japonica cultivar-group)
MARGAAGGEVGRSMPAVHDAHDDSENFLELLNSRTLAPELFAEPPACDYLKKMEYGGGGGGGGGGWPEHQFTAAAALEKHLSSAAAAGYGGALAHHHHAAGAPERLTANLSDLVSNWSIAPPNHGHHVGGAAACDNPAVAAAMAAAHGGGNVKQSGSSFLDSGGGGGGAMLQQESSSSTGTGGGGQDFLRPMGLAAGSSSYSSMLGLSSRMYGGGGTATMDVPWGSSNAGAARSLSDLISFGGGAMDKPPPPPPSSAPARTSSADYKKQQGQQEISSPVKTSSSGGGGKEGKKKRSEEAAGSEGSTKKSKHEATSPTSSLKVPKVKLGDKITALQQIVSPFGKTDTASVLYEAINYIKWLHEQVQLLSDPYMKSSSSKDYNAWGGLDRKEKADAEVDLRSRGLCLVPVSCTPQVYRDNNGPDYWTPPYRSCLYR

SEQ ID NO: 5373 - protein, 379 aa, Arabis hirsuta
MITTGQIIRCKAAVAWEAGKPLVMEEVEVAPPQKHEVRIKILFTSLCHTDVYFWEAKGQTPLFPRIFGHEAGGIVESVGEGVTDLAPGDHVLPVFTGECGDCPHCHSEESNMCDLLRINTERGGMIHDGESRFSIDGKPIYHFVGTSTFSEYTVVHSGQVAKINPDAPLDKVCIVSCGLSTGLGATLNVAKPKKGQSVAIFGLGAVGLAAAEGARIAGASRIIGVDLNSKRFDEAKKFGVTEFVNPKDHDKPVQQVIAEMTNGGVDRSVECTGSVQAMIQALECVHDGWGVAVLVGVPSKDDAFKTHPMNLLNERTLKGTFFGNYKPKTDIPGVVEKYMNKELELEKFITHTVPFSEINKAFDYILKGESIRCIITMGA

SEQ ID NO: 5374 - protein, 380 aa, Glycine max
MGDTVVAEVPAKRGRGRRALKEKTPSTNDANIIIATPISPSSDKAQVPSKKKQDSKKQQSFEKELLEMQEMLQQMRLEKEKTEELLKLKDEALKQKDEELKNRGREQEKLQSELKKLQKLKEFKPTMNLPVLKDNEEKKDKKKKGCSEKKRPSPPYILWMKDQWNEIKKANSEAEFKEISTMLGSKWKTVTAEEKKPYEEIYHAEKEAYLQMIAKEKRETEAMRLLEDEQKQKTAMELLEQYMQFKQEAEKEGKKNKKEKDPLKPKHPMSAYFLFTNDRRAALVAENKNFLEVPKITAEEWKNMTEEQKRPYEEMAKKNKEKYALEMEAYKQKKDEEAAHFMKEEEEHMKLQKQEALQLLKKKEKTENIIHARSRKPNNN

SEQ ID NO: 5375 - protein, 249 aa, Triticum aestivum
MARGSRPGRNGGGGGGCASCCLGFLLKFLAFLQAFAAVSAVLYAASILSRWARHHELHFDRLLPDLWFACAVMAAGLLYCAILLAGYVAAEVNSGCCLCFYTILAMAMMLLEAAVAGHLLLNEHWMQDLPYDRTRELENLVSFVNNNLDLCKWAALATVATQAFSLFLAITLRAMVSSTNADFDSDEDFVVIRRPLLLAQGAPAYLPTTADPRGAHPGLWSSSMRQKYGLNSTSDYTYNTLDQNAVPPQ

SEQ ID NO: 5376 - protein, 433 aa, Pseudomonas aeruginosa UCBPP-PA14
MIGLAYLTPMTVFDTFGIVSGISQGHVPTAYLLALAGVLFTAISYGKLVRQFPTAGSAYTYAQRAINPHVGFMVGWSSLLDYLFLPMINALLAKIYLTALFPEVAPWVWVVMFVLIMTLINIKSVNLVANFNTVFVLVQLAIIVVFIGLVIHGLNNGEGTATVLSTQPFFSEHAHLSAMVAGATILCFSFLGFDAVTTLSEETRDAAKVIPRAIFLTALYGGVIFITVSYFLQSYFPTNVRFKEPDAALPEIALYVGGKLFQSIFLCATFINTLASGLASQASVSRLLYVMGRDNVLPERIFGFVHPKWRTPSINVLIVGMVALSAISFDLVTATALINFGALVAFTFVNLSVIVHFYVRGGRNRSLKEHFHYLVLPLLGAAIVAVLWLNLESTSLVMGLIWAGLGFGYLFYLTRSFSRPPPRFQESELSPTQ

SEQ ID NO: 5377 - protein, 108 aa, Coccidioides posadasii
MAPKTHISNAENLKKYMELDQRGKIMAEYIWIDAYGGVRSKTKTVNKVVKSADELPEWNFDGSSTGQAPGDNSDVYLRPVAIFPDPFRRGENILVLCETWDSDGSPNK

SEQ ID NO: 5378 - protein, 404 aa, Pyrococcus abyssi
MKAFIAENVRGIYAFDENGKLIAKRYYTDKPEKVLDKLLKGEFVKDLEVFLGELKEKGYDEFVFEHSELTRKAKELGYNAKTEFPNIAGERLRSNPEEFLGENWYEDYYKVGVELTRLRIQEQSGARDKMVIQAIEALDDLDKVINLLVSRLREWYSLHFPEIDEILPRHPQYVSFVKTIGHRDNVEEEKLRELGLSEEKIKKILEAKEKTMGAWMDETDIRVVQDFAEEIDRLYKLRKELEDYIDKAMDDVAPNLKALVGAKLAARLISLAGGLRELAMLPSSTIQVLGAEKALFRHLRTGAKPPKHGVIYQYPAINRSPWWQRGKIARALAGKLAIAARVDYFSGEYIAEELKKELEARIREIKEKYPKPPKRKREERRKPWKEKKKKKKKKKREKEKGKRR

SEQ ID NO: 5379 - protein, 173 aa, Helicobacter pylori
MNLDQLEVSHDADSLCVVIEISKHSNIKYELDKESGALMVDRVLYGAQNYPANYGFVPNTLGSDGDPVDALVLSDVAFQAGSIVKARLVGVLNMEDESGMDEKLLALPIDKIDPTHSYVKDINDLSKHTLDKIKHFFETYKDLEPNKWVKVKGFENKESAIKVLEKAIKAYQG

SEQ ID NO: 5380 - protein, 132 aa, Glycine max
MLPALCLRSPNTTPAPGIGKESHTNPKHFGVNYAFQVPIATKYRYVITKAAKDNQSTNRNTKPNSVICADCDGNGAVLCSQCKGSGVNSVDIFNGQFKAGDSCWLCGGRKEMLCGNCNGAGFVGGFLSTYDQ

SEQ ID NO: 5381 - protein, 388 aa, Aspergillus flavus
MVLPTAPEPPTLLGYHRILSSSAGVRVSPLCLGTMSFGNGWKGVMGECDQATSFNMLDTFYESGGNFIDVANFYQGGDTERWVGEWMAQRQNRDEIVLSTKYTMGYTMFGPQKIKSNYQGNHAKSLRLSVKASLQKLQTDYIDLLYVHMWDFTTSVEEVMRSLNHLVANGKVLYLGVSDTPAWLVVKCNAFARANGLTPFSVYQGHWSCAFRDFERDILPMCESEGMGLAPWGVLGRGQFRSAEEFSREGRKMGPQDEKHRRLGEKLDQMAQQKNTKATSIAQAYVMHKAPYVFPVIGGRKVEHLKENIEALGLVLSEEEIREIDDAEPFDVGFPMNFSFETPTQSYRTNMTSKDIWQLSCNTRLETVPKQQPIEPFQGAKYFGSASK

SEQ ID NO: 5382 - protein, 366 aa, Caulobacter crescentus CB15
MKAAVLREVGKPLQIETVAIGKPGPREVLIRTKAAGVCHSDLHFVEGSYTHALPAVLGHESAGIVEAVGSEVRTVKVGDHVITCLNPYCGHCEVCLTGHMNLCISPETRRSKSDAPRLFKEDLNGATGPMAQFLNLSSFAEMMLVHEHACVAIRKDMPFDRAALIGCSVMTGVGAVMHTSNVRPGETVAVIGCGGVGLATINGAAIAGAGRIIAIDRLAGKLELAKTFGATDVVDASQVDDIAKAVVELTGGGVHHSFEAIGLKATAEASFKMLRRGGTANVIGMIPVGTKIELHGVDFLGERRIQGSYMGSNRFPVDMPRLVDFYMSGKLKLDELISRRIKLEDVNSAFDELKRGELARSVIVFD

SEQ ID NO: 5383 - protein, 223 aa, Zea mays
MVSLKVQKRLAASCLKCGKGKVWLDPNEVSEISMANSRQNIRKLVKDGFIIKKPHKIHSRSRARRAHDAKQKGRHSGYGKRRGTREARLPTKVLWMRRMRVLRRLLRKYREAKKIDKHMYHDMYMKVKGNAFKNKRVLMESIHKSKAEKAASEDTSASGDELIEDLKAKWDAVEDKPTVLLYGGGAVVALWLTSVVVGAINAVPLLPKILELVGLGYTGWFVY

SEQ ID NO: 5384 - protein, 130 aa, Daucus carota
DFEMKLMDIDSEHLGIPEAEYHAIVRMPSAEFARICKDLSSIGDTVVISVTKEGVKFSTRGDIGTANIVCRQNTTVDKPEEATVIEMNEPVSLTFALRYMNSFTKASPLSSTVTISLSSELPVVVEYKIA

SEQ ID NO: 5385 - protein, 203 aa, Gossypium raimondii
AKGQTPVFPRIFGHEAGGVVESLGEGVTDLKPGDHVLPVFTGECGDCRHCKSEESNMCDLLRINTDRGVMLSDGKTRFSINGKPIYHFVGTSTFSEYTVVHVGCVAKVNPAAPLDKIFVLSCGISTGLGAILNVAKPTKGSTVAIFGLGAVGLAAAEGARIAGASRIIGVDLNPNRFEEAKKFGCNEFVNPKDYDKPVQEVLA

SEQ ID NO: 5386 - protein, 261 aa, Triticum aestivum
FGRGRRLTEGSLWSVAAHKVAKLMAKSVLAVLARVSLAFGALVPGLPPPLTGRGWALGHSSGPMHQSTAPDAAIRHSAPIFRQKDTASTSSEPLKPPASTVARSGAQLRSAFVCLPAVTPLLARSPPHGIGEAHDGMTELAMRDELYKMLPVTIRAAVNEKLRERLRGGQVDEEAAATAMDAVDGVLRWLGPMAHDTLRWQDERSMERKQRFSMQPRAPMVQTLHFADRRKADAAIVEVLVGLSCMCWYDDQRWRPADWNE

SEQ ID NO: 5387 - protein, 170 aa, Bacillus anthracis str. A2012
MIYPYKEKNPKIASSAFIADYVTITGDVSIGEESSIWFNTVIRGDVSPTIIGDRVNVQDQCTLHQSPQYPLILEDDVTIGHQVILHSCHIKKDALIGMGSIILDGAEIGEGAFIGAGSLVSQGKKIPPNTLAFGRPAKVVRELTEEDRKDMERIRTQYVEKGQYYKSLQK

SEQ ID NO: 5388 - protein, 122 aa, Zea mays
SKTSKLITKTEDCESFFNFFSPPQVPDADEEIDEDTAEQLQNQMEQDYDIGSTIRDKIIPHAVSWFTGEAAQDEDFEVMDGEDDDDEDDDDEDDEDEDDDDYDTKKTKGTAGGEGQQGERPA

SEQ ID NO: 5389 - protein, 271 aa, Thermobifida fusca
MTPHDTRPDTAAPPTSAAAGTSVDVDLTGRTALVTGAASGIGRACATRLAAAGATVRLVDLNREALDELAQRGIGEPHHVDLTDLDAVDTVARGVDIVVNNAGVQTVCPVHEFPPERFSMMVKLMLEAPFRIVRAALPHMYARNWGRIINISSVHGLRASAYKSAYVAAKHGLEGFSKVVALEGAPHGVTSNCINPGYVRTPLVEQQIADQARAHGIPASDVVETVLLARSPIKRLIEPAEVAEMVAYLCCPEASFINGASLTIDGAWSAS

SEQ ID NO: 5390 - protein, 437 aa, Oryza sativa
MSRRSGYRAAEQEDRQVDLMGDSDFDDDEYGQPIESKEDTSAVDVKKGKDIQGIPWDNLSFSRDRYRKTRMVQYANFENVPNSGKNSEKVCTPVDKGALYYEFQYNTRSVNPTILHFQLRNLVWATTRHDVYLLSQRSVLHWSPFASEKHKVIDLQGHITPSEKHQGNVSEGFYQAQVSTLAVRGNLLVAGGFRGELICKFLDREGISYCCKSTHDDHGITNSLEIFEKPSGSVHFLASNNDCGVRDFDMEKFQICNNFRFPWAVNHTSLSPDGKLVAIVGDNREGLIVDTNSGKTVHELRGHLDYSFASAWNPDGRTFATGNQDKTPIFAKCRIWDIRNLSKSVAVLGGNMGAIRSIRYTSDGRFLAMAEPADFVHIFDVGSGYRRKQVVDFFGEISGISFSPDTEALFIGVHDRTYSSLLQYNRLRFYSYLDSAI

SEQ ID NO: 5391 - protein, 723 aa, Xanthomonas axonopodis pv. citri str. 306
MAADRIETLIARMTVEEKVGQLGVFADMVRPFAPDVNPEANVLNADEVLQQVRLGRVGSLFNGVGAALGVQIQKVAVEESRLGIPVILAADVIHGMRTVFPIPLGEAASFEPALAERTARATAIEATAAGLHWTYAPAVDIARDQRWGRGAEGAGEDVMLGAAFAAARVRGFQGSDLTAHDCLLATPKHFAAYGAVAAGMEYNTVDIAPQTLRDVHLPPFKAAFDAGALTVMSSFNDINGVPASANHELLTEILRGEWQFPGVVISDYTADMELIAHGYAADERDATKKAFLAGLDLSMQSGFYAAHLPSLVESGEVPMATLDASVRRILQLKEAIGLFDNPYRSLDPAREADTTHLPAHDALSRDAARRSIVLLKNEGGVLPLKKSGQRIALIGPFVQDRENIEGCWTLFGDKERYVTLEQGVRAVVGTEDLSVVAGCGLEEALPGGISAAIDAAQAADVVVLALGEPQRFSGEAQSRTEITLPPAQQALAEAIAATGTPMVVLLRNGRALALGGAVRDADAIAVTWYLGTQTGTGVADVLFGDYNPSARLPISFPQATGQQPYFYNHLRTGRPELPTLSEYKARWREMPNEPLYPFGHGLSYTTFAYAQPQLSAAQLGWDEALTITTRVSNTGKVAGEEVVQLYVHDRVASRVRPVRELKGFRKVLLQPGESQDVVFTLERDALAFTNHKGVFGAEPGLFDVWVCASAKSGEAVTFELLER

SEQ ID NO: 5392 - protein, 155 aa, Escherichia coli
MASEKVEMNLVTSQGVGQSIGSVTITETDKGLEFSPDLKALPPGEHGFHIHAKGSCQPATKDGKASAAESAGGHLDPQNTGKHEGPEGAGHLGDLPALVVNNDGKATDAVIAPRLKSLDEIKDKALMVHVGGDNMSDQPKPLGGGGERYACGVIK

SEQ ID NO: 5393 - protein, 372 aa, Catharanthus roseus
MADKENCIRVTRLAKKRAVEAMAASEQQRPSKKRVVLGELKNLSSNISSIQTYDFSSGPQKQQKNKNKRKAKESLGFEVKEKKVEEAGIDVFSQSDDPQMCGAYVSDIYEYLHKMEMETKRRPLPDYLDKVQKDVTANMRGVLIDWLVEVAEEYKLLPDTLYLTVSYIDRFLSMNALSRQKLQLLGVSSMLIASKYEEISPPHVEDFCYITDNTYKKEEVVKMEADVLKFLKFEMGNPTIKTFLRRLTRVVQDGDKNPNLQFEFLGYYLAELSLLDYGCVKFLPSLIASSVIFLSRFTLQPKVHPWNSLLQHNSGYKPADLKECVLIIHDLQLSKRGSSLVAVRDKYKQHKFKCVSTLTAPPSIPDEFFEDI

SEQ ID NO: 5394 - protein, 265 aa, Chrysanthemum x morifolium
MANSDAFELDFSCIDRSMSFPDESADMSPQRKLGKGKIEIKRIENTTNRQVTFCKRRNGLLKKAYELSVLCDAEVALIVFSSRGRLYEYANNSVRGTIDRYKKACLDPPSSGSVSEANAQYYQEESGKLRSQIANLQNQNRQFYRNIMGESLTDMPMKDLKNLETKLEKAITRIRSKKNELLFAEIEYMQKRELELHNNNQFLRAKIAENERSAQQQHMSLMPGSSDYELVTPHQPFDGRNYLQSNEMQPSNDYSCQDQTPLQLV

SEQ ID NO: 5395 - protein, 336 aa, Streptococcus pneumoniae TIGR4
MAILVTGGAGYIGSHTVVELLNLGKEVIIVDNLSNSSILVLDRIEAITGIRPVFYELDVCDKQALRKVFEQESIDAAIHFAGYKAVGESVQKPVMYYKNNIMSTLALVEVMSEFNVKKIVFSSSATVYGINNQSPLIETMQTSATNPYGYTKVMLEQILKDVHVADSEWSIALLRYFNPIGAHESGLIGEDPSGIPNNLMPYIAQVAVGKLSELSVFGNDYDTLDGTGVRDYIHVVDLAIGHIKALEKVSEKTDVYIYNLGSGEGTSVLQLVNTFESVNKIPIPYKIVPRRSGDVATCYANADKAYKELNWRTTKSIEDMCRDTWNWQSKNPNGYN

SEQ ID NO: 5396 - protein, 234 aa, Thermus thermophilus
MRTALVTGSAKGIGRAILLALAREGYAVAVHYRTSEALAEATRQEAEALGVKAIKVRADLTREEEVDRLVEEVRYHLGGVGVLVNNVGDYLYKPIEEVSLEEWRWILDTNLTATFLLTQRVLPLMVAQGFGRIVNLGYAGAGNLLARTHITPYVIAKTGVILYTKAIAKRFAASGITANVVAPGVAENSVSKPLHEIPMGRLALLQEIAQAVLFFVREPYLTGQVLEVAGGWNL

SEQ ID NO: 5397 - protein, 429 aa, Pseudomonas fluorescens PfO-1
MRTVMSKTNAELMARRTAAVPRGVGQIHPIFAESAKNATVTDVEGREFIDFAGGIAVLNTGHVHPKIIAAVTEQLNKLTHTCFQVLAYEPYVELCEKINARVPGDFAKKTLLVTTGSEAVENAVKIARAATGRAGVIAFTGAYHGRTMMTLGLTGKVVPYSAGMGLMPGGIFRALYPNELHGVSIDDSIASIERIFKNDAEPKDIAAIIIEPVQGEGGFYVAPKEFMKRLRALCDQHGILLIADEVQTGAGRTGTFFAMEQMGVAADLTTFAKSIAGGFPLAGVCGKAEYMDAIAPGGLGGTYAGSPIACAAALAVMEVFEEEKLLDRCKAVGERLVTGLKAIQAKHPVIGEVRALGAMIAVELFENGDSHKPNPTAVAAVVAKARDKGLILLSCGTYGNVLRVLVPLTSPDEQLDKGLAIIEECFSEL

SEQ ID NO: 5398 - protein, 188 aa, Zea mays
LPRYIQISRHLKKKKKRGRSRSSWLLLPHRFVFRFWFVGEREEMAASDVEYRCFVGGLAWATDDHSLNNAFSTYGEVLESKIILDRETQRSRGFGFVTFSTEDAMRSAIEGMNGKELDGRNITVNEAQSRGGRGGGGGGYGGGRRDGGGYGGGGGGYGGGRGGYGGGGGYGGANRGGGYGNNDGNWRN

SEQ ID NO: 5399 - protein, 426 aa, Escherichia coli O157:H7
MSSNKELMQRRSQAIPRGVGQIHPIFADRAENCRVWDVEGREYLDFAGGIAVLNTGHLHPKVVAAVEAQLKKLSHTCFQVLAYEPYLELCEIMNQKVPGDFAKKTLLVTTGSEAVENAVKIARAATKRSGTIAFSGAYHGRTHYTLALTGKVNPYSAGMGLMPGHVYRALYPCPLHGISEDDAIASIHRIFKNDAAPEDIAAIVIEPVQGEGGFYAATPAFMQRLRALCDEHGIMLIADEVQSGAGRTGTLFAMEQMGVAPDLTTFAKSIAGGFPLAGVTGRAEVMDAVAPGGLGGTYAGNPIACVAALEVLKVFEQENLLQKANDLGQKLKDGLLAIAEKHPEIGDVRGLGAMIAIELFEDGDHNKPDAKLTAEIVARARDKGLILLSCGPYYNVLRILVPLTIEDAQIRQGLEIISQCFAEAKQ

SEQ ID NO: 5400 - protein, 329 aa, Streptomyces fradiae
MSGMYVQLGRGATLVSRLWLGTVNFSGRVPDDQAIRLMDEALDRGVNCVDTADIYGWRLYKGHTEELVGRWLRGSGRRDDVVLATKVGEPMSDRVNDRGLSARHVIRSCEASLRRLGVDHIDLYQMHRMDRTVRWDELWQAMDQLVASGKVRYIGSSNFAGWHLAAGQESAARRGSLGLVSEQCLYNLAVRHAELEVLPAARAYGIGVFAWSPLHGGLLSGALRKLAEGTAVKSGQGRAQRTLPALRDTIARYERFCARVGRDPAEVGLAWLLSRPGVSGAVIGPRTTGHLVSALRAVELELSEEEHRELEALFPPVGSGGEVPEAWQN

SEQ ID NO: 5401 - protein, 298 aa, Arabidopsis thaliana
MNRGIEVMSPATYLETSNWLFQENRGTKWTAEENKKFENALAFYDKDTPDRWSRVAAMLPGKTVGDVIKQYRELEEDVSDIEAGLIPIPGYASDSFTLDWGGYDGASGNNGFNMNGYYFSAAGGKRGSAARTAEHERKKGVPWTEEEHRQFLMGLKKYGKGDWRNIARNFVTTRTPTQVASHAQKYFIRQVNGGKDKRRSSIHDITTVNIPDSPDAAAADNATANAPCSPPSVGGNQRETSEWEGQTLYDETAAAFYNQNAFSETLLGMSSTPYMAKLQEQSFLNASQFESYNAYLQM

SEQ ID NO: 5402 - protein, 156 aa, Glycine max
  unsure (1)..(156): unsure at all Xaa locations
MASTKKITLKSSDGRXFEVEEAVAVESQTIKHMIEDNCADSGIPLPNVTSKILAKVIEYCKKHVEANCADEKPSEDELKAWDADFVKVDQATLFDLILAANYLNIKSLLDLTCQTVADMIKGKTPEEIRKTFNIKNDFTPEXKREKVRRENQWAFE

SEQ ID NO: 5403 - protein, 230 aa, Lotus corniculatus
MTVAGYLNIGDFIPPLEWLDLQGVQGKMKKLHNRFDAFFAHIIEEQKVILKSEKHQDLLSTLLSLKEAPEDGDKLNDTEIKALLLNLFTAGTDTSSSTAEWAIAELIKNPRIMGQVQQELDNVVGKDKLVTELDMPNLPYLEAVVKETFRLHPSTPLSLPRAAAKSCEVFDYHIPKGATLLVNVWAISRDPKEWASPLEFRPERFLPGGEKASVDVRGTDFALIPFGAGR

SEQ ID NO: 5404 - protein, 114 aa, Zea mays
MPPPREHNQPQDEEDDDTAGVVKLISAEGFEFVVDRKAAMVSNTLRNMLTSPGGFSETRQGEVRFPEIPTNILEKICQYFYWSLHYSSGKETAEFPIEPEITLELMMAANYLDT

SEQ ID NO: 5405 - protein, 273 aa, Triticum aestivum
  unsure (1)..(273): unsure at all Xaa locations
MSQGQQRRPSSDQAHAGGGGQGQGQGGGAVRYGDVFPAVTGGLAEKPVAPQDAATMQSAENLVFGETIKGGPAAAMQSAAMRNERMGLVGHDQATDATAEQGVSVSETRVPGGRIVTEFVAGQAVGQYLAPDDAADAGGAGGDDTKITIGEALEAAGYAAGGRPVERSDAAAIQAAEVRATGLDVNIPGXGLAAQAQSAADANAWAARDEEKAKLGDVLSNATAKLVADKEVEAADAARVASAETRNKDDKTVRPGGIAASVAAAARLNKQGA

SEQ ID NO: 5406 - protein, 519 aa, Candida apicola
MIIGLSDAFALGGIALSFLVAYQFIYFYFIYSPRAKKLGCAPPVIVFSFPLGLPALYKFATAMLHDNLLEYISIRIADMKVRTGFQTLAGQRWLVTLEPENIKTVLATSFKDYSLGFRYDIMYGLLGNGIFTLSGDGWKHSRALLRPQFSREQVSHLESMRTHINLMINNHFKGGQVVDAQALYHNLTIDTATEFLFGESTNTLDPDLAQQGLPGPKGLVTGEQFAEAFTSALEILSVRVIVGAAWFLIWTPKFWRSCKVCHNFIDYFVYKALATPMEKDQEADRYVFIRELTKETSDPRVIRDQALNILLAGRDTTAGLLSFITYYLGAYPEVYAELREAVLSEFGSTDVETPTFEQLKQCKVLQNVIREVLRLHPNVPLNFRQAIVDTKLPTGGGPNGDQPVFVPKGQNVFYSTYSMQRRTDIWGPDATTFRPDRWNEPREALASGWDYIPFNGGPRICLGQQFALTEASYTIVRICQEFSRIEVLHPDVITSKNSMKQRMRLTQTASGGVITRFIR

SEQ ID NO: 5407 - protein, 108 aa, Methanocaldococcus jannaschii
MVKFCPKCNNLMLPKDGKLKCAVCGYEEETTAEGSKEYEYKEHLENKKEKITVIESEGLETLPTTRIECPKCGHNEAYWWLQQTRCADEPETRFYKCKKCGHTWREYD

SEQ ID NO: 5408 - protein, 64 aa, Glycine max; identical to SEQ ID NO: 1171

SEQ ID NO: 5409 - protein, 99 aa, Zea mays
  unsure (1)..(99): unsure at all Xaa locations
FIRHECAAAGDYCSAGVTHQSVGDRVKLEPVISCWRCRHCKGGRYNLCEDMKFFVTPPVHRSLANQEVHPADLCFKLPYRVSLQEGAMCXPLSVGFHAC

SEQ ID NO: 5410 - protein, 458 aa, Sinorhizobium meliloti
MLERSNELTAWDRDHFFHPSTHMGMHARGETPTRVIGGGEGVYITDISGKRSLDAFAGLYCVNVGYGRQKIADAIAEQAKNLAYYHAYVGHGTEASIRLSKMIIDRAPEGMSRVYFGLSGSDANETNIKLIWYYNNILGRPEKKKIISRWRGYHGSGVMTGSLTGLHLFHNAFDLPRAPILHTEAPYYFRRPDRSMSEEQFSQYCADKLEEMILAEGPDTVAAFIGEPILGTGGIVPPPKGYWEKIQAVLQKYDILLVADEVVTGFGRLGTMFGSDHYGIKPDLITIAKGLTSAYAPLSGTIVSDKLWQVLVKGSDELGAIGHGWTYSAHPICAAAGIANLELIDELGIVENAGSTGAYFRAELQKAVGDHRHVGEVRGDGLMAAIEFVEDRDDRAFFDPGRKVGPQVAAALLERGVIGRAMPQGDILGFAPPLCLTRDEADIVVKAAADTIQSVLGR

SEQ ID NO: 5411 - protein, 263 aa, Escherichia coli
DRVNIEPGVPCGHCRYCLEGKYNICPDVDFMATQPNYRGALTHYLCHPESFTYKLPDNMDTMEGALVEPAAVGMHAAMLADVKPGKKIIILGAGCIGLMTLQACKCLGATEIAVVDVLEKRLAMAEQLGATVVINGAKEDTIARCQQFTEDMGADIVFETAGSAVTVKQAPYLVMRGGKIMIVGTVPGDSAINFLKINREVTIQTVFRYANRYPVTIEAISSGRFDVKSMVTHIYDYRDVQQAFEESVNNKRDIIKGVIKISD

SEQ ID NO: 5412 - protein, 310 aa, Sulfolobus tokodaii
MGSNFINYDFYIHSIIYLLMYDVKKFKYFTVSSIAFGTWRIGGGYWYASHDRDNEWVSAIKRAIELGITLIDTAEMYGNGHAEELVGQAIKSFDREQLFIVSKVWPSRADYDNVLKSANNSSKRLGTYIDLYLLHAPSRVPICQTMKAFEKLVDDGIIRFFGLSNFDVKGIENARQCLSKYELVAIQNHYSLLYRKDEESVLGYAERNGLMYMAYTPLENGILSKNEFLANIGRKYNKTATQVALNWYISHNNLVPIVKASKINHVEENAGVMGWRLSEEDWKAIDTHFRERNYLLDKFISTLKSMRPWK

SEQ ID NO: 5413 - protein, 455 aa, Pseudomonas aeruginosa PAO1
MSSSPAPESALKPTLGVFDVVAITVSAVTPASSVFVIAPFAIQQAGTGAFWAFALAGVLALMFAWCYAELGRAHSTAGGEYVYAKRVFGGLAGYATFLTVLAMLLFIPPVLATGAATYLNAALGTHFDAQTVALAIVAFSYLLGILNIRVNAWVTGTCLLLEVAALLVIVGLGFGHAQQPASVLLQPQVVGDGGLLAIAPWALVIGAVGTALFSYNGFGGAVLLAEDMKDGGHSVHRAVLWSLALVVLIEIVPLAALLIGAPSLPAMLASPDPIGYLLNSHGNETLSRLVSAGIFLSVFNAIVAIVIQSARVIFSSGRDALWMPALNRAFTRIHPRWESPWLATLFLAIPSAALSFSSNLAELTSFTVLLIVMVYLIVALCALFSRVLRRDREHPYRMPLWPLPALLAVSGAGYLLLNLFLAASARDVMIIVGLLAVSVILYCTYGKLSPAFQKL

SEQ ID NO: 5414 - protein, 458 aa, Brassica rapa
MTSINVKLLYHYVITNLFNLCFFPLTAIVAGKAYRLTIDDLHHLYYAYLQHNLITIAPLFAFTVFGSVLYIATRPKPVYLVEYSCYLPPTHCRSSISKVMDIFYQVRKADPSRIGTCDDSSWLDFLRKIQERSGLGDENHGPEGLLQVPPRKTFAAAREETEQVIIGALENLFKNTNVSPKDIGILVVHSSMFNPTPSLSAMVNNFKLRSNVRSFNLGGMGCSAGVIAIDLAKDLLHVHKNTYALVVSTENITYNIYAGDNRSMMVSNCLFRVGGAAILLSNKPGDRRRSKYELVHTVRTHTGADDYSFRCVQQGDDENGKTGVSLSKDITDVAGRTVKKNIATLGPLILPLSEKLLFFVTFMGKKLFKDKIKHYYVPDFKLAIDHFCIHAGGRAVIDVLEKNLALAPIDVEASRSTLHRFGNTSSSSIWYELAYIEAKGRMKKGNKVWQIALGSGFK

SEQ ID NO: 5415 - protein, 287 aa, Mesembryanthemum crystallinum
MAMPPVVDSVYLKEIDKARRDLRALISNRSCAPIMLRLAWHDAGTYCAKTKTGGANGSIRNEEEYAHGANNGLKKAIDWCEEVKAKYPKITYADLYQLAGVVAVEVTGGPTIEFVPGRKDSKVSTNEGRLPDAKKGPPHLRDIFYRMGLTDKDIVALSGAHTLGRAHPERSGFDGPWTQEPLKFDNSYFVELLKGESEGLLQLPTDKALVEDPAFRPYVELYAKDEDAFFRDYAVSHKKLSELGFTPSGSKSGPKDSTILAQGAVGVAVAAAVVILSYIFEVRKRLK

SEQ ID NO: 5416 - protein, 328 aa, Zea mays
MGNSAAAAAERPRLTRAAAKRSAVVTAVAVAAKRKRVALSQLPTLPNAVLGAHDDDDDKPVRKQRLLPAAKPKRRLAVDYIAAVQIDVTPNMRGILIDWLVEVAEEYKLVSDTLYLTVSYIDRFLSAKVLNRQKLQLLGVSAMLIASKYEEISPPNVEDFCYITDNTYTKQEVVKMESDILNVLKFEVGSPTAKTFLRMFIRSAQEDNKKYPSLQLEFLGSYLSELSLLDYGLIRSLPSLVAASAVFVARLTLDPHTHPWSKKMQTLTGYKPSELKDCVAAIHNLQLNRTCQSMVAIREKYRQHRFKGVSALLPPVEIPASYFNTLKE

SEQ ID NO: 5417 - protein, 249 aa, Pyrococcus horikoshii
MPFEIVFEGAKEFAQLIETASRLIDEAAFKVTEEGISMRAMDPSRVVLIDLNLPSSIFSKYEVDGEETIGVNMDHLKKVLKRGKAKDTLILRKGEENFLEISLQGTATRTFRLPLIDVEEIEVELPDLPYTAKVVVLGEVLKEAVKDASLVSDSIKFMAKENEFIMRAEGETQEVEVKLTLEDEGLLDIEVQEETKSAYGVSYLADMVKGIGKADEVTMRFGNEMPMQMEYYIRDEGRLTFLLAPRVEE

SEQ ID NO: 5418 - protein, 63 aa, Alexandrium tamarense
MRGILADWLVEVAEEYKLCADTLYLSVNYIDRFLSIHPVQRSNLQLVGIACMWIASKYEEIYP

SEQ ID NO: 5419 - protein, 353 aa, Mesembryanthemum crystallinum
MYGFEAMNFNVHGGYLEAIVRGYRSGLLTAADYNNLCQCETLDDIKMHLSATDYGPYLQNEPSPLHTTTLVEKCTLKLGDEYKHMLCQATEPLSTFLEYITYGHMIDNVVLIGTGTLHERDVQELLEKCHPLGMFDRIATLAVAQNMRELYRLVLVDTPLAPYFSECITSEDLDDMNIEIMRNTLYKAYLEDFYRFCQKLGWATGQNMSDLLAFEADRRADNITINSFGPDLAPEGDRTKLHSTFGLLYPYGREKLAGCEDIYHARGEPEKDPPYPPIFSAMSYGESEMLDWAFGVEAVMRLCLSVSESLLPEPSSLDMRLMEQSRSRNLMWISQCVAHNQKHRLHDGVVFMF

SEQ ID NO: 5420 - protein, 193 aa, Schizosaccharomyces pombe
MANLRTQKRLAASVLKCGKRKVWMDPNEISEISNANSRQNVRKLIKDGLVIRKPNLMHSRFRIRKTHAAKRLGRHTGYGKRKGTAEARMPSAVVWMRRQRVLRRLLRKYRESGKIDKHLYHTLYLEAKGNTFKHKRALIEHIQRAKAEANRTKLIQEQQDARRARAKAARQRRAKAVEEKREQLYTAAEKIEE

SEQ ID NO: 5421 - protein, 356 aa, Neisseria meningitidis MC58
MTKHIAILRGDGIGPEIVAETVRVLDKLIAQGLDAGYEYAPLGGEAYDEYGHPYPEFTQNLCRKADAVLLGAVGSPQYDNLDRPLRPERGLLAIRKDLNLFANLRPAVLYPELANASTLKPEIVAGLDILIVRELTGDIYFGEPRGIRVLENGEREGYNTMKYSESEIRRIAHVAFQSAQKRSKKVCSVGKANVLETTELWREIFEEIGKEYPDVELSHMYVDNAAMQLVRAPKQFDVIATGNIFGDILSDEASMLTGSIGMLPSASLDENGKGLYEPSHGSAPDIAGQNKANPLATILSLAMLLRYSLNDEARAQQVENAVQKVLQQGLRTSDIYEEGTKLVSCSEMGDAVLAAL

SEQ ID NO: 5422 - protein, 478 aa, Emericella nidulans
MNENDENGPSTRLTRAKAAALTTDAPAANGALKKPLQTKKAATGANGTQRKRAALGDVSNVGKADNGETKDAKKATSKTGLTSKATMQSGGVQKLSRSNLSRTAVGAKDNNVKKPATEAKRPGSGSGMGSAMKRTSSQKSLQEKTIQQEEPPRKKVDIEKVVEKQAEAVSVKGDVKAGAQTEELEKPQDFVADLDTEDLDDPLMAAEYVVEIFDYLRELEMETLPNPDYIDHQPDLEWKMRGILVDWLIEVHTRFRLLPETLFLAVNIIDRFLSAEVVALDRLQLVGVAAMFIASKYEEVLSPHVANFSHVADETFSDKEILDAERHILATLEYNMSYPNPMNFLRRISKADNYDIQTRTLGKYLMEISLLDHRFLGYPQSQIGAAAMYLARLILDRGPWDATLAHYAGYTEEEIDEVFRLMVDYLHRPVCHEAFFKKYASKKFLKASIMTRQWAKKYHHLYIDSALTEPYNSIKDNE

SEQ ID NO: 5423 - protein, 389 aa, Glycine max
MEDQNASSNGLGKVFHKVKPYLAMMSLQFGYSGMYIITMVSFKHGMSHWVLSVYRHIVATLIMAPFAFVLERKIRPKMTLPVFLRLAALGFLEPVLDQNLYNMGMKNTSTTFASATVNVMPAITFIMALICRLETVNLRKIPSVAKVVGTAVTVSGAMVMTLYKGPALQFIKGQAATHHESGNSTQPSEQNWVLGTVELIASCGGWASFFILQSFTLKMYPAELSVTAWICFLGIFEGAIATLIFERDMSVWSIGMDSRLLACVYSGVVCSGMAYYVQGVVTRERGPVFVTSFSPLCMIITAALGSIVLAEQVYMGSVIGAIIIVSGLYTVVWGKSKDKLNNKTNEGNSEGPELPIKDGTKSGSDIFDSIEINVPSGAGKNVLLPSART

SEQ ID NO: 5424 - protein, 458 aa, Xanthomonas oryzae pv. oryzae
MTDTPRRDDAATLDRFGYAQELKRQLTLKDLLIYGLVSMVPTAPFSIFGGVFDISAGMVPLTYLVGFVAMLFTALSYQQMSQAFPVAGSVYAYVGRGLNSGMGFLAGWAILLDYLLVPTLLYVVGANAMYNVVPAVPQPAWIGFFVVLNTVVNLRGIETTARANRFFLLGQLVVLAVFLVLATLAIQRGVNGAHWSWRPIYDPQAFSPHVIFSALSVAVVSFLGFDAISTLSEEARGGNRVVGRATLLALLIVAGVFVLQTWLAALLQPTLQRYPSAQASNDAFFEIGRLIAGPWLQIVIALTVAISAAIANSLVAQAATSRLLFAMARDRQLPAFLRYIHPRTAVPQRAILLVAGLSIVLGEVFVGQIALLSSLCNVGALTAFLLLIAVLWHFRAQGRRVLHGLAPLIGIVILAYVLLNADTHAQLGGTAWMVVGLTVLAFLKLSGRSTEFRATDAL

SEQ ID NO: 5425 - protein, 516 aa, Zea mays
  unsure (1)..(516): unsure at all Xaa locations
METSAPPNAPAPPAQXHGGGCRDFQQSVRLKYVKLGYHYLISHGMYLLLSPLMALVAVQLSTVSPHDLADLWEQLRFNLLSVVACSTLLVFLSTVYFLTRPRPVYLLDFACYKPESERKCTRETFMHCSKLTGSFTDENLEFQRKILERSGLGEDTYLPPAVLRVPPNPCMDEARKEARAVMFGAIDQLLEKTGVRPKDIGVLVVNCSLFNPTPSLSAMVVNHYKLRGNIVSYNLGGMGCSAGLLSIDLAKDLLQVHPNSYALVISMENITLNWYFGNNRSMLVSNCLFRMGGAAILLSNRRSDRRRSKYELVHTVRTHKGADDKCFGCVTQEEDEIGKIGVSLSKDLMAVAGDALKTNITTLGPLVLPLSEQLLFMGTLIAKKVLKMKIKPYIPDFKLAFEHFCIHAGGRAVLDELEKNLELTDWHMEPSRMTLYRFGNTSSSSLWYELAYTEAKGRIRKRDRIWQIAFGSGFKCNSAVWKALRTVNPAKEKSPWMDEIDNFPVDVPKISKVGGA

SEQ ID NO: 5426 - protein, 132 aa, Magnetospirillum magnetotacticum
MPTTRARPLFRGGIGEGRTHDHYWNVAMREMRETGYMHNQLRMYWGKKILEWSPSPEEAFARTLRLNNRYFLDGRDANSFTNVAWIFGLHDRPWQTRKIFGSVRYQSENSLRKFDAKAYERAVARLCEAETA

SEQ ID NO: 5427 - protein, 449 aa, Mycobacterium tuberculosis H37Rv
MAAVVKSVALAGRPTTPDRVHEVLGRSMLVDGLDIVLDLTRSGGSYLVDAITGRRYLDMFTFVASSALGMNPPALVDDREFHAELMQAALNKPSNSDVYSVAMARFVETFARVLGDPALPHLFFVEGGALAVENALKAAFDWKSRHNQAHGIDPALGTQVLHLRGAFHGRSGYTLSLTNTKPTITARFPKFDWPRIDAPYMRPGLDEPAMAALEAEALRQARAAFETRPHDIACFVAEPIQGEGGDRHFRPEFFAAMRELCDEFDALLIFDEVQTGCGLTGTAWAYQQLDVAPDIVAFGKKTQVCGVMAGRRVDEVADNVFAVPSRLNSTWGGNLTDMVRARRILEVIEAEGLFERAVQHGKYLRARLDELAADFPAVVLDPRGRGLMCAFSLPTTADRDELIRQLWQRAVIVLPAGADTVRFRPPLTVSTAEIDAAIAAVRSALPVVT

SEQ ID NO: 5428 - protein, 440 aa, Bacillus anthracis str. Ames
MKKVIGAATATVFGLGAFTTTATAETIVTADVLNVREKPTTESKVVEKVKNGEELKVINTEDGWSKIELNGKEVFVSSEFTKDIYHVTADLLNVRSESNTESKILGRLKKDDVIESTNQVKDGWLQFEYKGKTAYVNVSFLSSKAPVEKKADEKTKQVAKVQKSVKAKEEAKTQKITKAKETIKPKEEVKVQEVVKPKEEVKVQEVVKPKEEVKVQEVAKPKEEVKVQEVAKPKEEVKVQEVAKPKEEVKVQEVVKPKEEVKVQEVAKAKEEAKAQEIAKAKEEAKAQEIAKAKEEAKAQEIAKAKEEAKAQEIAKAKEEAKAREALKAKEESKNNAQSAKRELTVVATAYTADPSENGTYGGRVLTAMGHDLTANPNMRIIAVDPKVIPLGSKVWVEGYGEAIAGDTGSAIKGNRIDVLMGSKSKAMNWGRQTVKVKIL

SEQ ID NO: 5429 - protein, 267 aa, Zea mays
LACLQSLPSGNLSLLCDVLVREVSELTGYDRVMAYKFHEDEHGEVISECRRSDLEPYLGLHYPATDIPQASRFLFMKNKVRMICDFSATPVLIIQDGSLAQPLSLCGSTLRASHGCHAQYMANMGSVASLVMSVTINDDEEEDGDTDSDQQPKGRKLWGLVVCHHTSPRFVPFPLRYACEFLLQVFGIQLSKEVELAAQAKERHILRTQTLLCDMLLRDALVGIFTQSPNVMDLVKCDGAALYYQNQVLVLGSTPSESEIKSIATWL

SEQ ID NO: 5430 - protein, 428 aa, Burkholderia fungorum
MFTVQNEALLQRKNNATPRGVGVMCPFYADTALNAELWDVEGRRYIDFAAGIAVLNTGHRHPKVMAAVREQLDRFTHTCWQVVPYPSYVELAEQLNRLAPGDFQKKASLFSTGAEAVENAIKIARAFTGRAAVIAFSGSFHGRTMMGMALTGKVAPYKVGFGPFPGEVYHAPYPNTLHGVTTTNALDSVRALFKTDVDPLRVAAIIFEPVQGEGGFYEAPADFVKGLRDICDQHGILLIADEVQTGFARTGKLFAMQHHAVAADLTTVAKSLAGGLPLSGVIGRADVMDAAAPGGLGGTYAGNPLSVAAALAVLDVIESENLCERATQLGNRLKSHLTSMRESLPHIAEIRGPGAMIAAEFFEPGTLIPDADFAKRFQARALELGLILLVCGVHSNVIRFLFPLTIEEAVFEEALVLIETAMKDAAAA

SEQ ID NO: 5431 - protein, 164 aa, Hordeum vulgare subsp. vulgare
RSLDSSTRKLRFALPFPMLAYPFYLWSRSPGKSGSHFHPSSDLFQPNEKNDILTSTTCWLAMAGLLAGLTAVMGPLQILKLYAVPYWIFVMWLDFVTYLHHHGHNDKLPWYRGKAWSYLRGGLTTLDRDYGWLNNIHHDIGTHVIRHLFPQIPHYHLVEATEAA

SEQ ID NO: 5432 - protein, 156 aa, Fragaria x ananassa
MALSLFGNSRRSNVFDPFSLDTWDPFQGFGPLMNSSSTAGDTSAFAQTRIDWKETPEAHVFKADLPGLKKEEVKVELEEGNVLQISGERSKEQEEKNDKWHRVERSSGKFVRRFRLPDNAKVDQVKAAMENGVLTVTVPKAPEPKPQVKSIDISGA

SEQ ID NO: 5433 - protein, 456 aa, Salmonella typhimurium LT2
MESNNKLKRGLSTRHIRFMALGSAIGTGLFYGSADAIKMAGPSVLLAYIIGGVAAYIIMRALGEMSVHNPAASSFSRYAQENLGPLAGYITGWTYCFEILIVAIADVTAFGIYMGVWFPAVPHWIWVLSVVLIICAINLMSVKVFGELEFWFSFFKVATIIIMIVAGIGIIVWGIGNGGQPTGIHNLWSNGGFFSNGWLGMIMSLQMVMFAYGGIEIIGITAGEAKDPEKSIPRAINSVPMRILVFYVGTLFVIMSIYPWNQVGTNGSPFVLTFQHMGITFAASILNFVVLTASLSAINSDVFGVGRMLHGMAEQGSAPKVFAKTSRRGIPWVTVLVMTIALLFAVYLNYIMPENVFLVIASLATFATVWVWIMILLSQIAFRRRLPPEEVKALKFKVPGGVVTTIAGLIFLVFIIALIGYHPDTRISLYVGFAWIVLLLIGWIFKRRRDRQLAQA

SEQ ID NO: 5434 - protein, 362 aa, Neurospora crassa
MASESTILSNAENLKKFLRLPQNGQLIAEYIWIDSEGGTRSKSRTLPEKESQYLPEELPIWNFDGSSTGQAPGENSDVYLKPVAVFPDPFRGSPNILVLSECWNADGTPNKFNHRHEAAKLMEAHADQVPWFGLEQEYTLLDINDRPYGWPRNGFPAPQGPYYCGVGTGKVVQRDIVEAHYKCCLYAGVKISGTNAEVMPAQWEFQVGPCDGIEMGDHLWLARFLLHRVSEEFGAKVSFDPKPIPGDWNGAGLHTNFSTENMRKEGGMKYIEDAIKKLEARHKEHIAVYGEGNDKRLTGRHETGSIDSFTYGVANRGASIRIPRECGAKGYGYFEDRRPASNADPYQITGIIMETCFGAVSE

SEQ ID NO: 5435 - protein, 288 aa, Oryza sativa
  unsure (1)..(288): unsure at all Xaa locations
XGDRTRSDPTRRWSTELDNYSGTIQGQDGQTVQEKAQKVLGNKWTEIAKVVSGRTDNAVKNRFSTLCKRRAKDDELFKENGSLCSSTSSKRALVQTGCLTSXXASGSAPPIKQMRXHVILISKXNMTPNMRLVGQDKSTQDSRQPLAIVYQNNQDNMNTMDTQNLVAKTAAKQLFAGEQGNFLNKDDPKIATLLQRADLLCSLATKINTENTSQSMDEAWQQLQHHLDKKDDNDMSESSMSGMASLLEDLDDLIVDPYENEEEEDQDLREPDLSASVPRIEFLDFTNX

SEQ ID NO: 5436 - protein, 584 aa, Citrus sinensis
MTHIKEFFTKLSESSSNQNISNIPKKKKKLFLALFATLLVVAAVIGIVAGVNSRKNSGDNGNEPHHAILKSSCSSTRYPDLCFSAIAAVPEASKKVTSQKDVIEMSLNITTTAVEHNYFGIQKLLKRTNLTKREKVALHDCLETIDETLDELHKAVEDLEEYPNKKSLSQHADDLKTLMSAAMTNQGTCLDGFSHDDANKHVRDALSDGQVHVEKMCSNALAMIKNMTDTDMMIMRTSNNRKLTEETSTVDGWPAWLSPGDRRLLQSSSVTPNAVVAADGSGNFKTVAAAVAAAPQGGTKRYIIRIKAGVYRENVEVTKKHKNIMFIGDGRTRTIITGSRNVVDGSTTFKSATAAVVGEGFLARDITFQNTAGPSKHQAVALRVGADLSAFYNCDMLAYQDTLYVHSNRQFFVNCLIAGTVDFIFGNAAAVLQNCDIHARKPNSGQKNMVTAQGRTDPNQNTGIVIQKSRIGATSDLKPVQGSFPTYLGRPWKEYSRTVIMQSSITDLIHPAGWHEWDGNFALNTLFYGEHQNSGAGAGTSGRVKWKGFRVITSATEAQAFTPGSFIAGSSWLGSTGFPFSLGL

SEQ ID NO: 5437 - protein, 238 aa, Zea mays
  unsure (1)..(238): unsure at all Xaa locations
MGKGAQGSDAAAAGGEVEENMAAWLAAKNTLKIMPFKRPPVGPYDVRVRMKAVGICGSDVHYLRVRDPIRCLCNSTARELLHGXRKKKKRPLFRLFTHHRFSQEMRIAHFVVKEPMVIGHECAGVVEEVGAGVTHLSVGDRVALEPGVSCWRCRHCKGGRYNLCEDMKFFATPPVHGSLANQVVHPADLCFKLPDGVSLEEGAMCEPLSVGVHACRRVGVGPETGVLVVGAGPIGLVS

SEQ ID NO: 5438 - protein, 305 aa, Methanocaldococcus jannaschii
MILVTGGAGFIGSHIVDKLIENNYDVIILDNLTTGNKNNINPKAEFVNADIRDKDLDEKINFKDVEVVIHQAAQINVRNSVENPVYDGDINVLGTINILEMMRKYDIDKIVFASSGGAVYGEPNYLPVDENHPINPLSPYGLSKYVGEEYIKLYNRLYGIEYAILRYSNVYGERQDPKGEAGVISIFIDKMLKNQSPIIFGDGNQTRDFVYVGDVAKANLMALNWKNEIVNIGTGKETSVNELFDIIKHEIGFRGEAIYDKPREGEVYRIYLDIKKAESLGWKPEIDLKEGIKRVVNWMKNNNRT

SEQ ID NO: 5439 - protein, 306 aa, Glycine max
MSSGTTYWCYTCRQPIWLEGREAICPYCDGGFVQELNELRGVARQHGFSSRMEDAHQMPDIMDAVRAVMEQRGSEPRIRVRDAVDNFMRQRMAGRYTNFDVRRRSGSGSGSGSILIPDETWGVFSSGPYLIFHGQAPGFTNSNGSSRGGPRRVDFGDYFLGPRLEGLIEQHISNDRLGPPPASHSSIDAMPTIKITHEHLQSDSHCPVCKERFELGSEARKMPCNHVYHSDCIVPWLVLHNSCPVCRVELPPKEHTSSRGRRIWGNGSGSGSSNDISRGRENRQMNNGRRNLLSYLWPFRTSSSST

SEQ ID NO: 5440 - protein, 159 aa, Xanthomonas axonopodis pv. citri str. 306
MQQAEAALASASGSLVSGRVVLVPALQGIRLTGTIGGLRPGGVSGFHVHERGDCSAADASSAGAHFNPGGALHGRAGGGAHHLGDMDNLRADAEGVVHLDMILSGISLGDGAPTDVIGKSLIVHADPDDYRSQPSGNAGARLACGVIRVTQWGTPPSQP

SEQ ID NO: 5441 - protein, 469 aa, Solanum tuberosum
MAPEFQKNAMYVSNELENGDVQKNFDDDGREKRTGTLLTASAHIITAVIGSGVLSLAWAIAQLGWVAGPAVLFAFSFITYFTSTLLADCYRSPGPISGKRNYTYMDVVRSHLGGVKVTLCGIAQYANLVGVTIGYTITASISMVAVKRSNCFHKNGHEASCSIESYPYMIIFAVIQIVLSQIPNFHKLSWLSILAAVMSFTYASIGLGLSIAKASGVGHHVKTALTGVVVGVDVSGTEKVWRSFQAIGDIAFAYAYSTVLIEIQDTLKSSPSESKVMKRASLAGVSTTTLFYVLCGTIGYAAFGNNAPGNFLTGFGFYEPFWLIDFANVCIAVHLVGAYQVFCQPLYGFVEGRCSERWPDSKFITSEYAMQVPWCGTYNLNLFRLVWRTTYVIVTAVIAMIFPFFNDFLGLIGAASFYPLTVYFPIEMYIAQRKIPKYSFTWVWLKILSWTCLISITCCSCWIDPGTCH

SEQ ID NO: 5442 - protein, 520 aa, Brassica napus
MESSISQTLSQVLDPTTGILIVVSLFIFIGLITRRRRPPYPPGPRGWPIIGNMSMMDQLTHRGLANLAKKYGGLCHLRMGFLHMYAVSSPDVAKQVLQVQDSVFSNRPATIAISYLTYDRADMAFAHYGPFWRQMRKVCVMKVFSRKRAESWASVRDEVDKMIRSVSSNVGKSINVGEQIFALTRNITYRAAFGSACEKGQDEFIRILQEFSKLFGAFNVADFIPYFGWIDPQGINKRLVKARNDLDGFIDDIIDEHIKKKENQNSVDAGDVVDTDMVDDLLAFYSEEAKLVSETADLQNSIKLTRDNIKAIIMDVMFGGTETVASAIEWALTELLRSPEDLKRVQQELAEVVGLDRRVEESDIEKLTFLKCTLNETLRLHPPIPLLLHETAEDTEIDGYFVPKKSRVMINAFAIGRDKNSWVDPETFRPSRFLEPGVPDFKGSNFEFIPFGSGRRSCPGMQLGLYALELAVAHILHCFTWKLPDGMKPSELDMSDVFGLTAPKATRLYAVPCTRLICSV

SEQ ID NO: 5443 - protein, 465 aa, Xanthomonas axonopodis pv. citri str. 306
MNLSAATSVTDSAAAAWAPDSWRGKPALQLPVYPDENALQAAMHELGRLPPLVTSWEIFALKRQLAEAQEGKRFLLQGGDCAENFSDCESGTISNRLKVLLQMSLVLVHGLHLPVVRVGRFAGQYAKPRSADTETRDGVTLPSYRGDVINAPAFTEAARVPDPRRMITAHSRSAMTMNFVRALIDGGFADLHHPEYWNLDWVGYSPLAADYQKMVASIGDAVRFMETLSGAEVYNLNRIDFYTSHEALLLPYEEGLTRQVPRQWGWFNLSTHYPWIGMRTAALDGAHVEYLRGVRNPIAIKVGPSVQPDQLLRLIDVLNPEDEPGRLSFIHRMGAAQIADKLPPLLDAVKRDGRRVLWVCDAMHGNTESTGNGYKTRRFDNIRNEVETSFDLHAAAGTRLGGVHLELTGEDVTECTGGARELTERDLERAYRSSVDPRLNYEQSLEIAMAIVRKQQQAASQPLGA

SEQ ID NO: 5444 - protein, 392 aa, Janusia anisandra
DLEPVNPADVPVTAAGALKSYKLAAKAISRLQSLPSGNISLLCDVLVKEVRDLTGYDRVMVYKFHEDEHGEVVSECRRSDLESYLGLHYPATDIPQASRFLFMKNKVRMICDCLAPPVKVIQDERLPQPLSLCGSTLRSPHGCHAQYMTNMGTIASLVMSVTVNEDDDTMDGDQQQMARKLWGLVVCHHSSPQFVPFPLRYACEFLIQVFGVQINKEVELAAQVREKHILQIQTMLCDMLLRDAPVAIITQSPNVMDLVKCDGAALYFKNKTWFLGVTPTEEQIRGIAEWLLKYHSGNTGLSTDSLMEAGYPGASGLGDAVCGMAAVSITSRDFLFWFRSHTAKEIKWGGAKHDPDDKDDLRKMHPRSSFKAFLEVVKWRSVPWEDVEMDAI

SEQ ID NO: 5445 - protein, 392 aa, Diacidia ferruginea
DLEPVNPADVPVTAAGALKSYKLAARAISRLQSLPSGNISLLCDVLVKEVRDLTDYDRVMVYKFHEDEHGEVISECCRPDMEAYLGLHYPATDIPQASRFLFMKNKVRMICDCLATPVKVIQDERLPQPLSLCGSTLRSPHGCHAQYMANMGAIASLVMSVTINEDDDMMDGDRQHRARKLWGLVVCHHTSPRFLPFPLRYACEFLIQVFGVQINKEVELAAQVREKHILRTQTLLCDMLLRDAPVAIITQSPNVMDLVKCNGAALYYKKKFWLVGLTPTEAQIRDIAEWLLEYHNGNTGLSTDSLMEAGYPGASELGDTVCGMAVVKITSRDFLFWFRSHTAKEIKWGGAKHDPDDKDDGRKMHPRSSFKAFLEVVKWRSLPWEDIEMDAI

SEQ ID NO: 5446 - protein, 198 aa, Triticum aestivum
  unsure (1)..(198): unsure at all Xaa locations
MELVGRLAWLVAAAALALAATVARCDPQVPCYFIFGDSLVDNGNNNYIVSLARANYPPYGIDFAGGPSGRFTNGLTTVDVIAQLLGFDNFIPPYAATGGDQLLNGVNFASAAAGIRAETGQQLGGRIPFAXQVQNYQTAVQTLVNILXDRDTASERLSQCIFTVGMGSNDYLKHYFQPAFYSTGSRYTPGQFGDSLIA

SEQ ID NO: 5447 - protein, 368 aa, Xanthomonas axonopodis pv. citri str. 306
MKTRAAVAWGPHQPLTIEEVDLQPPRPGEVLVRLVATGICQGDAHALAHGHAGSFPAILGQEGAGVVEDVGIGVTSVRPGDHVIPLYMPECGVCKFCRSGRTNLCQAIRSSQERGLMPDGSSRFSLHGRPILHHMGTSTFSEYTVLPEIAVARIHPEAPLEQACLLGCTVTTGVGAVLNSTHVRPGDCVAVFGLGGIGLSVIQGALLAQAGRIIAVDIDPAKFALARTLGATDCLDPRDYGAPIQQVIVDLTDGGADHSFECVGDVGAMRAALECCHKGWGESVILGMADDTQEISTRPFQLVTGRVWRGSAFGGVKGRSELPGYVERYLHGDIQLAPLITRTLALDDINQALTDLRAARGIKSIVAY

SEQ ID NO: 5448 - protein, 384 aa, Oryza sativa (japonica cultivar-group)
MEANQSPPRKRSRRDKNREKAPNSNSTEEMQQEIWSEFPGDLFETVVARLPVAAIFRFRTVCRNWYSMLGSESFSQQYSEVPQRLPWFYTITHENASNNVAMYDPSLKKWHHPSVPLAPAKIVIPVASAGGLVCLLDLSHRNFYICNPLTQSLKEIPRRSVQAWSRVAVGMVMNGGTSNEGYKVMWLGNDGNYEVYDSMKNMWSCPGTFPPSIKLPLALNFRSQPVAVGSMLYFMCAEPEGVLSYDVSTGIWRQFVIPLPLHLTDHTLAEFQGRVMLVGLLCKNAATCVCIWELQKMTLLWKEVDRMPNIWCLEFYGKHMKMTCLGNSGLLMLSLKAKRMNRLVTYNLLNKEWQKVPDCMLPCSRKKQWIACGTAFGPCPSALA

SEQ ID NO: 5449 - protein, 688 aa, Oryza sativa; identical to SEQ ID NO: 2258

SEQ ID NO: 5450 - protein, 2295 aa, Neurospora crassa
MSLSKPSKEPTPPPTPQTEPQATDIPLPESPMVLPPAESPFWTVVAQEARDLARTLRAINDDNDKIRENPDSVSEMDVNNTSNPQRNSATEKRSVTPLSEAREEHQTVELGDGMNQDSLDSVSDTDITRGLKRNPTSTSEERSITPPPDQAINEQGEPSELPEPLRQLPKIPEMLAKLSQRITDFEAAEDAENNGTCSTLLEKQQKLHDATSSLLLDALAVASVVMAEGHSPSSIDPSLIPLPSDDEEEDDLQSEESDEYTPSLSLPSFTRGIGGGVGTGQHQDDVHEDDALLGLGPTDIPFPPSLTVSEYDSELEEQEPPSLVPQFIADNLKAQGKDHHLPDTIPTCTAYDDIDWTDLIPTPIPEDSSSTKAAPSSSSGTKSSLAVQVDPADVPLPDDDPSDVPQGVVEDGDSGLPDYSDLEALGDHEDGYHGDQENYSDSSQLFVDNRRPLPDRRQLVISSSSEDEKEAGLEESQPEGDVEADADDIQPESLLQETVVAGEKRPSKEEKGKGKAEQQPEQMLSPRSPVSPYSSVEHPVASASPIAPVAPMVPVASCAPDHHMRADQLPPTQSVVIPEQQPEPAPFPRGTQGQPTTPPTTHVPVYVGKATEPRVDRYSPLPAPSSPLLSRSSPYRAYKSSQPRPRESLLHSVPYTPAVVPWDEQKDLRGLPPLPEPERLPTYTRISKTTDNSRVMPMWFEGFNTQEWLLIEPSANIMYRRIRNQWHPSLPQWPPYIIGPTPLIMELSQIGKDGLAGEINILLQCERYSPPGFLPCPQLRSFTNFIRDCLALQNIRGPTVPDFQTVHECKTWLETVTKNGRMLSFMALHCHVERLRSGVLPGTHEFLDAIRDMGCQLGWNENVYFSKTLVLQEFRHVSKYDSTSTPFGLRGNQQTQNMGQYFGYGQGKITDYCIALRDDHPHLNIRVTLAALNTLNFEWLKWIGPPDAWVKTWDPCDEVVGPQSRTRLAQIRLRRKDLYDEFTALNGRVDGWFEDHPEPPRTALIAGGIASRHCTCRQCHYAICHQQHHDDESVCECDDETPSSSGNSSPGRTRPGVDGLQPFPKSRPLPDPPRPGFSSLAYADGESLLTTEELTSVRRAEEMMDRMDRKFDKNLSRLNPPKRRKTEAAAERAEAIDTEAEEANEKAAEADTRTEAQKERQRRKNRKKKEQEKEAKKKKAARAEVVAESKAQILESLKTVGFNREAIENVVNETMAKIGPKSGAPEDKSRGQVLANKGGLSAEGVAHYRNYARSLYADHLKRKEAGESTKLFGKFEVPADISEEGFFDFFFSNLGIAETDDRDDFTISWKPDVEEVTGGQEALLNSDCGGCVPEDAYQDAVGNQLGQASIKPLPVNEQEVPEDAGKPQPKDVLPTAGPSTHDVPDHDTSNLVQTKQLDNIALAGIAGIAQPSREQPTGPEATPKAAPNDATDATPTVAPTESSTPSHDLHNHDANSTPNPPPLDRSKEASKAKKERRKLRKRLDREKEEARLREQAAAREELRRQAEARHQAELDQKVAETQRKLDEEKARRLEQHQKEEIARLQRVKEKEAHLQKVKEEETKKRKEEELRKREEEQRLAEEEKKRQEEERRKDEERKKEEERIAEEKRKQFEEEARLQAEKEWYAKEEQRKLKEAAQKEEARRIALEAKQKAELEAKQMAELEAIRLAEMEAKRKAEEERKAEQNRKAAEAKRKAEEAKKAAEEVKKKAEEARRQAEQEARHKKEEAATRKAEEKKRQAEAKRLAEEKRKAEAARQAEEQQQAELKRQAEVERLAEKKRKADEAARQAEAELHAELQRQADEAERRAKEAAQKARAALQAELQPKKRAAEAKKKAVEEVERRRLADLEAAARRAQEEEQRRLREEAERLKREAQAVRKAEEEAIRRAMEEARVRRDEVERKEAMVRREKEEVERLKKEVEEAKERAEREEAMKRAADEVKRRKKAQRKLEAEAKRKAEAEAAQVKAEGEAKLRQMLGIQQVDNSLTLAEQEATPFHEQQILLQEAWHQIDESLILSQQAHNTLLRAQHHNSEAFRQLGEADLLLSLSQDVSQICQNTQDSPNLILARLRFDEAILQAQEGYRLLQEAWDCHDSSTRTAEAGHRLLVEVSHDGEYERSAAQYSLVEARHQNNEAFRRAEEGRSVLEKVLAEMGIPLHHSREEGQAHASHDSQIPAQDPDTILVTTPPTTQHQLSDPEANADSETVSSSFESISTTTSGDQSETPTDNRPYEERLAAFINGQLLAYGVWDPESFYVRYDPRNPNGPRAHEMPVMSERELHGDAAGSGVMRAKEAWW

SEQ ID NO: 5451 - protein, 376 aa, Shewanella oneidensis MR-1
MTAQILKSKAAVAWAVGEPLSIEIVDVMPPQKGEVRVKMIATGVCHTDAFTLSGDDPEGIFPCILGHEGGGIVESIGEGVTSVQVGDHVIPLYTPECGECKFCKSGKTNLCQKIRETQGKGLMPDGTSRFSKDGQIIYHYMGTSTFSEYTVLPEISLAKVNPDAPLEEVCLLGCGVTTGMGAVMNTAKVEEGATVAIFGMGGIGLSAVIGATMAKASRIIVIDINESKFELAGKLGATDFINPKDYDKPIQDVIVELTDGGVDYSFECIGNVNVMRSALECCHKGWGESVVIGVAGAGQEISTRPFQLVTGRVWKGSAFGGVKGRSELPEYVERYLAGEFKLSDFITHTMSLEQVNDAFDLMHQGKSIRTVIHFDK

SEQ ID NO: 5452 - protein, 257 aa, Saccharomyces cerevisiae
MLEAKFEEASLFKRIIDGFKDCVQLVNFQCKEDGIIAQAVDDSRVLLVSLEIGVEAFQEYRCDHPVTLGMDLTSLSKILRCGNNTDTLTLIADNTPDSIILLFEDTKKDRIAEYSLKLMDIDADFLKIEELQYDSTLSLPSSEFSKIVRDSSQLSDSINIMITKEIKFVADGDIGSGSVIIKPFVDMEHPETSIKLEMDQPVDLTFGAKYLLDIIKGSSLSDRVGIRLSSEAPALFQFDLKSGFLQFFLAPKFNDEE

SEQ ID NO: 5453 - protein, 607 aa, Zea mays
  unsure (1)..(607): unsure at all Xaa locations
MGRDAEETSPPVPSSELEQEDDDDCYLSDQGDDALEESVLHVLEDEHLEDCHWSASSVITKESLLAAQREDLRKVMELLGLREHHARTLLIHYRWDVERIFELLDQKGRDSLFSEAGIPLQYTNNAGPTSSAEVTCNVCYDDVPPSCALEMDCGHSYCSDCWTEYFIVKINEGQSRRVRCMAPKCNAICDEAIIRKLVIARHPDIAERFERFLLESYIEDNDTVKWCPSTPHCGNAIRVKGDIYCEVECTCGCQFCFNCSLRAHSPCSCMMWELWIKKCRDESETVNWITVNTKPCPKCHKPVEKNGGCNLVACICGQAFCWLCGGATGRDHTWSTISGHSCGRFTDDQTKKTEQARRDLYRYMHYHNRYKAHTDSLKQEAKLKNEIQGKISISENKESKIKDYSWVINGLNRLFRSRRVLSYSYPFAFYMFGDEIFKDEMTPEERELKQXLFEDQQQQLEFNVERLSGFLEKDFQLFTDDEVMDTMKHVINLSNVVDRLCKQMYQCIENDLLYPLRTPHNIAPYKSKGIDRASELNISWDPGEQSSQSTKHSQDEHRNKQASNILGKRTHELHGSSSSNKRERVDVNGGGGALFDLNVPAEVVDKI

SEQ ID NO: 5454 - protein, 173 aa, Triticum aestivum
FFFTKKETTTPRQEREQGERKKKRLSSGGDGERRRPDERKKELGETHDVLRFGVNDSVRGDLAPAHPVQATIHKEAKFWEEKKKFGTEAIYGSAFNIRRDLDAQILSRFQRPPGALPSSMLGYEAMTGSLDDFGFEDYLNLPQDSDSLRVPDMHHGMEVRLGLSKGPVCPSFN

SEQ ID NO: 5455 - protein, 265 aa, Magnetospirillum magnetotacticum
MTPDQIRDLVRSRYGAIAAGASSSCCSPAVPSSCCGPAPDADTLAKRMGYDESDLAAAGDGANLGLGCGNPQAIAAMRPGEVVVDLGSGAGFDAFLAVRQVGESGRVIGVDMTHEMLAKARANAAKLGLANVEFRLGEIEHLPIADNTADVVISNCVINLSPDKPAVLNDAFRVLKPGGRVAISDVVMLRPLPPELAAMKELLTGCAAGAATVAELSNWLEQAGFTDIRIEPKPESRELIANWAPGLGIEDYVASATIEARRPLV

SEQ ID NO: 5456 - protein, 724 aa, Desulfitobacterium hafniense
MFMFRLRFYRNLAKQEENVKVKYFSKKISIVLALLVMFSSLPNVPVSADPNPLNAVIPKYQEERQFGFSAGGLHTVWFDTSHGGDVTASGNNDYGQLGDGTTISRSLPVTINNLYSRVADISAGGTHNLALIDDQTVRAWGNNQKGQLGIGSDINSLIPVEVPGLSEIIAISSGFDFSLALKNDGTVYSFGSNEFNQLGDSSVGSRNTPAQIPGLDSIVAIAAGGTHALALHMDGSVYAWGSNERGELGDGGSASGYQPVKIASLSNITAISAGLRHCLALGADGSVYAWGDNSLGQLGDPKISDYSNVPIKVQGIKAAFRIAAGYNSSFIIAQQNATYGFGDNSANQINSSAVENLSSPTLLNIKASFISPGWGHTVSRGFLGNDNGVDNWSWGYNQFGQTGNGLTEHVLNPTAPYSGTNRQPVFFRISGANRFKTAVAISIEGWDYGAATVVLARADNFPDALAGTPLAYGLNAPILLTDSARLSNDTKDELDRLAPQNIIILGQEGAISSSIEKDLQKHYKVTRVGGQDRYETAAAIAQYMHDHHLILGNKAVIAYGENFPDALAVSSVAAHAHMPILLTKKDVLADAAGEALKRLGINETFIVGGTGVVGTAVESSLPLPTRYSGNDRYATAIAIANGMGTDPYLVYLATGTNFPDALAGSVLAARSNSPIILVNSSSGAEAAAQWFWWNSRDIKQSYVLGGSGAVPDSVIESIYSRIGY

SEQ ID NO: 5457 - protein, 382 aa, Neurospora crassa
MRVEIAVPAIAALCYRAYSKKSLTPGGIFAALLTAIAHAVHPWNLPFALLVVFFLAGTRVTHVKENVKAKLTVHSKGTSGGEGPRNHTQVFANSLTASIFSLLHAYQLHVRKQTLIANPTSTGTGSLCFSWGGDLLVIGIIANYACVAADTFSSELGILSKGEPRLITSWNLRKVPRGTNGGVSLVGLGAGLLGSMIIVTASMLLLPLCTDETATRLGGAAGWSLGQRRMLILGLTVWGFLGSVVDSILGGLFQASVKDVRTGKIVEGEGGVRVLVTNATNPNNVAGRTKAEIKSSLLSGEGTDAVEDVGAAAGNKYDSRNKQRRSSFGDERPSRVVENGWDLLDNNDVNFLMAFGMSVGAMAVASWYWGVPLQSVLSPWWA

SEQ ID NO: 5458 - protein, 363 aa, Magnetospirillum magnetotacticum
MGESMMRTYAIAAIPADGIGKEVVAAGLEVLDALAKRDGGFRLNVESFDWGSDYYKKHGVMMPENGRDTLKKFDAIYFGAVGAPDVPDHITLWGLRLNICQPFDQYANVRPTRILPGIKSPLGNVRPQDLDWVIVRENSEGEYAGQGGRSHRGFPEEVATEVTIFTRAGVTRIMRFAFKLAQSRPRKLLTVVTKSNAQRHGMVMWDEIAAEVAAEFPDVTWDKMLVDAMTMRMTLKPETLDTIVATNLHADILSDLAAALAGSLGIAPTANLNPERKFPSMFEPIHGSAFDITGKGIANPIGTFWTACMMLDHLGETAASARLMRAIERVTADPALHTPDLGGKATTRIVTDAVIAAIKADNE

SEQ ID NO: 5459 - protein, 395 aa, Agrobacterium tumefaciens str. C58 (Cereon)
MIVFSAFYFMQARASIFRAIATHHGMDRHNAATRSARYHPEARRQCPMEYRYLGKSGLKVPVLSFGTGTFGGSGPLFSNWGTSDATEARRLVDICLEAGVNLFDTADVYSNGASEEVLGEAVRGRRDSVLISTKTSLPMGDGPNEAGSSRFRLVRAVEDALRRLQTDYIDILQLHAFDAFTPVEEVLSTLDMLVRSGKVRYTGVSNFSGWQVMKSLGVADRYGWPRYVINQVYYSLVGRDYEWDLMPLGADQGLGAMVWSPLGWGRLTGKIRRGAPLPEGSRLHETASFGPPVDEEHLYRVIDTLDAVAEETGRTVPQVALNWLLRRPTVSTVIIGARNEQQLRQNLGAVGWELTPEQVARLDEASETTAPYPHFPYQRQAGFARLNPPAVTMPF

SEQ ID NO: 5460 - protein, 486 aa, Glycine max
MLDLNLNAEWTDSFSNGESPLPLEKFPDGLRNQMAESGTSNSSVVNADGSSNGGGDEDSDSTRAADDVYTTFNFDILKVEGANGFVTKELFPVMSEGAKGHATSSFSGTNGFVDLSFDGDGGNTSEMKMLQPQNQNQTQTRTQTQQPAKKSRRGPRSRSSQYRGVTFYRRTGRWESHIWDCGKQVYLGGFDTAHAAARAYDRAAIKFRGVDADINFNLSDYEEDLKQMKNLSKEEFVHILRRHSTGFSRGSSKYRGVTLHKCGRWEARMGQFLGKKYIYLGLFDSEVEAARAYDKAAIKCNGREAVTNFEPSTYEGELKSAAINEGGSQNLDLNLGIATPGPPKENWGQLQFPSFPYNTHGGRSSMMETNVSSGIGNPSLKRMVATEDRPSLWNGMSPNFFPNGERAERIGVDPSNGLPNWAWQTHGQVNATPVPTFSAAASSGFSISATFPSAAIFPTSSMNSIPQSLCFTSSSMPTRNASEYYY

SEQ ID NO: 5461 - protein, 108 aa, Triticum aestivum
PDQDKLKDVLKSRIEGISAMDADDLQAAREERQLVDSLWKECYGEPSSLREKGLVVLPGEDAPQQPPPDVAGKMFEPPLRSWAAPRPAPAEDSDSGSGKKDPPLLLGP

SEQ ID NO: 5462 - protein, 327 aa, Triticum aestivum
MGMPAVRRRERDAEAELNLPPGFRFHPTDDELVEHYLCRKAAGQRLPVPIIAEVDLYRFDPWALPDRALFGTREWYFFTPRDRKYPNGSRPNRAAGNGYWKATGADKPVAPRGGRTMGIKKALVFYAGKAPKGVKTDWIMHEYRLADAGRAAASKKGSLRLDDWVLCRLYNKKNEWEKMQLQQQGGEEMMVEPKAENTASDMVVTSHSHSQSQSHSHSWGEARTPESEIVDNDPSLFQQAAAFQAQSPAAAAAHQEMMATLMVPKKEAADEAGRNDLFVDLSYDDIQSMYNGLDMMPPGDDLLYSSLFASPRVRGSQPGAGGMPAPF

SEQ ID NO: 5463 - protein, 550 aa, Pisum sativum
MLLLFETAAGFALFKVLDEGKLSKVEDLQQSFSSADTARKVVKLKAFSKFENTSEALKSANLLIDGKASKDLRKFLSVHCQNETLGVADTKLASIIKEKLQIDCVHNVGVMELMRGVRYQLTELIAGLAVQDMAPMSLGLSHSLSRYKLKFSADKVDTMIVQAIGLLDDLDKELNTYAMRVREWYGWHFPELTKIILDNIQYAKAVKLMGDRINAAKLDFSEILSEEVEAEVKEASVISMGTEIVTLDLENIRELCDQVLSLSEYRAQLYDYLKSRMNTIAPNLTAMVGELVGARLIAHGGSLLNLAKQPGSTVQILGAEKALFRALKTKHATPKYGLIYHASLIGQAAPKFKGKISRSLAAKTALAIRCDALGDGQDNTMGLENRAKLEARLRGLEGKELGHFAGSAKGKPKIEAYDKDKKKGSGGLITPAKTYNTAADSVIEPKSNSAMDEDTPETPVTGKKKEKKEKKKREKKEEKVEDVVEEPEQEVVKKEKKKKKKESTEKAEVQNGDNNLNGGEKKKKRKKSAEEEDTTDMPSKKKEKKKKKDV

SEQ ID NO: 5464 - protein, 518 aa, Thermoplasma volcanium
MSATINFLMLKRELGIIDLTMSSVTGMIGSGWLFSALYASSIAGPYSIISWIVGSLIVAVLALIYADLSGRMPTAGAAAAYPFLTNGDAAGSINAWSLFLGYASTPPLEVIASITYMNFVMPGLINSSGMLTLRGMLIAISLLFVFFIINAMGIRHTSKVNNYISYLKIGIPIITSFFFISTMFSISNFSYVSSVHPEGIFTAIPDAGIAFSFLGFRQAVELSGEAKNPQRTVPIAIMLSVAIASGIYLLVQVAFIGSLKWFSLTPGDWSGLYNSAYSSGPMLVLASALGLGALASVLLFDGVVSPLGTSNVYQTSTSRVVYRISRMGFLTKKIGTLNSNSVPFYALLLDFFVMSLFILPFPSWYDLVSVNSDLTIIAYMTGPISLVIMNQLGIAPKGFKLPLAKILAPLGFVFSILIIYWSGYPTTLYMSIIALAGLVLFIFARRSPLKSLVGASYMIFILIFVPVASFLGSYGIGLFPFPYDIAIVAVASLGAFAIGTRLYVPSADMSDRIKETVN

SEQ ID NO: 5465 - protein, 357 aa, Saccharomyces cerevisiae
MSQNSNPAVVLEKVGDIAIEQRPIPTIKDPHYVKLAIKATGICGSDIHYYRSGGIGKYILKAPMVLGHESSGQVVEVGDAVTRVKVGDRVAIEPGVPSRYSDETKEGSYNLCPHMAFAATPPIDGTLVKYYLSPEDFLVKLPEGVSYEEGACVEPLSVGVHSNKLAGVRFGTKVVVFGAGPVGLLTGAVARAFGATDVIFVDVFDNKLQRAKDFGATNTFNSSQFSTDKAQDLADGVQKLLGGNHADVVFECSGADVCIDAAVKTTKVGGTMVQVGMGKNYTNFPIAEVSGKEMKLIGCFRYSFGDYRDAVNLVATGKVNVKPLITHKFKFEDAAKAYDYNIAHGGEVVKTIIFGPE

SEQ ID NO: 5466 - protein, 95 aa, Triticum aestivum
  unsure (1)..(95): unsure at all Xaa locations
MXXXGNXXGXDTRAAXAXIYKXLKEEXLXXPAFEFTXXSRQXIDRMVDXNVLGXKCXRXLSVXDSYKLLXGADXWXKRKRSXCTXXWCLMLKFFL

SEQ ID NO: 5467 - protein, 444 aa, Brassica oleracea var. alboglabra
MRGVIPNYHHSYTLLFFVILVLFPHVFSTNTLSPNEALTISSNKTLVSPGDVFELGFFKTTTRNSPDGTDRWYLGIWYKTTSGHRTYVWVANRDNALHNSMGTLKISHASLVLLDHSNTPVWSTNFTGVAHLPVTAELLANGNFVLRDSKTTALDRFMWQSFDYPVDTLLPEMKLGRNRNGSGNEKILTSWKSPTDPSSGDYSFILETEGFLHEFYLLNNEFKVYRTGPWNGVRFNGIPKMQNWSYIDNSFIDNNKEVAYSFQVNNNHNIHTRFRMSSTGYLQVITWTKTVPQRNMFWSFPEDTCDLYKVCGPYAYCDMHTSPTCNCIKGFVPKNAGRWDLRDMSGGCVRSSKLSCGEGDGFLRMSQMKLPETSEAVVDKRIGLKECREKCVRDCNCTGYANMDIMNGGSGCVMWTGELDDMRKYNAGGQDLYLKVAAASLVPS

SEQ ID NO: 5468 - protein, 311 aa, Nostoc sp. PCC 7120
MRILIMGGTRFIGVYLTQILVEQGHEVVLFNRGNRPLPALQGVGQIIGDRTDATQLKEKLSAENFDVVFDNNGRELTDTQPLAEIFQDRVQHFVYMSSAGVYLKSDQLPHIEGDKVDPKSRHKGKHETEAYLQQIGLPFTSIRPTYIYGPRNYNDLESWFFDRIVRDRPLPIPVNGLHITQLGHVKDLAMAMSQVIGNKQAIGQVYNISGDRYVTFDGLARACAQALGKSADDLKIVHYDPKKFDFGKRKAFPMRVQHFFASVNKAQTELNWQPQYDLISGLADAYENDYVASGRDKSEIDFSVDDEILKA

SEQ ID NO: 5469 - protein, 254 aa, Desulfitobacterium hafniense
MARLRPPARRPPPSEGTIVLSQPSSEPTSVRAPAVSPSASQSGPEPGDSGTVRAVSRWQIVGLSINDVIGSGIYLLPATAAMLLGPASLWAVLLAGFAVALLVLCYAQAASYFDQPGGGYLYAREAFGPFAGFEVGWMLLVTRISTAASLSNGLAEAVALFWPAAKAGPARVFIVAGSLGLLVLINVLGVRTAARAGVALAIGKLVPLVLFVAIGAFYFDPSLLHSDAPLPMDHLGEAALLLLFAYAGFEKLPG

SEQ ID NO: 5470 - protein, 431 aa, Deinococcus radiodurans
MGERKCGGWPPKVFLHSLSPGGAGGSTKAVVWHGIGDIRLDDVPEPKIEAPTDAIVRLTASAICGTDLHFIRGTMSDMVPGTILGHEGVGIVEAVGPEVRNFVPGDRVVIPSSASCGYCPPCREGNTSQCDNANPNGPSAGTAFYGGPKSSGPLNGMQAEKVRVVYANSSLVKLPDNVSDDQAIMISDIFPTAYFGAEIAGVKTGSVVVVLGCGPVGQFSIISAKLLGATRVIAVDRLDDRLDMARKNGAEVINFEKEDPVEAVKKLTGGLLADCVIDAVGVDAQHAHAGPAKPDAEKEQKFEQEVQEVAPDAKPEKDGQWTPGDAPSQASEWAIEMTKKAGQIGIIGVYSPQMTTYPIGKAMNKNLTIRMGNCNHRAIIPGLVDLVAAGVVDPARVLTEHEHLGSAIEAFEAFDKRQPGWIKVELEPQAG

SEQ ID NO: 5471 - protein, 366 aa, Saccharomyces cerevisiae
MFSRLPTSLARNVARRAPTSFVRPSAAAAALRFSSTKTMTVREALNSAMAEELDRDDDVFLIGEEVAQYNGAYKVSKGLLDRFGERRVVDTPITEYGFTGLAVGAALKGLKPIVEFMSFNFSMQAIDHVVNSAAKTHYMSGGTQKCQMVFRGPNGAAVGVGAQHSQDFSPWYGSIPGLKVLVPYSAEDARGLLKAAIRDPNPVVFLENELLYGESFEISEEALSPEFTLPYKAKIEREGTDISIVTYTRNVQFSLEAAEILQKKYGVSAEVINLRSIRPLDTEAIIKTVKKTNHLITVESTFPSFGVGAEIVAQVMESEAFDYLDAPIQRVTGADVPTPYAKELEDFAFPDTPTIVKAVKEVLSIE

SEQ ID NO: 5472 - protein, 1927 aa, Helicobacter pylori 26695
  unsure (1)..(1927): unsure at all Xaa locations
MNEENDKLETSKKAQQDSPQDLSNEEATEANHFENLLKESKESSDHHLDNPTETQTHFDGDKSEETQTQMDSEGNETSESSNGSLADKLFKKARKLVDNKKPFTQQKNLDEETQELNEEDDQENNEYQEETQTDLIDDETSKKTQQHSPQDLSNEEATEANHFENLLKESKESSDHHLDNPTETQTNFDGDKSEETQTQMDSEGNETSESSNGSLADKLFKKARKLVDNKKPFTQQKNLDEETQELNEEDDQENNEYQEETQTDLIDDETSKKTQQHSPQDLSNEEATEANHFENLLKESKESSDHHLDNPTETQTNFDGDKSEEITDDSNDQEIIKGSKKKYIIGGIVVAVLIVIILFSRSIFHYFMPLEDKSSRFSKDRNLYVNDEIQIRQEYNRLLKERNEKGNMIDKNLFFNDDPNRTLYNYLNIAEIEDKNPLRAFYECISNGGNYEECLKLIKDKKLQDQMKKTLEAYNDCIKNAKTEEERIKCLDLIKDENLKKSLLNQQKVQVALDCLKNAKTDEERNECLKLINDPEIREKFRKELELQKELQEYKDCIKNAKTEAEKNKCLKGLSKEAIERLKQQALDCLKNAKTDEERNECLKNIPQDLQKELLADMSVKAYKDCVSKARNEKEKQECEKLLTPEARKKLEQQVLDCLKNAKTDEERKKCLKDLPKDLQSDILAKESLKAYKDCVSQAKTEAEKKECEKLLTPEAKKLLEEEAKESVKAYLDCVSQAKTEAEKKECEKLLTPEAKKKLEEAKKSVKAYLDCVSRARNEKEKKECEKLLTPEAKKLLEQQALDCLKNAKTDKERKKCLKDLPKDLQKKVLAKESVKAYLDCVSQAKTEAEKKECEKLLTPEARKLLEEAKKSVKAYLDCVSQAKTEAEKKECEKLLTPEARKLLEEXAKESVKAYLDCVSQAKNEAEKKECEKLLTLESKKKLEEAKKSVKAYLDCVSQAKTEAEKKECEKLLTPEAKKLLEQQALDCLKNAKTEADKKRCVKDLPKDLQKKVLAKESLKAYKDCVSKARNEKEKKECEKLLTPEAKKLLEEAKKSVKAYLDCVSQAKTEAEKKECEKLLTPEARKLLEEAKESVKAYKDCVSKARNEKEKKECEKLLTPEAKKLLEQQVLDCLKNAKTEADKKRCVKDLPKDLQKKVLAKESVKAYLDCVSRARNEKEKKECEKLLTPEAKKLLEEAKESLKAYKDCLSQARNEEERRACEKLLTPEARKLLEQEVKKSIKAYLDCVSRARNEKEKKECEKLLTPEARKFLAKQVLNCLEKAGNEEERKACLKNLPKDLQENILAKESLKAYKDCLSQARNEEERRACEKLLTPEARKLLEQEVKKSVKAYLDCVSRARNEKEKKECEKLLTPEARKFLAKELQQKDKAIKDCLKNADPNDRAAIMKCLDGLSDEEKLKYLQEAREKAVADCLAMAKTDEEKRKCQNLYSDLIQEIQNKRTQNKQNQLSKTERLHQASECLDNLDDPTDQEAIEQCLEGLSDSERALILGIKRQADEVDLIYSDLRNRKTFDNMAAKGYPLLPMDFKNGGDIATINATNVDADKIASDNPIYASIEPDIAKQYETEKTIKDKNLEAKLAKALGGNKKDDDKEKSKKSTAEAKAENNKIDKDVAETAKNISEIALKNKKEKSGEFVDENGNPIDDKKKAEKQDETSPVKQAFIGKSDPTFVLAQYTPIEITLTSKVDATLTGIVSGVVAKDVWNMNGTMILLDKGTKVYGNYQSVKGGTPIMTRLMIVFTKAITPDGVIIPLANAQAAGMLGEAGVDGYVNNHFMKRIGFAVIASVVNSFLQTAPIIALDKLIGLGKGRSERTPEFNYALGQAINGSMQSSAQMSNQILGQLMNIPPSFYKNEGDSIKILTMDDIDFSGVYDVKITNKSVVDEIIKQSTKTLSREHEEITTSPKGGN

SEQ ID NO: 5473 - protein, 250 aa, Solanum commersonii
  unsure (1)..(250): unsure at all Xaa locations
MGRGRVQLKRIENKINRQVTFSKRRSGLLKKAHEISVLCDAEVGLIVFSTKGKLFEYATDSCMERLLERYERYSFAEKQLVPTDHTSPGSWTLENAKLKARLEVLQRNEKLYVGEDLESLNMKELQNLEHQLASALKHIRSRKNQLMHESISVLQKQDRALQEQNNQLSKKVKEREKEVEQQNQWDQQNHEINSSTFVLPQQLDSPHLGEASQNTNVVDNGEVEGGNSSQXQGAANNTVMPQWMVRHLNG

SEQ ID NO: 5474 - protein, 256 aa, Triticum aestivum
MAAASLSRLSRRASAAAAPSLRRILSSTATAPAAPSSSPPPVAAAAAGADRVRWDYRGQRQLVPLGQWLPKVAVDAYVAPDAVLAGQVTVHDGASVWSGSVLRGDLNKITLGFCANVQERSVLHAAWSASTGLPAETLVDRYVTVGAYCLLRSCTIEPECIIGQHSILMEGSLVETNSVLEAGSVLAPGRRIPTGELWAGNPARFVRKLTNEEIMEIPKLAVAINDLMQSHFSEFLPYSNAYLEVEKLKKSFSIPL

SEQ ID NO: 5475 - protein, 364 aa, Dicarpellum baillonianum
VQSQKLAVRAISQLQSLPGGDIKLLCDTVVECVGDLTGYDRVMVYRFHEDEHGEVVAESKRPDLEPYLGLHYPATDIPQASRSLFKQNRVRMIVDCHASPVRVIQDDGLMQALCLVGSTLRAPHGCHAQYMENMGSIASLAMAVIINVNDEEATAGRNPTRLWGLVVCHHTSARCIPFPLRYACEFIMQAFGLQLNMELQLAAQLLEKHVLKTQTLLCDMLLRDSPTGIVTQSPSIMNLVKCDGAALYYQGNYYPLGVTPAEAQIKDIVEWLLAFHGDSTGLSTDSLADAGYPGAALLGDAVCGMAVAYITNRDFLFWFRSHTAKETKWGGAKHHPEDKDDGQRMHPRSSFKAFLEVVKSRSLP

SEQ ID NO: 5476 - protein, 365 aa, Streptomyces coelicolor A3(2)
MAVRTAVRAAVVPAPGAPLEVTGIELPEPGPGRVRVRLAAAGVCHSDLSLSNGTMRVPLPAVLGHEGAGTVVAVGEGVTHVAPGDEVVLNWAPSCGACHACSLGEVWLCAHALAGAADVHARRADDGTDLHPGLNVAAFAEETVVAASCVLPAPEGIPLTEAALLGCAVLTGYGAVHHSARVREGETVAVFGVGGVGLATLQAARIAGASKIVAVDVSPEKEELARAAGATDYLLASDTTAREIRALTGKQGVDVAVECVGRAVTIRTAWESTRRGGRTTVVGIGGKDQQVTFNALEIFHWGRTLSGCVYGNADPARDLPVLAEHVRAGRLDLGALVTERIALDGIPAAFDNMLAGKGGRALVVF

SEQ ID NO: 5477 - protein, 368 aa, Helicobacter pylori 26695
MVVLGSTGSIGKNALKIAKKFGIEIEALSCGKNIALINEQIQVFKPKKVAILDPSDLNDLEPLGAEVFVGLEGIDAMIEECTSNLVLNAIVGVAGLKASFKSLQRNKKLALANKESLVSAGHLLDISQITPIDSEHFGLWALLQNKTLKPKSLIISASGGAFRDTPLEFIPIQNAQNALKHPNWSMGSKITIDSASMVNKLFEILETYWLFGASLKIDALIERSSIVHALVEFEDNSIIAHLASADMQLPISYAIDPKLASLSASIKPLDLYALSAIKFEPISMERYTLWCYKDLLLENPKLGVVLNASNEVAMEKFLNKEIAFGGLIQTISQALESYDKMPFKLSSLEEVLELDKEVRERFKNVAGV

SEQ ID NO: 5478 - protein, 143 aa, Zea mays
  unsure (1)..(143): unsure at all Xaa locations
MAMAFKMATTGMWVTDECKNSFMEMKWKKVHRYIVFKIDERSRLVTVDKVGGPGESYDDLAASLPNDDCRYAVFDFDFVTVDNCRKSKIFFIAWAPTASRIRAKMLYATSKDGLRRALDGISYEVQATDXXEMGFDIIKDRAK

SEQ ID NO: 5479 - protein, 177 aa, Methanosarcina barkeri
MGAKLEPADEVLLKGFAENVCSLYERRRQIEAYIENSMELVAPNLKLIAGSMLGARLISLAGSLEKLAEFPSSTIQVIGASKALFKHLRARAPSPKHGIVYSHHLINTAPWWVRGKVARAVASKLSLAARIDFYSGEINPSLTEKLEAKVLQIRTLNPRSPQKRQESGAKPKKRRRK

SEQ ID NO: 5480 - protein, 458 aa, Pseudomonas syringae pv. syringae B728a
MTSQDGLKRGLSARHIRFMALGSAIGTGLFYGSASAIQQAGPAVLLAYLIGGAAVYMVMRALGEMAVHDPVSGSFSHYATRYMGPLAGFVLGWTYAFEMIIVCLADVTAFGIYMGFWFPEVPRWIWVLGIVFLIGALNLCNVKVFGETEFWLSILKVSAIVAMIVAGFGIMIFGIGSSASGSEIGISNLWAHGGFMPNGVTGLIASFAVVMFAFGGIEIIGITAGEAKDPRRSLPQAINAVPLRILLFYVLTLFVLMCIYPWPQIGTQGSPFVQIFDNLGIASAATILNIVVISAAVSAINSDIFGAGRMMYGLAREGQAPASFARVSRHGVPWMTVLVMGIALLGGVLLNYLIPKDVFLLIASLATFATVWVWLMILLTQVSMRRSMSREEAAQLKFAVPFWPYGPAAAIAFMLFIFGVLGYFPDNRAALIVGAIWIVLLLIAYAVWVKPKALNTTH

SEQ ID NO: 5481 - protein, 143 aa, Triticum aestivum
MTESMVRNKPGMASVKDMPVLQDGPPPGGFAPVRYARRIPNKGPSAIALFLTTFGAFSWGMYQVGQGNKVRRALKEEKIAARSAILPMLQAEEDERFVKEWKKYLEEEARIMKNVPGWKVGESVYNSGKWMPPATGELRPEVW

SEQ ID NO: 5482 - protein, 472 aa, Zea mays
MATALARRGAAALARWRGMCSSSASAPRRAAALSSEELMRMEQDCSAHNYHPIPMVFSKGEGSHIVDPEGNKYIDFLSAYSAVNQGHCHPKVLRALIEQAERLTLSSRAFYNDKFPIFAEYLTSMFGYDMMLPMNTGAEGVETAIKLARKWGYEKKHIPKNEALLVSCCGCFHGRTLGVISMSCDNDATRGFGPLVPGHLKVDFGDIDGLKKIFEELGDRICGFLFEPIQGEAGVVIPPDGYLKGVRDLCSKHNVLMIADEIQTGIARTGKMLACDWENIRPDMVILGKALGAGVVPVSAVLADRDVMLCIRPGEHGSTFGGNPLASAVAVASLKVVRDEGLVERAAKLGQEFRDQLQKVQQKFPQILREVRGRGLLNAVDLNNDALSPASAYDICIKLKERGILAKPTHDTIIRLAPPLTISPEELAEASKALSDVLEHDLPQLQLQKQIKKPESEAEKPVCDRCGRDLYG

SEQ ID NO: 5483 - protein, 345 aa, Zea mays
  unsure (1)..(345): unsure at all Xaa locations
MRPMASNGMASSPSPFFPPNFLLQMQQTPSDHDPQEHHHLHAPPLHLHHNPFLPSSQCPSLQDFRGMAAPMLRKRPTMYGGADDVGVGGEEANCGATNEDEVSDDGSLQAGGPGEKKRRLNVEQVRTLEKNFELGNKLEAERKLQLARALGLQPRQVAIWFQNRRARWKTKQLEKDYDALRRQLDAVKADNDALLSHNKKLQAEILALKGREAAGGXSELINLNKETEASCSNRSEDSSEINLDISRTPPASEGPMDHPPPPPPHHAAGGGLIPFYPSVGGRHSIAAGVGMDQLLHASTPKLEQHGDGCAVAVQAAETAGSFGNLLCGVDETPPFWPWADHHHFH

SEQ ID NO: 5484 - protein, 165 aa, Triticum aestivum
RRPRKRGRKPANGREEPLNHVEAERQRREKLNQRFYALRAVVPKISKMDKASLLSDAIAYIQELEERLRGGAPARAEAGPSVEVKAMQDEVVLRVSTPLDAHPISGPLSAMRDSQLNVVASSMAVADDTVTHTLVVRSAGPERLTAEAVLAAISRGVMMSATPSP

SEQ ID NO: 5485 - protein, 446 aa, Brassica napus
MKGVIPHYHHSYTFFFVILVLFPHAFSTNTLSSNEALTISSNKTLVSPGDVFELGFFKTATKNSQDGSTDRWYLGIWYKTTSDKRTYVWVANRDNPLHNSIGTLKISHASLVLLDQSDTTVWSTNLTGVAHLPVTAELLANGNFVLRDSKTNDLDRFMWQSFDYPVDTLLPEMKIGRKHKSSEKEKILTSWKSPTDPSSGDYSLILETEGFLHEFYLFKNEFKVYRTGPWNGVRFNGIPKKMQNWSYIDNSFIDNNEEVAYTFKVHNNNNMIHSRFRMSSTGYLQVITWTKTVPQRNMFWSFPEDTCDLYKVCGPYAYCDMHTSPTCNCIKGFVPKNAGRWDLRDMSGGCVRSSKLSCGEGDGFLRMSQMKLPETSEALVEKRIGLKECREKCVRDCNCTGYANMDIMDGGSGCVTWTGELVDMRKYDAGGQDLYVKVAEASLVPS

SEQ ID NO: 5486 - protein, 323 aa, Pseudomonas syringae pv. syringae B728a
MTTINTALTSLLDIDHPLILAPMGGASGGRLAAAVSRAGGLGLVGASYGDPQWMARELEMMREVQQPWGVGLVMFTVAKQFELLHLALEYRPAVVALSFGDVRPFVRPIHQANAKVIVQVHDVDQALEALDAGADALIVQGAEAGGHSLRRSSLPLFPAVRDAVGEHVVLIGAGGIADGRGMAAALALGMDGVMMGTRFLASQEALPSERVKQRLLQAVASDTVRTRIFDQVRGIDWPEGYSGRVIGNDFSASWVGEEQAFAASAGQLRLDYEAALAADDVSIRAIWAGEVADLIKEVLPAQRIIESTLRGYAASVERLRTPR

SEQ ID NO: 5487 - protein, 342 aa, Pseudomonas fluorescens PfO-1
MDRAMKILVTGGAGYIGSHTTLALLEAGYEVVVLDNLCNSSDAALHAVEAICGKSALMIRGDVCDRALLDRIFQQHAIDAVLHFAGLKAVGESVRKPLEYYETNVSGSITLCQAMAAAGVFRLVFSSSATVYGEPAQMPIREDFPTGTPTNPYGQSKLIVENVLRDLCQSEPRWSIALLRYFNPIGAHHSGQMGEDPNGIPNNLVPYISQVAVGSLKELSIFGDDYPTVDGTGVRDYIHVVDLADGHLKALQAIADRTGIHTWNLGTGDGYSVLQVLRAFEQACGQPVPYRVMPRRSGDIAESWADASKAAKELGWKATRNLQDMVTDTWRWQSNHPRGYQG

SEQ ID NO: 5488 - protein, 288 aa, Zea mays; identical to SEQ ID NO: 4011

SEQ ID NO: 5489 - protein, 310 aa, Saccharomyces cerevisiae
MNLLRMNALTSKARSIERLKQTLNILSIRNHRQFSTIQQGSKYTLGFKKYLTLLNGEVGSFFHDVPLDLNEHEKTVNMIVEVPRWTTGKFEISKELRFNPIVQDTKNGKLRFVNNIFPYHGYIHNYGAIPQTWEDPTIEHKLGKCDVALKGDNDPLDCCEIGSDVLEMGSIKKVKVLGSLALIDDGELDWKVIVIDVNDPLSSKIDDLEKIEEYFPGILDTTREWFRKYKVPAGKPLNSFAFHEQYQNSNKTIQTIKKCHNSWKNLISGSLQEKYDNLPNTERAGNGVTLEDSVKPPSQIPPEVQKWYYV

SEQ ID NO: 5490 - protein, 225 aa, Glycine max
MSGVVRAALRSTTSVCALVQRSHGLLPMRCFSTEAEQPPLNSTPPPPPFFETDHSGLTYGNLLGVRKHALKTDIINFLEGCNLTLEDVKMDYDRSFSLVSTLLQFPTRDSFDHAVKVILKKGRLYKLDRVNLHQWDQVKPYDGKTILIQGMPRAGTYEDIGRILSGFEFDSSSISLFLRPGGTAGADPIKLATVRFNSRTQAMNAYIAKNGTFCQNNRIWIQVIQ

SEQ ID NO: 5491 - protein, 266 aa, Gossypium darwinii
LSVEEIEVAPPQKNEVRVKIHFTSLCHTDVYFWEAKGQNPLFPRILGHEAGGVVESVGEGVIDVQPGDHVLPIFTGECKECPHCLSEASNMCDLLRINTERGGMLHDGHTRFSKDGKPIYHFLGTSTFSEYTVVHVGQVAKINPEAPLDKVYVLSCGMSTGFGATVNVAKPKKGGSVAIFGLGAVGLAAAEGARVCEASRIIGIDLNPNRFEEAKKFGCTEFVNPKDHNKPVQEVIAEMTGGGVDCSIECTGSTQAMVSAFECVHD

SEQ ID NO: 5492 - protein, 251 aa, Oryza sativa
  unsure (1)..(251): unsure at all Xaa locations
RCFQTGIWTRTHHSNQGRSEAHLAMESSTHCLVSTRXQTLSPANATIKRSSRFRGVSRWTGRFEAHLWDKNSWNPTQRKKGKQGAYDEEEAAARAYDLAALKYWGPTTYTNFPVMDYEKELKIMENLTKEEYLASLRRKSSGFSRGVSKYRGVARHHQNGRWEARIGRVFGNKYLYLGTYSTQEEAARAYDIAAIEYKGVNAVTNFDLRSYITPNXHTDEEDAEQAALRSPQKILPIDWDLEELNNRXRAK

SEQ ID NO: 5493 - protein, 327 aa, Clostridium acetobutylicum
MNVLVCGGAGYIGSHMAAYLLENGHNVVIVDNLTTGHKESILNNKLYVGDLRDEDFLNKVFDENKIDAVIDFAANSLVGESVANPLKYFDNNIQSVVKLLEAMKNHDVKYIVFSSTAATYGEPDNIPILEGDKTFPTNPYGESKLAVEKILKWCDNAYGIKYTALRYFNACGAHISGNIGEDHNPETHLIPLILQVALGKRDKIMIYGDDYDTEDGTCVRDYVHVSDLASAHLLALERLKNGGKSAIYNLGNGKGFSVKQVVEATRKVTGINIKAEIGERRAGDPGTLIASSDRAILELGWKPKFNSLETIIETAWKWHKNHPNGYK

SEQ ID NO: 5494 - protein, 156 aa, Oryza sativa
  unsure (1)..(156): unsure at all Xaa locations
XFFDLYGANGNPGWYLPDFEHGSIKDDYCGGSSGYNSELLKIMETNQSPPCKRPRRDRNREKAPSSNKIEVMEQEIWRDFPEDLFETVIARLPVAAIIRFRTVCRRWSSLLGSDSFSRQYSEAPHGLPWFYTITHENSNNNVVNDPLLKKWHHQSX

SEQ ID NO: 5495 - protein, 408 aa, Xanthomonas campestris pv. campestris str. ATCC 33913
MSTAADSPLSLAHYYLPVYRPRQVVLERGQGSRVWDDQGREYLDLSSGIAVSGLGHNDPDLMAALTEQAGKLWHTSNVFFSAPPLKLAEELVTASRFAQKVFLCNSGTEANEAAIKLVRKWASSQGRPADKRVIVTFRGSFHGRTLASVTATAQPKYQEGYEPLPGGFRYVDFNDVPALESAMASGDVAAVMLEPIQGEGGVMPAAPGFLARVRALCDQHDALLVLDEIQCGMGRTGSLFAHWQEQVTPDIVTLAKALGGGFPIGAMLAGPKVAETMQFGAHGTTFGGNPLAAAVARVALRKLASPQIAENVARQSAALRAGLEALNAEFGVFAQIRGRGLMLGAVLAPAHAGQAGAILDLAAAHGLLLLQAGPDVLRFVPALNLTDAELADGLARLRLAIAAYVAQH

SEQ ID NO: 5496 - protein, 187 aa, Xylella fastidiosa Dixon
MNPIRPFLDKTPQLGCTVYIDPTSTVIGDVILGDDVSVWPQTVIRGDVNQIRIGARTNIQDGTIIHVSHHSPYNAAGYPTLIGTDVTIGHGTIIHACTIEKLCLIGMGACILDGVTIKKYSFVGAGAVISPNKIVGEAELWLGNPARLVRKLSDKEIESLHYSAQHYVKLKNRYLDLSAETTTTPSP

SEQ ID NO: 5497 - protein, 249 aa, Triticum aestivum
MARGSRPGRNGGGGGGCARCFLGFLLKFLAFLQVFAAVSAVLYAASILSRWARHHELHFDHLLPDLWFACVVMAAGLLYCAILLAGYVAAEVNSGCCLCFYTILAMAMMLLEAAVAGHLLLNEHWMQDLPYDRTRELENLVSFVNNNLDLCKWAALATVATQAFSLFLAITLRAMVSSTNADFDSDEDFVVIRRPLLLAQGAPAYLPTTADPRGAHPGLWSSSMRQKYGLNCRSDYTYNTLDQNAVPGQ

SEQ ID NO: 5498 - protein, 306 aa, Catharanthus roseus
MADKENCIRVTRLAKKRAVEAMAASEQQRPSKKRVVLGELKNLSSNISSIQTYDFSSGPQKQQKNKNKRKAKESLGFEVKEKKVEEAGIDVFSQSDDPQMCGAYVSDIYEYLHKMEMETKRRPLPDYLDKVQKDVTANMRGVLIDWLVEVAEEYKLLPDTLYLTVSYIDRFLSMNALSRQKLQLLGVSSMLIASKYEEISPPHVEDFCYITDNTYKKEEVVKMEADVLKFLKFEMGNPTIKTFLRRLTRVVQDGDKNPNLQFEFLGYYLAELSLLDYGCVKFLPSLIASSVIFLSRFTLQPKVHPW

SEQ ID NO: 5499 - protein, 329 aa, Streptomyces lividans
MSGKYLVTGGAGYVGSVVAQHLVEAGNEVVVLHNLSTGFRAGVPAGASFYRGDIRDQDFMRKVFRGRLSFDGVLHFAAFSQVGESVVKPEKYWDNNVGGTMALLEAMRGAGVRRLVFSSTAATYGEPEQVPIVESAPTRPTNPYGASKLAVDHMITGEAAAHGLGAVSVPYFNVAGANRGVRLVHDPESHLIPLVLQVAQGRREAISVYGDDYPTPDTCVRDYIHVADLAEAHLLAVRRRPGNEHLICNLGNGNGFSVREVVETVRRVTGHPIPEIMAPRRGRDPAVLVASAGTAREKLGWNPSRADLAIVSDAWEWHSSHPKGYDDRG

SEQ ID NO: 5500 - protein, 142 aa, Glycine max
MAGTGPMTQDWEPVVIRKRAPNSAAKRDEKTVNAARRAGADIETVRKYNAGTNKAASSSTSLNTKTLDDDTENLTHERVPTELKKAIMQARTEKKLTQSQLAQLINEKPQVIQEYESGKAIPNQQILSKLERALGAKLRGKK

SEQ ID NO: 5501 - protein, 173 aa, Bradyrhizobium japonicum USDA 110
MAQSPFRRMTTPGGYQMSVAMTNCGERGWITDHTGYRYDPVDPRTGVPWPAMPPAFRDLARRAAEQGGFTGFAPDACLVNRYEPGTRLSLHQDKDELDYAAPIVSVSLGLPATFLFGGMARSDKPRRFRLVHGDVVVWGGASRLAYHGVAPLADGEHALLGRQRINLTFRKVL

SEQ ID NO: 5502 - protein, 319 aa, Thermotoga maritima
MEYRKVGKWGVKISELSLGSWLTFGKQLDLDTATEVVKKAFNSGINFFDTAEAYAGGIAEAMLGKILKNFRREDLVVSTKIFWGGSGPNDLGLSKKHLLEGTWNSLKRLQMDYVDILYCHRPDPNVPMEEVVFAMDYILREGLALYWGTSEWSAKEIEEAHRVCKELGVMPPIVEQPQYNMFVRERVEKEYAPLYEKYGMGLTTYSPLASGLLSGKYNNGIPEGSRLATFPQVRKWLEEGGLLNEKTFKKLRKLQNIADQLGASLPQLAIAWILKNKNVSSVILGVSRPEQLEENLKAVEIKEKLTEDVMEEIEKILNE

SEQ ID NO: 5503 - protein, 751 aa, Geobacillus stearothermophilus
MENQNRQNAAQCPFHGSVTNQSSNRTTNKDWWPNQLNLSILHQHDRKTNPHDEEFNYAEEFQKLDYWALKEDLRKLMTESQDWWPADYGHYGPLFIRMAWHSAGTYRTGDGRGGASTGTQRFAPLNSWPNNANLDKARRLLWPIKKKYGNKISWADLFILAGNVAIESMGGKTIGFGGGRVDVWHPEEDVYWGSEKEWLASERYSGDRELENPLAAVQMGLTYVNPEGPDGKPDPKAAARDIRETFRRMGMNDEETVALIAGGHTFGKAHGAGPATHVGPEPEAAPIEAQGLGWISSYGKGKGSDTITSGIEGAWTPTPTQWDTSYFDMLFGYDWWLTKSPAGAWQWMAVDPDEKDLAPDAEDPSKKVPTMMMTTDLALRFDPEYEKIARRFHQNPEEFAEAFARAWFKLTHRDMGPKTRYLGPEVPKEDFIWQDPIPEVDYELTEAEIEEIKAKILNSGLTVSELVKTAWASASTFRNSDKRGGANGARIRLAPQKDWEVNEPERLAKVLSVYEDIQRELPKKVSIADLIVLGGSAAVEKAARDAGFDVKVPFFPGRGDATQEQTDVESFAVLEPFADGFRNYQKQEYSVPPEELLVDKAQLLGLTAPEMTVLVGGLRVLGANYRDLPHGVFTDRIGVLTNDFFVNLLDMNYEWVPTDSGIYEIRDRKTGEVRWTATRVDLIFGSNSILRSYAEFYAQDDNQEKFVRDFINAWVKVMNADRFDLVKKARESVTALQGCLSCRSIVIVGLQ

SEQ ID NO: 5504 - protein, 149 aa, Artemisia annua
  unsure (1)..(149): unsure at all Xaa locations
DDIMDESHTRRGQPCWFRLPKVGMIAANDGILLRNHVPRILKKHFRGKPYXVDLVDLFNEVEFQTASGQMIDLITTLVGEKDLSKYSLSIHRRIVQYKTAYYSFYLPVACALLMFGEDLDKHVEVKNVLVEMGTYFQVQDDYLDCFGAP

SEQ ID NO: 5505 - protein, 430 aa, Brassica rapa
TLSVLLVFVVMILFHPALSIYINTLSSTESLTISSNRTLVSPGNIFELGFFRTNSRWYLGVWYKELTEITYVWIANRDNPISNSIGILKISGNNLVLLGHSNKSVWSTNLTRENERSPVVAELLANGNFVMRDSSGLLWQSFDYPTDTLLPEMKLGYDLKTGLNRFLISWRSLDDPSNGNFSYSLEKRELPEFYLYKGNFRVHRSGPWNGIAFSGIPEDQKLSYMVYNFIENSDEAAYTFRMTNSSIYSKLTINSEGRFQRLTWTPSSGAWNVFWSSPENPECDLYMICGPYAYCDLNTSPSCNCIQGFNPGDVEQWDLRDWTSGCIRRTRLSCSDDGFTRMKNMKLPETTMAIVDRSIGMKECKKRCLSDCNCTAFANADVRNGGTGCVIWTAQLDDVRNYGADGQDLYVRLAAADLVKRRNANGKIIS

SEQ ID NO: 5506 - protein, 229 aa, Escherichia coli CFT073
MANFQLSMLCLAITLVIYFLNKRLYRRFRKLPLMPLVLTPTLLVMLLVFGNISWQNYIGEAHWLLWLLGPATIAFAVPVYDNRAIIKRHWMSLTAGVLTATVVAVTSSVWLARLFTLPDEIQRSLAVRSVTTPFALAASQSLGGQPDLVALFVVVTGVFGMAIGDVLFLRLSIREGMAKGAGFGAASHGAGTARSYELGQQEGVVASLVMMLSGVLMVLVSPLVARMMF

SEQ ID NO: 5507 - protein, 146 aa, Zea mays
MNNQRKPGDWNCKNCQHLNFSRRDYCQRCRDPRPDLQFGDGYSTVGVLTSLDIRPGDWYCSCGYHNFASRSSCFKCGTIVRDFPAGQGAAGAEGDFAGGRDSAAVRAGWKAGDWICTRPGCNVHNFASRMECYRCNAPREAAGTGR

SEQ ID NO: 5508 - protein, 193 aa, Daucus carota
MKLSKSTLVFSALLVILAAASAAPANQFIKTSCTLTTYPAVCEQSLSAYAKTIQNNPQELASTALQVSLTRTQQAQTFMKRLNKFKGLKARQYAAIHDCLEEVEDSLDRVSRSCDEMKNLSHAKGNDFTFRMSNVETWVSAALTDETTCMDGFAGKGMDGKIKESVRAQVVAVARVTSNALALVNNFAAKHKH

SEQ ID NO: 5509 - protein, 193 aa, Triticum aestivum
  unsure (1)..(193): unsure at all Xaa locations
MVSLKLQKRLASSVLKCGKGKVWLDPNEVNEISMANSRQNIRKLVKDGFIIRKPQKIHSRSRARRAHEAKQKGRHSGYGKRRGTREARLPTKILWMRRMRVLRRLLRKYREAKKIDKXHMYHDMYLKXKGNMFKNKKXXXEXXHKSKAEKARXKTLXDQFEAXRAXTRQQGKGIXPXXEXKLLRPKYQLVSVC

SEQ ID NO: 5510 - protein, 375 aa, Mesorhizobium loti
MKTRAAVAVAAGKPLEIMEVDLDGPREGEVLVEIKATGICHTDEFTLSGADPEGLFPAILGHEGAGVVVDVGKGVTSVKKGDHVIPLYTPECRQCPSCLSRKTNLCTAIRATQGQGLMPDGSSRFSIGKDKIFHYMGCSTFSNFTVLPEIALAKVNPDAPFDKICYIGCGVTTGIGAVINTAKVEQGATAVVFGLGGIGLNVIQGLKLAGADMIIGVDLNNDKKAWGERFGMTHFVNPKEIDGDIVPHLVNMTKRGADQIGGADYTFDCTGNTKVMRQALEASHRGWGKSVVIGVAGAGQEISTRPFQLVTGRTWMGTAFGGARGRTDVPRIVDWYMDGKIQIDPMITHLLKLEDINKGFDLMHEGKSIRSVVVY

SEQ ID NO: 5511 - protein, 373 aa, Candida albicans
MSVKTQTITVLPGDHVGTEIVNEPTKVLKAIEAPTPYQKIQFDFKHHLIGGAAIDATGVPLPDDALESAKSSDAVLLGAVGGPKWGTGTVRPEQGLLKIRKELNLYANIRPCNFASDSLLELSPLKAEVVKGTNLIIVRELVGGIYFGERQEQEESEDHQTAWYRPKYTVDEVTRITRMAAFMALQHNPPLPIWSLDKANVLASSRLWRKTVDKVISEEFPALSVQHQLIDSAAMILIQNPTKLSGIIITSNMFGDIISDEASVIPGSLGLLPSASLASLPDTNTAFGLYEPCHGSAPDLPANKVNPIATILSAASMLRLALDCVKETEALEEAVKQVLDSGIRTADLRGTSSTTEVGDAIAETVTKILKQNT

SEQ ID NO: 5512 - protein, 330 aa, Saccharomyces cerevisiae
MSSPANLFPGLNDITDVLEEFPLATSRYLTLLHEIDAKCVHSMPNLNERIDKFLKKDFNKDHQTQVRLLNNINKIYEELMPSLEEKMHVSSIMLDNLDRLTSRLELAYEVAIKNTEIPRGLRLGVDNHPAMHLHHELMEKIESKSNSKSSQALKSESRREAMAANRRQGEHYSASTHQQDDSKNDANYGGSRHESQDHTGNNTNSRKRANAANTNNADPETKKRKRRVATTAVSPSTISTATAVNNGRIGTSTASRGVSSVGNSNNSRISRPKTNDYGEPLYCYCNQVAYGEMVGCDGADCELEWFHLPCIGLETLPKGKWYCDDCKKKL

SEQ ID NO: 5513 - protein, 118 aa, Zea mays
  unsure (1)..(118): unsure at all Xaa locations
STDTLPFATMGSGSLAAMSVFESKYKEXLTREEGIQLVSEAICAGIFNDLGSGSNVDVCVITKGKTEYLRNHQLPNPRTYVSSKGYSFTKGQTEVLSAKITHLKQKVEVTEGGDAMEE

SEQ ID NO: 5514 - protein, 137 aa, Triticum aestivum
  unsure (1)..(137): unsure at all Xaa locations
AHIKVLRRTAIPLGTTVIDKINPAELVNLVDILGPSSTPVMITITIRMGANNMRVKLPHPIRAVCNSGHIVTWITDPMHRNTITATCGLKTHPFDSIKNYVPPIFHLHYQEGSHPRGIHLEMTVQHVIXYIGGSRTV

SEQ ID NO: 5515 - protein, 356 aa, Brassica rapa
ELGFFKPSGRSRWYLGIWYKKVPRRTYAWVANRDNPLPNCSGTLKISGNNLVLLGQSNNTVWSTNLTRCNLRSPVIAELLPNGNFVMRYSNNNNSSGFLWQSFDFPTDTLLPDMKLGYDLKTGRNRFLTSWRSYDDPSSGNTTYKLDIRRGLPEFILINQRVEIQRSGPWNGIEFSGIPEVQGLDYMVYSYTENNKEIAYSFHMTNQSIHSRLTVSDYTLNRFTWILPSQGWSLFWALPTDVCDSLYLCGSYSYCDLTTSPNCNCIRGFVPKNTQQWDLKDGSQGCVRRTRLSGSGDGFLRLNNMKLPDTKTATVDRTIDVKKCEERCLSDCNCTSFAIADVRNGGLGCVFWTGEL

SEQ ID NO: 5516 - protein, 407 aa, Acorus gramineus
ILHRIDVGLVIDLEPVNPSDVPVTAAGALKSYKLAAKAISRLQSLPSGNISLLCDVLVREVSDLTGYDRVMVYKFHEDEHGEVIAEQRKTDLEPYLGLHYPATDIPQASRFLFMKNKVRIICDCFTPPVKVVQDKKLGQPLSLCGSTLRAPHGCHAQYMANMGSIASLVMAVTINDDDDDDGNGNEQQQKGRKLWGLVVCHHTSPRFIPFPLRYACEFLIQVFSIQLNKEVELAAQMREKHILRTQTVLCDMLLRDAPVGIFTQSPNVMDLVMCDGAALYYKNQFWLLGTTPSEVQIKDLVDWLHECHNGSTGLSTDSLMEASYPGASALGNAACGMAAIKIGGTRDYMFWFRSQTAKEIKWGGAKHDPVDNDEEGQKMHPRSSFKAFLEVVKWRSLPWENAEMDAI

SEQ ID NO: 5517 - protein, 215 aa, Populus tremula x Populus tremuloides
MSDVTKTQENEVETKHQAPRLNERILSSLSRRTVAAHPWHDLEIGPGAPHIFNVVVEITKGSKVKYELDKKTGLIKVDRILYSSVVYPHNYGFIPRTLCEDNDPLDVLVLMQEPVLPGCFLRARAIGLMPMIDQGEKDDKIIAVCADDPEYKHYTDIKELAPHRLSEIRRFFEDYKKNENKEVAVNDFLPSNTAVEAIQYSMDLYAEYILHTLRR

SEQ ID NO: 5518 - protein, 342 aa, Xanthomonas axonopodis pv. citri str. 306
MTSIINRRIVLASRPHGEPSADNFRIEEVPVAPTGHDQILVRNRFLSLDPYMRGRMDEGPSYAAPVAIDAVMEGGTVGEVIASNHADYHPGDLLVLPGGWQAHSLLTPTTPLRKLPKDDSLPPSTALGVYGMPGFTAYAGLHEIGKPQPGETLVVAAASGPVGATVAQLARLQGLRVVAIAGGAEKVRYLRDTLHVDVALDHRADDFAEQLRAATPNGIDIYFENVGGKVFDAVLPQLNEFARIPVCGVIATYNSRGQAHPGPDRLPDFMGQVLRKRLTVRGFIQHDFIRLMPAFLREMGQWLREDKIQYREHVLHGLDSAPQGLIDVLRGKNFGKAVVALA

SEQ ID NO: 5519 - protein, 751 aa, Geobacillus stearothermophilus
MENQNRQNAAQCPFHGSVTNQSSNRTTNKDWWPNQLNLSILHQHDRKTNPHDEEFNYAEEFQKLDYWALKEDLRKLMTESQDWWPADYGHYGPLFIRMAWHSAGTYRIGDGRGGASTGTQRFAPLNSWPDNANLDKARRLLWPIKKKYGNKISWADLFILAGNVAIESMGGKTIGFGGGRVDVWHPEEDVYWGSEKEWLASERYSGDRELENPLAAVQMGLIYVNPEGPDGKPDPKAAARDIRETFRRMGMNDEETVALIAGGHTFGKAHGAGPATHVGPEPEAAPIEAQGLGWISSYGKGKGSDTITSGIEGAWTPTPTQWDTSYFDMLFGYDWWLTKSPAGAWQWMAVDPDEKDLAPDAEDPSKKVPTMMMTTDLALRFDPEYEKIARRFHQNPEEFAEAFARAWFKLTHRDMGPKTRYLGPEVPKEDFIWQDPIPEVDYELTEAEIEEIKAKILNSGLTVSELVKTAWASASTFRNSDKRGGANGARIRLAPQKDWEVNEPERLAKVLSVYEDIQRELPKKVSIADLIVLGGSAAVEKAARDAGFDVKVPFFPGRGDATQEQTDVESFAVLEPFADGFRNYQKQEYSVPPEELLVDKAQLLGLTAPEMTVLVGGLRVLGANYRDLPHGVFTDRIGVLTNDFFVNLLDMNYEWVPTDSGIYEIRDRKTGEVRWTATRVDLIFGSNSILRSYAEFYAQDDNQEKFVRDFINAWVKVMNADRFDLVKKARESVTALQTYCYPRSKSKENLQ

SEQ ID NO: 5520 - protein, 197 aa, Oryza nivara
GQTPVFPRILGHEAGGIVESVGEGVTELAPGDHVLPVFTGECKECDHCKSEESNMCDLLRINVDRGVMIGDGKSRFTIKGKPIFHFVGTSTFSEYTVIHVGCLAKINPEAPLDKVCIFSCGFSTGFGATVNVAKPKKGQTVAIFGLGAVGLAAMEGARLSGASRIIGVDLNPAKFEQAKKFGCTDFVNPKDHSKPVH

SEQ ID NO: 5521 - protein, 326 aa, Emericella nidulans
MSAAESPASDAVQETVKAAETKAVNQTAAQIRSFAAGGVGGVCAVIVGHPFDLVKVRMQTAAQGVYSGAIDVVKKTVAREGLVRGLYAGVSAPLVGVTPMFAVSFWGYDLGKTLVSNLSEVEVKNNTPQYSIAQVSAAGFFSAIPMTLITAPFERVKVLLQIQGQNPPPPGQKPKYSGGVDVVRQLYKEGGIRSVFRGSAMTLARDGPGSAAYFAAYEYIKRSLTPKDANGNATGDLSLPAVLAAGGAAGIAMWIPVFPVDTVKSRLQSAPGKPTISGTIRTVYAAGGFKAFFPGFGPALARAVPANAATFAGVELAHQFMNKLFD

SEQ ID NO: 5522 - protein, 438 aa, Perilla frutescens
MASWVLSECGLRPLPRIYPKPRTGQYLSNSNPSKLRLSRTGFSSDSSFSLVGRERNWGLKVSAPLRFQEVEEESEERGSVIVNGVDEFDPGAPPPFKLSDIRAAIPKHCWVKDPWRSMSYVVRDVVVVFGLAAAAAYFNNWAVWPIYWFAQSTMFWALFVLGHDCGHGSFSNDPKLNSVAGHLLHSSILVPYHGWRISHRTHHQNHGHVENDESWHPIPEKIYRTLDFATKKLRFTLPFPMLAYPFYLWGRSPGKKGSHFHPDSDLFVPNERKDVITSTVCWTAMVAILAGLSFVMGPVQLLKLYGIPYIGFVAWLDLVTYLHHHGHDEKLPWYRGKEWSYLRGGLTTLDRDYGWINNIHHDIGTHVIHHLFPQIPHYHLIEATAAAKPVLGKYYKEPKKSGPFPFYLLGVLQKSMKKDHYVSDTGDIVYYQTDPELN

SEQ ID NO: 5523 - protein, 435 aa, Oryza sativa (japonica cultivar-group)
MGSTSGIDDFAFPQEQVYRFGSLDFITDNFGKISFLSSDSNQSERRDRGGGSSSRNPHGAPVEEEEELEDDFDEFRLPMSHRPTENLETEGLEQASVDTQLTSSNVGFRLLQKMGWKGKGLGKNEQGITEPIKAGIRDAKLGVGKQEQDDFFTSEDNVQRRKLNIELEETEEHIKKRELLALHIDICILFMQELLASALMILEHFGHFLFGGSFSCLVQIMTIQVIAEREQKIRSEVKEIQKVFFCSLCNKQYKLAHEFESHLSSYDHNHRKDYISDKFTVVTTEVQGNERNAKQQQQQPADAHRKQQQQKQEPSESSSERITMKNLPNPSNQDQRKTLKFGFSKMAPSKQYLIVNLATLLHGQAPVGNGSDKAHGTPLYYCVGFYLVPFNSDLGLHLGNSWSGSCLAKFLESLSLRALFNCSWFLALVYEQLNT

SEQ ID NO: 5524 - protein, 51 aa, Phaseolus vulgaris
MKQFRVLTCQTVADMIKGKTPEEIRKTFNIKNDFTPEEEEEVRRENQWAFE

SEQ ID NO: 5525 - protein, 460 aa, Ricinus communis
MAAGWVLSECGLRPLPRIYSRPRIGFTSKTTNLLKLRELPDSKSYNLCSSFKVSSWSNSKQSNWALNVAVPVNVSTVSGEDDREREEFNGIVNVDEGKGEFFDAGAPPPFTLADIRAAIPKHCWVKNPWRSMSYVLRDVVVVFGLAAVAAYFNNWVAWPLYWFCQGTMFWALFVLGHDCGHGSFSNNPKLNSVVGHLLHSSILVPYHGWRISHRTHHQNHGHVENDESWHPLSEKIFKSLDNVTKTLRFSLPFPMLAYPFYLWSRSPGKKGSHFHPDSGLFVPKERKDIITSTACWTAMAALLVYLNFSMGPVQMLKLYGIPYWIFVMWLDFVTYLHHHGHEDKLPWYRGKAWSYLRGGLTTLDRDYGWINNIHHDIGTHVIHHLFPQIPHYHLVEATEAAKPVMGKYYREPKKSGPLPLHLLGSLVRSMKEDHYVSDTGDVVYYQKDPKLSGIGGEKTE

SEQ ID NO: 5526 - protein, 643 aa, Rhodopseudomonas palustris
MMDYAGRVAAADTFPKLLRLNAREFGTEIALREKDLGLWRVFTWADYQARVHDFALGMVELGLKRGDVIGIIGDNRPDWVSAEIATHAIGGLSLGLYRDVLDEEADYLLNYGEAKLVFAEDEEQVDKLLGLADRAPHLKHIVYSDPRGMRKYDDPRLLPADQLAKLGRDRASREPGLYDRLVDATQGEDVAILCTTSGTTAHPKLAMLASGRVLKHCATYLSFDPKGPDDEYVSVLPLPWIMEQVYALGKGLLCRMTVNFVEEPDTMMNDFREIAPTFVLFAPRVWEGIAADVRARVMDASPLKQRLYNAGMRAGLAALDHGQHSAFADAVLFRALRDRLGFTRLRSAATGGAALGPDTFRFFRAMGVPLRTLYGQTELLGAYTLHKPDAVDPDTTGVPMGAEIEIKVLNPDVQGIGEVVVRHPNMFLGYYKNPEASTADIKDGWMHSGDAGYFNGAGQLVIIDRIKDLAELSHGERFSPQYIENKLKFSPYVAEAVILGAGRDMLAAMICIRYSIISKWAEKKRIAFTTYSDLASRPEVYELLRREVASVNATLPPAQRISRFLLLYKELDADDGELTRTRKVRRSVINEKYGDIIDGIYSGRSDISVDTAIKFQDGTTQRIRTTLRVVDLGAGHAHAEAAE

SEQ ID NO: 5527 - protein, 429 aa, Thermobifida fusca
MSDLLARHRAVMPAWMPLYYETPIEIVSGKGNRVVDADGNTYLDFFAGIVTNMIGYDVAEVREAVEAQLARGVVHTSTLYLLRGQVELAEKIARLSGIPDAKVFFTNSGTEANETALLLATYARRSDEVLALRNSYHGRSYGTIAVTGNRGWKNSSLSPLTVHYLHGTDRSHPAFAHLSDREYIDVCVADLRDVLSTTAPNVACLIAEPIQGVGGFVMPPDGLFAAYKEVLDEQGILFISDEVQTGWGRTGTSFWGIGNHGVTPDMMTFAKGLGNGFAIGGVVARGDLMDALPANGVSTFGGNPISTAAANATLDYVLDHDLQANAARLGPLVLERLQPLEQLPTVSAVRGRGLMFAIDMADPATGAPSAELAVAVLEETRKRGLLIGKGGLHGQTLRMAPPLTLTEEEAEEGAAILVDAVTAVNDAVA

SEQ ID NO: 5528 - protein, 482 aa, Staphylococcus aureus subsp. aureus Mu50
MGSFFNKIARKEDPAIYQNKDGHLKRTLRVRDFLALGVGTIVSTSIFTLPGIVAAEHAGPAVALSFLLAAIVAGLVAFTYAEMAAAMPFAGSAYSWVNVLFGEFFGWVAGWALLAEYFIAVAFVASGFSANLRGLVKPIGIELPAALSNPFGTNGGFIDIIAAIVILLTALLLSRGMSEAARMENILVILKVLAIILFVIVGLTAINVSNYVPFIPEHKVTATGDFGGWQGIYAGVSMIFLAYIGFDSIAANSAEALDPQKTMPRGILGSLSVAIVLFIAVALVLVGMFHYSQYANNAEPVGWALRQSGHGVVAAIVQAISVIGMFTALIGMMLAGSRLLYSFGRDGLLPSWLSHLNDKHLPNRALVILTIIGVLIGSMFPFAFLAQLISAGTLVAFMFVSLAMYRLRKREGKDLPIPAFKLPLYPVLPAITFVLVLLVFWGLGFEAKLYTLIWFIVGIILYLSYGLRHSKKNDVAEYHPPK

SEQ ID NO: 5529 - protein, 57 aa, Brassica rapa subsp. pekinensis
KEVVSYEFPRPNIGIHRFVFVLFKQKQRHVIDISPNIPSRDKFNTRKFAIEYDLGLP

SEQ ID NO: 5530 - protein, 239 aa, Stylosanthes hamata
MAPREKTPAVKVNAGVKEVHFRGVRKRPWGRYAAEIRDPGKKSRVWLGTFDTAEDAARAYDAAAREFRGPKAKTNFPFPDSDDINSNNNNIVVVKNNNRSPSQSSTVESSSRDRDSYSAAAAATAVADSSPLDLNLAPAGAGFAGSIRFPFQQPFAVFPGGMPAAKQALYLDAVLRASMASHGQFGFGYNRPAAAAAGAQSDSDSSSVIDLNQNEGDVAKNNGRGLVLDLNEPPPQEMA

SEQ ID NO: 5531 - protein, 220 aa, Triticum aestivum
MVNAEAGRSGKPLSVFIQHPSRTRPSPLTTIKMVNLRTQKRLASAVIGCGERKIWLDPNEQSEISNANSRQTIRKLISDGLIIRKPVTQHSRSRARELNLARREGRHRGYGKRKGTADARMPSQVLWMRRLRVLRRLLVKYRASGKIDKHLYHELYHSSKGNAFKHKRALVEHIHRAKAEKARETALQEEMDAKRAKNKAARERKQERAAAKRNALLAEE

SEQ ID NO: 5532 - protein, 751 aa, Geobacillus stearothermophilus
MENQNRQNAAQCPFHGSVTNQSSNRTTNKDWWPNQLNLSILHQHDRKTNPHDEEFNYAEEFQKLDYWALKEDLRKLMTESQDWWPADYGHYGPLFIRMAWHSAGTYRTGDGRGGASTGTQRFAPLNSWPNNANLDKARRLLWPIKKKYGNKISWADLFILAGNVAIESMGGKTIGFGGGRVDVWHPEEDVYWGSEKEWLASERYSGDRELENPLAAVQMGLTYVNPEGPDGKPDPKAAARDIRETFRRMGMNDEETVALIAGGHTFGKAHGAGPATHVGPEPEAAPIEAQGLGWISSYGKGKGSDTITSGIEGAWTPTPTQWDTSYFDMLFGYDWWLTKSPAGAWQWMAVDPDEKDLAPDAEDPSKKVPTMMMTTDLALRFDPEYEKIARRFHQNPEEFAEAFARAWFKLTHRDMGPKTRYLGPEVPKEDFIWQDPIPEVDYELTEAEIEEIKAKILNSGLTVSELVKTAWASASTFRNSDKRGGANGARIRLAPQKDWEVNEPERLAKVLSVYEDIQRELPKKVSIADLIVLGGSAAVEKAARDAGFDVKVPFFPGRGDATQEQTDVESFAVLEPFADGFRNYQKQEYSVPPEELLVDKAQLLGLTAPEMTVLVGGLRVLGANYRDLPHGVFTDRIGVLTNDFFVNLLDMNYEWVPTDSGIYEIRDRKTGEVRWTATRVDLIFGSNSILRSYAEFYAQDDNQEKFVRDFINAWVKVMNADRFDLVKKARESVTALQIHSGIRSMTGANLQ

SEQ ID NO: 5533 - protein, 152 aa, Mesembryanthemum crystallinum
MVKAVVVLSSSEGVSGTVQFTQEGSGPTTVTGNVSGLRPGLHGFHVHALGDTTNGCMSTGPHFNPAGKEHGAPEDETRHAGDLGNITVGDDGTATFTIIDSQIPLTGPNSIVGRAVVVHADPDDLGRGGHELSKATGNAGGRVACGVIGLQG

SEQ ID NO: 5534 - protein, 745 aa, Agrobacterium tumefaciens str. C58 (Cereon)
MQRERLEKVMSSHTPKLDSCGAEPIHIPGAIQEHGALLVLSAREFSVVQASDNLANYIGVDLPIGAVATEANLPFISVLSAWYSGEESNFRYAWAEKKLDVSAHRSGTLVILEVEKAGVGESAEKLMGELTSLAKYLNSAPSLEDALFRTAQLVSSISGHDRTLIYDFGLDWSGHVVAEAGSGALPSYLGLRFPAGDIPPQARQLYTINRLRMIPDVDYKPVPIRPEVNAETGAVLDMSFSQLRSVSPVHLEYMRNMGTAASMSVSIVVNGALWGLIACHHATPHSVSLAVREACDFAAQLLSMRIAMEQSSQDASRRVELGHIQARLLKGMAAAEKWVDGLLGGEGEREDLLKQVGADGAALVLGDDYELVGNTPSREQVEELILWLGEREIADVFATDNLAGNYPTAAAYASVASGIIAMRVSELHGSWLIWFRPEVIKTVRWGGDPHKTVQESGRIHPRKSFEIWKEQLRNTSFPWSEPELAAARELRGAIIGIVLRKTEEMADLTRELQRTNKELEAFSYSVSHDLRAPFRHIVGFAQLLRERSDALDEKSLHYLQMISEAALGAGRLVDDLLNFSQLGRTQLTLKPVDMQKVVSEVRRSLSHAVSDRQIEWRIGALPVIFGDPTLLRQVWYNLIENAIKYSSREPVSIITISAVETEDDVTYSVEDNGVGFDMAYYNKLFGVFQRLQRVEDFEGTGIGLALVRRIVERHHGLVGAEGTVGEGATFSFTLPVTKVEEEKIA

SEQ ID NO: 5535 - protein, 354 aa, Bacillus cereus ATCC 14579
MEKRIVCLAGDGVGPEVMESAKEVLHMVERLYGHHFHLQDEYFGGVAIDLTGQPLPQRTLAACLASDAVLLGAVGGPRWDSAKERPEKGLLALRKGLGVFANVRPVTVESATAHLSPLKNADEIDFVVVRELTGGIYFSYPKERTEEVATDTLTYHRHEIERIVSYAFQLANKRKKKVTSIDKANVLESSKLWRTVTEEVALRYPNVEVEHILVDAAAMELIRNPGRFDVIVTENLFGDILSDEASVLAGSLGMLPSASHAEKGPSLYEPIHGSAPDIAGKNKANPIAMMRSVAMMLGQSFGLTREGYAIEEAVSAVLKSGKCTADIGGTETTTSFTKAVIQEMEEQALVGRGR

SEQ ID NO: 5536 - protein, 306 aa, Solanum tuberosum
MGGGDHGGKSDISFAGIFASSAFAACFAEACTLPLDTAKVRLQLQKKAVEGDGLALPKYRGLLGTVGTIAKEEGIASLWKGIVPGLHRQCIYGGLRIGMYEPVKNLYVGKDHVGDVPLSKKILAALTTGALGITIANPTDLVKVRLQAEGKLPAGVPRRYSGALNAYSTIVKQEGVRALWTGLGPNIGRNAIINAAELASYDQVKEAVLRIPGFTDNVVTHLIAGLGAGFFAVCIGSPVDVVKSRMMGDSAYKNTLDCFVKTLKNDGPLAFYKGFIPNFGRLGSWNVIMFLTLEQAKKFVKSLESP

SEQ ID NO: 5537 - protein, 767 aa, Tolypothrix sp. PCC 7601
MVSEFQAQSINVNSLKEAAIHVCSQIQPHGVLLVLGEPELNILQISSNTWSVFGILPEDVLQKKLEDLLDPFQIERIKAGILEGNLDYINPTKIWVRKKGDEYVVFDAVFHRNPEGLLILELEPAISQENIPFLSFYHLARASINQLEKTTNLRDFCQIIVQEVRKVTGFDRVMLYKFDDDGHGSVIAEEKLDSMEPYLGLHYPESDIPKPARKLFASNFIRLIPDAHAEPVQILPINHPQSQQPIDLTNSILRTAANCHLEYLHNMGVGASLTISLIKDGKLWGLIACHHQTPKYVSYEFRKACEFLGRVIFTEISTREETEDYDYRMNLAYIQTVLVEYMSQEENFIDGLVKHQPNLLNLTSAQGAAVCFGDRCTVIGQTPKEEDLNFLLQWLKNNVREEVFYTDSLPRIYPDAEKFKNVASGLLAIPISKRNYVLWFRPEVIQTVNWGGNPNEAFEVSQTEGNLRLVPRKSFELWKENVQLTSLRWKAVEIKAALELRKAIINIVLRQADELAQLAHDLERSNAELKKFAYVASHDLQEPLNQVANYVQLLEMRYENELDEDAKEFINFAVEGVSLMQTLIDDVLAYSKVDMQASAFQLTEVETPLNRSLSNLRGRIHETGAMITHDPLPTVMADSTQLMQLFQNLIANAIKFRSEQPPKIHIGAERLEDEWLFSVQDNGIGLEPRFSDRIFVIFQRLHTREEYPGTGMGLAICKKIIECHRGRIWVESQLGEGATFYFTIPVGGRERERRNGRQTQKDLFGRG

SEQ ID NO: 5538 - protein, 394 aa, Lilium superbum
DLEPVNPDDIPVATAGALKSYKLAAKAISRLQSLPSGNISLLCDAMVREVSELTGYARVMAYKFHEDEHGEVIAECKRPDLEPYIGLHYPATDIPQASRFLFMKDKVRMICDCTAPSVRVIRDRQLLQPPSLCGSTLRAPHGCHAQYMANMGSIASLVMAVTVNEDDDETDSNNQPKARKLWGLVVCHHTSPRFVPYPLRYACEFLLQVFGIQINKEVELAAQAKEKHIFRIQTVLCDMLLRDAPIGIFKKSPNVMDLVKCDGAALYYKNQFWRLGTTPTEAQIKDIVNWLLECHDGTTGLSTDSLTEAGYPDASSLGDEVCGMATISITLKDFIFWFRSHTAKEIKWGGAKHEPTDKDDDGRKMHPRSSFKAFLEIVKLRSLPWEDMEMDAIQ

SEQ ID NO: 5539 - protein, 440 aa, Oryza sativa
  unsure (1)..(440): unsure at all Xaa locations
MSFRSIVRDVRDGFGSLSRRSFEVTLASLYGLTGHHKGKTQSSLDELDDSPAIIPESRWASLPPELLREVIRRLEADESTWPSRRNVVCFAAVCRTWREMCKETVLSPEFCGKLTFPVSIKQPGPRDGMIQCYIKRNRSKSTYHLYLCLSNVVTAEGGKFVLAAKRHRKTTCTEYTISMVSGNISRSSRTNIGKLRSNFLGTKFIIYDTQPPYNGAVVPHVGRTSKRFNSTKVSPKVPSVTYNIAQVSYELNVLGTRGPRRMRCMMHSIPASSVEPGGIVPGQPEQIVPRALEDSFRSTTTSFSKSIMDPSMDFSSARFSDISGSIMGGDDNGEIKERPLVLRNKPPRWHEQLQCWCLNFRGRVTIASVKNFQLVAAPSPPPAGAPTPSQPGXXADPEKVILQFGKVARDMFTMDYRYPLSAFQAFAICLSSFDTKLACE

SEQ ID NO: 5540 - protein, 152 aa, Triticum aestivum
CKWGTYGKYNVKIRKDTRDKHQFCLRAVKVQCNESGKVHSVLHIEYPDWPDHGVPTSTDAVRQIQKRLHHIPREHPIVAHCSAGIGRTGAYITIHSSIERILLGDTSSYDLVETVKKFRSQRTGMVQTEQQYMFCYRAIADELKDLLSSSGH

SEQ ID NO: 5541 - protein, 238 aa, Rhodobacter sphaeroides
MRDVTEIWSYLAHGPLLWLALTLAAFVAGSFLFERAGRRAWANPVLIAVALVAAALELTGTSYATYFEGAQFVHFMLGPVTVALATPLWDNRAAVRRSLLPMAAALAAGLTAALGSVVLIGRAMGLPAGTILSMLPKSATAPVAIGVSEGIGGSPTLTAVLVILTGIVGAVLAPPLLALLRIRDPRARGFAVGLAAHGIGTAQMMLTDARAGAFAGIGLGVGAVTTALVAPLVAHWLF

SEQ ID NO: 5542 - protein, 355 aa, Pinus sylvestris
MSLLTDLINLDLSDITEKIIAEYIWIGGSGMDIRSKARTLSHPVTDPKDLPKLNYDGSSTGQAPGKDSEVILYPQAIFRDPFRRGNNILVICDTYTPAGEPIPTNKRANAQKYLAIQMLFAEEPWYGIEQEYTLLQKDVNWPLGWPVGGYPGPQGPYYCGTGADKAYGRDIVDAHYKACLYAGINISGINGEVMPGQWEFQVGPTVGISSGDQVWAARYLLERITEVAGVVLSFDPKPIQGDWNGAGAHTNYSTKSMREEGGIKVIKKAIEKLGLRHKEHIAAYGEGNERRLTGRHETADINTFSWGVANRGASIRVGRDTEREGKGYFEDRRPASNMDPYIVTSMIAETNHPLK

SEQ ID NO: 5543 - protein, 750 aa, Chlamydomonas reinhardtii
MAGVPAPASQLTKVLAGLRHTFVVADATLPDCPLVYASEGFYAMTGYGPDEVLGHNCRFLQGEGTDPKEVQKIRDAIKKGEACSVRLLNYRKDGTPFWNLLTVTPIKTPDGRVSKFVGVQVDVTSKTEGKALADNSGVPLLVKYDHRLRDNVARTIVDDVTIAVEKAEGVEPGQASAVAAAAPLGAKGPRGTAPKSFPRVALDLATTVERIQQNFCISDPTLPDCPIVFASDAFLELTGYSREEVLGRNCRFLQGAGTDRGTVDQIRAAIKEGSELTVRILNYTKAGKAFWNMFTLAPMRDQDGHARFFVGVQVDVTAQSTSPDKAPVWNKTPEEEVAKAKMGAEAASLISSALQGMAAPTTANPWAAISGVIMRRKPHKADDKAYQALLQLQERDGKMKLMHFRRVKQLGAGDVGLVDLVQLQGSELKFAMKTLDKFEMQERNKVARVLTESAILAAVDHPFLATLYCTIQTDTHLHFVMEYCEGGELYGLLNSQPKKRLKEEHVRFYASEVLTALQYLHLLGYVYRDLKPENILLHHTGHVLLTDFDLSYSKGSTTPRIEKIGGAGAAGGSAPKSPKKSSSKSGGSSSGSALQLENYLLLAEPSARANSFVGTEEYLAPEVINAAGHGPAAVDWWSLGILIFELLYGTTPFRGARRDETFENIIKSPLKFPSKPAVSEECRDLIEKLLVKDVGARLGSRTGANEIKSHPWFKGINWALLRHQQPPYVPRRASKAAGGSSTGGAAFDNY

SEQ ID NO: 5544 - protein, 140 aa, Triticum aestivum
MSSLMTKKEIGQTHDVLRFGVNDSVRADLAPAHPVQATIHKETKFWDEKKRFGTEAIYGSAFNIRKDLDAQILSRFQRPPGALPSSMLGYEAMTGSLDDFGFEDYLNLPQDSDSLRIPDMHHGMEVRLGLSKGPVCPSFS

SEQ ID NO: 5545 - protein, 382 aa, Triticum aestivum
MGGEKENLDLSDLNSSLPAAAAALSAEDRVGLVNALKDKLQSLAGQHADVLESLSPNVRTRVEFLRGIQSQHDEIEAKFFEERAALEAKYQKLYEPLYAKRYDIVNGVVEVDGAAKEPTSENAAEGGDSDAKGIPDFWLTALKTNDVLTEEIQERDEPVLKYLKDIKWSRIDDPKGFKLEFFIDTNPFFKNSVLTKSYHMVDEDDPILEKAIGTEIEWYPGKNVTQKILKKKPKKGSKNTKPITKTEECESFFNFFSPPQVPDDDEDIDEEAADELQGQMEHDYDIGSTIRDKIIPHAVSWFTGEAVQAEDFDDMEDGDEDDDDEDDDDEEDDEDDEDEDEDDDEDEEELSKPTKKVAGKPKGPAKGGAQGNAEQPTECKQQ

SEQ ID NO: 5546 - protein, 424 aa, Blastocladiella emersonii
TLIDKLMEKTKKVVGSSDKDAPAPASPSSPSTAAGAGSASSTASSTTTAAASGNLSIPSPLVAGSTTSSSISHAQKMATAAHTNSDYSPSPAATPSAPLDAVAERRRRKTTLADLELRQTLGTGSFGRVHLVRLRSTGKYYAMKVLKKAEVVKHKQVEHTLNEKGILEQIDHPFLVALHSSFQDSANLYMVMEYVTGGELFTYLRRSQRFSNNVAKFYAAEVVLAFEYLHSKDIIYRDLKPENLLLDAQGHVKITDFGFAKHVPDITWTLCGTPDYLAPEIIQSRGYGRAVDWYALGVLIFEMLAGYPPFYDEDHVRMYEKILQGKVKWPSHFDPAAKDLLKRLLTTDLTKRYGNLKGGSKDIKMHKWFAGLDWTKLFNKQIPPPYTPPNRGDGDTSNFDAYPEETEPYGKVQPDPYAQLFKDF

SEQ ID NO: 5547 - protein, 356 aa, Nectria haematococca
MATSAPVTSRTETLAKYLKLDQKGQIMAEYVWVDAAGETRSKSRTLPEKDYKAEDLPVWNFDGSSTNQAPGDNSDVYLRPCAVYPDPFRGSPNIIVLAECWNAGGTPNKFNFRHDCVKVMDTYAEDEPWFGLEQEYTLLGPDNRPYGWPTGGFPAPQGEYYCGVGTGKVVQRDIVEAHYKACLYAGIQISGTNAEVMPAQWEYQVGPCLGIEMGDQLWVSRFFLARITEEFGAKVSLHPKPIAGDWNGAGLHSNFSTKAMREEGGMKVIEEALKKLEPHHAECIAEYGEDNELRLTGRHETGSIDSFSWGVANRGTSIRAPRETAAKGYGYFEDRRPASNADPYRVTKALLQFSLA

SEQ ID NO: 5548 - protein, 706 aa, Clostridium tetani E88
MNKIVLYKRGEGLKANFMRKKKITIILLTAFLTTTIVPAFGVTMQGNNFINSKVHAYDLEEGIKFPDKALEKVIREKINKPVGPIEKSDLSNISELDIRNKAIKSIEGIQYLTGLQTIDAANNKIHDLSPISDCTSLSKINFSYNKIEDISTLKNLTILEKVYLKDNEIKRIDALEDLKELKELDLSSNEIKNLKSLTYLNNLKTLTMADNGLKNIDDLGSLEKLESLTLSKNNISDISAIKVIRNLTKLYIDDNQVEDVYPLVGMDYLERINLDKNKIKNIEELEANKDNLKWVKYRGKEITDIGTLKYIVEQANVVVNFKDKNLEREVRKKIEKPLGELRLADVEYIKELNLFAKNIKDISGMEYLRGLRWVNLGKNNIRDISPLKDLEDLEGLYLYKTKVSDITPLQGLENLKKLQITATNLSELHPLKNLTNLERLELGENKIFEVEDLQGLIKLEVLDLSDNYIKDISSLKNLTDIKELKLNKNKVSDISIVANMKNLQRLYINDNNITTLKYLKDAKDLVWLTANNNKITSFEGLENLLDIKEIHVDNNKISKLDPLKNLKELETLSARTNVISDLKPIENLDYIKNLYLYENKISDISPLKNMTGMLRLYLDKNNIKDISVVSNMKDVTTLSLGDNNIINIAPVAGLEDLATLDIGDNDIKDITVLYNLPSLEKLVVTNNDNLPKHQINALSKDVKVVY

SEQ ID NO: 5549 - protein, 247 aa, Myxococcus xanthus
MMAFSGKAALVTGGTRGMGAAIVRHLAKGGADVAFTYANSGDKAATRSVNSRHSADGPLAIQADNGDPDAVRGAAVDRAASELGRLDILVNNAGIFPSGPFEKVTLEELDRTLAIHVRGVFVASQAALAHMPQGGRIISIGSCFAQRVPYGGVTLYSMSKSALIGLTKGLAREVGERGITVNVIDPGSTDTDMNPATGPAVAAELALMSVKHYAQPEDIAATVGHLASASGRFITGTSIAVDGGFSA

SEQ ID NO: 5550 - protein, 372 aa, Zea mays; identical to SEQ ID NO: 2425

SEQ ID NO: 5551 - protein, 225 aa, Zea mays
MAGETKKGLVLLDFWVSPFGQRCRIALAEKGIAYEYSEQELLGGAKSDILLRSNPVHKKIPVLLHDGRPVCESLVILEYLEEAFPEASPRLLPDAAYARAQARFWAAYSDKVYKAGTRLWKLRGDARAQARAEIVQVVRNLDGELGDKAFFGGEAFGFVDVALVPFVPWLPSYERYGDFSVAEIAPRLAAWARRCAQRESVARTLHPPEKVDEFINLLKKTYGIE

SEQ ID NO: 5552 - protein, 368 aa, Triticum aestivum
MAGTVTVPGSSVPSTPLLKDELDIVIPTIRNLDFLEMWRPFFQPYHLIIVQDGDPSKVIKVPEGFDYELYNRNDINRILGPKASCISFKDSACRCFGYMVSKKKYVFTIDDDCFVAKDPSGKDINALEQHIKNLLSPSTPFFFNTLYDPYREGADFVRGYPFSLREGAPTAVSHGLWLNIPDYDAPTQMVKPRERNSRYVDAVLTIPKGTLFPMCGMNLAFDRQLIGPAMYFGLMGDGQPIGRYDDMWAGWCVKVICDHLSLGVKTGLPYLWHSKASNPFLNLKKEYKGIFWQEDIIPFFQNASLSKECDTVQKCYISLSEQVKEKLGKIDPYFVKLADAMVTWIEAWDELNPSDTVVAAGNGKAAAK

SEQ ID NO: 5553 - protein, 66 aa, Triticum aestivum
MARFRLHWLEAMLPLGIIGGFLCIMGNGQYYIHRAAHGRPKHIGNDMWDVAMERRDKKLVDKPAAN

SEQ ID NO: 5554 - protein, 476 aa, Corynebacterium efficiens YS-314
MKGVVGKASMSKKRVAIIGAGPSGMAQLRAFESAEKKGQEIPELVCFEKQDDWGGQWNYSWRTGTDHYGEPVHSSMYRNLWSNGPKEILEFAEYTFDEHFGKPISSYPPREVLWDYINGRAEQSDVKKYVKFAHAVRWVDFDEGTKLFTVRVENLRTGETTSDTYDNVIVAAGHFNFPNIPHFEGIETFPGQVMHAHEFRGAETLADKDILLIGASYSAEDIGSQAYKMGARSITYSYRTKPMGHGWPEEMEELPLVERFEGSTAHFKNGEKRDFDAVILCTGYKHHYPFLPSSLALESPNNIYPDTLYRGVVSEKNNQLFWLGSQDQWLTFNMFDAQAWYARDVILGRIELPTAEEQRAHMDQWLERFNAMEDEFDQIDFQCDYVKDLIEQTDYPMFDLDEVAKIQRQWLQSKKDDIMNFRDATYTSVITGTKAAEHHTPWMLELDDSLERYLSEPDEDEARQVFRGQIREGQAR

SEQ ID NO: 5555 - protein, 109 aa, Zea mays
GFLHDLPAVNTLTLANAVGAATATGCGAAKNVARLDKVLQLVREADLNEDVTLWTELTEGNSLRIEVSILSGMARNGFSENIVAVPVTKVVSELLPMFEAVPVRSAVQA

SEQ ID NO: 5556 - protein, 379 aa, Nicotiana tabacum
RPPAGQVIRCKAAVAWEAGKPLEIEEVEVAPPQKSEVRLKILFTSLCHTDVYFWEAKGQTPLFPRIFGHEAGGIVESVGEGVTDLKPGDHVLPVFTGECQQCRHCKSEESNMCDLLRINTDRGVMIHDGQTRFSKDGKPIYHFVGTSTFSEYTVVHSGCVAKIDPQAPLDKVCVLSCGISTGLGATLNVAKPTKGSTVAIFGLGAVGLAAAEGSRIAGASRVIGIDLNPSRFNDAKKFGVTEFVNPKDYDKPVQQVIAEMTDGGVDRSVECTGNVNAMISAFECVHDGWGVAVLVGVPNKAMRFKTHPMNLLNERTLKGTFFGNYKPKTDLPSVVGKYMNKELELEKFITHQVPFSEINKAFEYMLKGEGLRCMITMEH

SEQ ID NO: 5557 - protein, 157 aa, Triticum aestivum
QYLLVLQGWSYVGDRLLSAVVPYEETGWYDGQMWVKPAEVLARDRLLGSYKVKPVINLLKQTLVGTGALLVGAVALFAFAAPVEEFVHSFNGAPTAASSKPMMRREDLLKLPAEVRQDDDLAAAAAEAANGRPVYCRDRYYRALAGGQYCTSDDLLN

SEQ ID NO: 5558 - protein, 88 aa, Triticum aestivum
MAGVGRNMVAPLLVLNLIMYLIVIGFASWNLNHFINGLTNRPGVGGNGATFYFLVFAILAGVVGAASKLAGVHHVRTWRGDSLATSAS

SEQ ID NO: 5559 - protein, 474 aa, Zea mays
  unsure (1)..(474): unsure at all Xaa locations
MATALARRGAAALARWRGMCSSSASAPRSAAALSSEELMRMEQDCSAHNYHPIPMVFSKGEGSHIVDPEGNKYIDFLSAYSAVNQGHCHPKVLRALIEQAERLTLSSRAFYNDKFPIFAEYLTSMFGYDMMLPMNTGAEGVETAIKLARKWGYEKKHIPKNEXALLVSCCGCFHGRTLGVIXMSCDNDATRGFGPLVPGHLKVDFGDIDGLKKIFEELGDRICGFLFEPIQGEAGVVIPPDGYLKGARDLCSKHNVLMIADEIQTGIARTGKMLACDWENIRPDMVILGKALGAGVVPVSAVLADKDVMLCIRPGEHGSTFGGNPLASAVAVASLKVVRDEGLVERAAKLGQEFRDQLQKVQQKFPQILREVRGRGLLNAVDLNNDALSPASAXYDICIKLKERGILAKPTHDTIIRLAPPLTISPEELAEASKALSDVLEHDLPQLQLQKQIKKPESEAEKPVCDRCGRDLYG

SEQ ID NO: 5560 - protein, 80 aa, Zea mays; identical to SEQ ID NO: 2575

SEQ ID NO: 5561 - protein, 161 aa, Xanthomonas axonopodis pv. citri str. 306
MSDISTFAFTDLEGRTQSMRDYAGNVLLVVNVASKCGFTPQYAGLQALWQRYRERGLVVIGFPCDQFGHQEPGDAAQIRQFCSLDYAVDFPLAAKIDVNGNGAHPLWQWLKHEQRGVLGSEAIKWNFTKFLIGRDGRVLERYAPTTKPEALATEIERALDA

SEQ ID NO: 5562 - protein, 158 aa, Debaryomyces hansenii
MVQAVAVLRGDSKVIGVVNFEQSSESDPTFITWEISGNDANALRGFHVHTFGDNTNGCTSAGPHFNPFTKEHGAPEDDNRHVGDLGNVTTDTSGVAKGSKQDLFVKLIGQNSILGRTVVIHAGTDDLGKGGNAESKKTGNAGARLACGVIGLTNKPNS

SEQ ID NO: 5563 - protein, 354 aa, Brassica napus
MEKYELVKDIGAGNFGVARLMKVKNSKELVAMKYIERGPKIDENVAREIINHRSLRHPNIIRFKEVVLTPTHLAIAMEYAAGGELFERICSAGRFSEDEARYFFQQLISGVSYCHAMQICHRDLKLENTLLDGSPAPRLKICDFGYSKSSLLHSRPKSTVGTPAYIAPEVLSRREYDGKMADVWSCGVTLYVMLVGAYPFEDQEDPKNFRKTIQKIMAVQYKIPDYVHISQDCKHLLSRIFVANSLKRITIAEIKKHPWFLKNLPRELTETAQAAYFKKENPTFSPQTAEEIMKIVDDAKTPPPVSRSIGGFGWGGKGDEEEEEVDEEEVVEEEEDEEDEYDKTVKEAHASGEV

SEQ ID NO: 5564 - protein, 367 aa, Triticum aestivum
MGGEKENLDLSDLNSSLPAAAAALSAEDRVGLVNALKDKLQSLAGQHADVLESLSPNVRTRVEFLRGIQSQHDEIETKFFEERAALEAKYQKLYEPLYAKRYDIVNGVVEVDGVAKEPTSENAAEGGDSDAKGVPDFWLTALKTNDVLTEEIQERDEPVLKYLKDIKWSRIDDPKGFKLEFFFDTNPFFKNSVLTKSYHMVDEDDPILEKAIGTGIEWYPGKNVTQKILKKKPKKGSKNTKPITKTEECESFFNFFSPPQVPDDDEDIDEEAADELQGQMEHDYDIGSTIRDKIIPHAVSWFTGEAVQAEDFDDMEDGDEDDDDEDDDDEEDDEEDEDEDEDDDEDEEELSKPTKKVAGKPKVQTLH

SEQ ID NO: 5565 - protein, 394 aa, Zea mays subsp. mays
LGAERRARLPPGEMGWPLVGGMWDFLRAYKSGKPDTFIDSFVRRFGRTGVYRSFMFSSPTVLVTTAEGCKQVLMDDDAFVTGWPKATVALVGPRSFVAMPHDEHRRIRKLTAAPINGFDALTGYLPFIDSTVTSSLRAWADHGGSVEFLTELRRMTFKIIVQIFLGGADQATTRALERSYTELNYGMRAMAINLPGFAYRGALRARRRLVAVLQGVLDERRAARAKGVSGGGVDMMDRLIEAQDERGRHLDDDEIIDVLVMYLNAGHESSGHITMWATVFLQENPDMFARAKAEQEAIMRSIPSSQRGLTLRDFRKMEYLSQVIDETLRLVNISFVSFRQATRDVFVNGYLIPKGWKVQLWYRSVHMDPQVYPDPTKFDPLRWEGHSPRAGTFL

SEQ ID NO: 5566 - protein, 377 aa, Novosphingobium aromaticivorans
MFSFLRKSKMNTVTVEGSPTTLDIPAGKTLLEAMLDAGLAMPHDCKVGSCGTCKFKLVSGKIGELSPSALALEGDELRSGFRLACQAIPRSDLTIAVDAPLSQGIAIATYRGTIVAAQRLCEDIIGLTIELDRPLAFTPGQYADLTAPGIEGARSYSFAFATVGEPTQQLHFHIRHVPGGAFTDWLFCTDRTGMELKVTAPYGQFALKDSTAPILCIAGGSGLAPIISILEQALDRGADRAVHLLYGARRQSNLYALDKIAALRQRWMAPFEFVPALSDEEPDSDWAGARGLITEQIAGVADLAAHEAYLCGPPAMIDFAEAQLLAAGISRFSGGFNFSGAWKPRAFSFGISGQQNSGHVKKDGRSTKRAPAKGGEI

SEQ ID NO: 5567 - protein, 437 aa, Brassica rapa
MKGVRKTYDNSHTFSFLLVFFVLILFRPAFSINILSSTESLTISSNRTLVSPGNVFELGFFTPGSSSRWYLGIWYKKLPDRTYVWVANRDNPLSNSIGTLKISNMNLVLLDQSNKSVWSTNLTRGNERSPVLAELLANGNLVIRDSNNNDASGFLWQSFDSPTDTLLPEMKLGYDLKKGINRFLTSWRNSDDPSRGEFSYKLDTQRGMPEFYLLKDGLQGHRSGPWNGVQFSGIPEDQKLNYMVYNFTENSEEVAYTFRMTNNSIYSRIQISSEGFLERLTWTPNSIAWNLFWSSPVDLTCDVYKACGSYSYCDLNTSPVCNCIQGFKPLNVQQWDLRDGSSGCIRKTQLSCSGDGFTRMRRMKLPETMKAIVDRSIDVKECENRCLSDCNCTAFANADIRNGRTGCVIWTGVLEDMRTYFAEGQDLHVRLAAADLV

SEQ ID NO: 5568 - protein, 198 aa, Salmonella enterica subsp. enterica serovar Typhi Ty2
MSYYAFEGLIPVVHPDAFVHPSAVLIGDVIVGAGVYIGPLASLRGDYGRLILEAGSNLQDGCIMHGYCDTDTIVHENGHIGHGAILHGCVVGRDALVGMNSVIMDGAVIGEESIVAAMSFVKAGFQGEARQLLVGSPARVLRQVTDQELHWKRLNTKEYQDLAIRCRTGLSETKPLTQVEENRPRLKGTTDVKPKSAQ

SEQ ID NO: 5569 - protein, 289 aa, Schizosaccharomyces pombe
MSEYTTREVGALNTLDYQVYVEKNGTPISSWHDIPLYANAEKTILNMVVEIPRWTQAKLEITKEATLNPIKQDTKKGKLRFVRNCFPHHGYIWNYGAFPQTYEDPNVVHPETKAKGDSDPLDVCEIGEARGYTGQVKQVKVLGVMALLDEGETDWKVIVIDVNDPLAPKLNDIEDVERHMPGLIRATNEWFRIYKIPDGKPENSFAFSGECKNRKYAEEVVRECNEAWERLITGKTDAKSDFSLVNVSVTGSVANDPSVSSTIPPAQELAPAPVDPSVHKWFYISGSPL

SEQ ID NO: 5570 - protein, 101 aa, Carica papaya
  unsure (1)..(101): unsure at all Xaa locations
GYTQXGXVDIXRPPXLASKTGRWKACAFLVGNEAFERMALXGIASXXVNYLXTQLHXDPVSSVXNVXXXSGSVWIXXIXGAXIADSDLGRXXTFXISSVIY

SEQ ID NO: 5571 - protein, 193 aa, Pseudomonas fluorescens PfO-1
MAAKKILMLVGDYVEDYEVMVPFQALQMVGHTVHAVCPDKAAGKTVRTAIHDFEGDQTYSEKPGHQFALNFDFAKVDAKDYDALLVPGGRAPEYLRLNEKVLELVRAFDKAGKPIAAVCHGAQLLAAAGILEGRECSAYPACAPEVRLAGGTYIDIPVTDGHVQGNLATAPAWPAHPKWLAGFLGLLGTKITL

SEQ ID NO: 5572 - protein, 432 aa, Glycine max
MAQILAPSTQWQMRISKSSPNATPITSNMWSSLLWKQNKKVSPTSSAKFRVLAIKSDNSTINRLEGLLNLDITPFTDKIIAEYIWIGGTGIDVRSKSRTISKPVEDPSELPKWNYDGSSTGQAPGDDSEVILYPQAIFKDPFRGGNNILVICDSYTPQGEPIPTNKRHRAAEIFSNPKVQAEVPWYGIEQEYTLLQTNVKWPLGWPVGGYPGPQGPYYCSAGADKSFGRDISDAHYKACLYAGINISGTNGEVMPGQWEYQVGPSVGIEAGDHIWASRYILERITEQAGVVLSLDPKPIEGDWNGAGCHTNYSTKSMREDGGFEVIKKAILNLSLRHKDHISAYGEGNERRLTGKHETASINTFSWGVANRGCSIRVGRDTEKNGKGYLEDRRPASNMDPYVVTSLLAETTLLWEPTLEAEALAAQKLALKV

SEQ ID NO: 5573 - protein, 248 aa, Escherichia coli
MMANIWWSLPLTLIVFFAARKLAARYKFPLLNPLLVAMVVIIPFLMLTGISYDSYFKGSEVLNDLLQPAVVALAYPLYEQLHQIRARWKSIITICFIGSVVAMVTGTSVALLMGASPEIAASILPKSVTTPIAMAVGGSIGGIPAISAVCVIFVGILGAVFGHTLLNAMRIRTKAARGLAMGTASHALGTARCAELDYQEGAFSSASAGVMRDNYFADRTVPFPDYSGSNGLKFAMRRAFLMYVSRVA

SEQ ID NO: 5574 - protein, 764 aa, Pseudomonas aeruginosa PAO1
MNRLCVLGLLIGLSGSPALAAGQGESGNPPATDKERFIASLMARMSNAEKIGQLRLVSVGADHPKEALMADIRAGKVGAIFNTVTRPDIRAMQDQVRHSRLKIPLFHAYDVAHGHRTIFPISLGLAASWDPEVVARSARISALEASADGLDMSFSPMVDITRDARWGRVSEGFGEDTYLTSLLSGVMVRAYQGSNLAAPDSIMAAVKHFALYGAAEGGRDYNTVDMSLPRMFQDYLPPYKAAVDAGAGAVMVSLNTINGVPATANRWLLTDLLRQQWGFKGLTISDHGAVKELIKHGLAGNERDATRLAIQAGVDMNMNDDLYSTWLPKLLAAGEIDQADIDRACRDVLAAKYDLGLFADPYRRLGKPDDPPFDTNAESRLHRQAAREVAREGLVLLKNRDGLLPLKKQGRIAVIGPLAKSQRDVIGSWSAAGVPRQAVTVYQGLANAVGERATLLYAKGANVSGDQAILDYLNSYNPEVEVDPRSAEAMLEEALRTARDADLVVAVVGESQGMAHEASSRTDLRIPASQRRLLKALKATGKPLVLVLMNGRPLSLGWEQENADAILETWFSGTEGGNAIADVLFGEHNPSGKLTMSFPRSVGQVPVYYNHLNTGRPMDHDNPGKYTSRYFDEANGPLYPFGYGLSYTEFSLSPLRLSSERLARGATLEARVTLSNSGKRAGATVVQLYLQDPVASLSRPVKELRGFRKVMLEPGESREIVFRLGEADLKFYDSQLRHTAEPGEFKVFVGLDSAQTESRSFTLL

SEQ ID NO: 5575 - protein, 184 aa, Salmonella typhimurium LT2
MSDTLRPYKNLFPGIGQRVMIDTSSVVIGDVRLADDVGIWPLVVIRGDVNYVAIGARTNIQDGSVLHVTHKSSSNPHGNPLIIGEDVTVGHKVMLHGCTIGNRVLVGMGSIVLDGAIIEDDVMIGAGSLVPQHKRLESGYLYLGSPVKQIRPLSDAERSGLQYSANNYVKWKDDYLSQDNHIQP

SEQ ID NO: 5576 - protein, 1172 aa, Arabidopsis thaliana
MVSGVGGSGGGRGGGRGGEEEPSSSHTPNNRRGGEQAQSSGTKSLRPRSNTESMSKAIQQYTVDARLHAVFEQSGESGKSFDYSQSLKTTTYGSSVPEQQITAYLSRIQRGGYIQPFGCMIAVDESSFRIIGYSENAREMLGIMPQSVPTLEKPEILAMGTDVRSLFTSSSSILLERAFVAREITLLNPVWIHSKNTGKPFYAILHRIDVGVVIDLEPARTEDPALSIAGAVQSQKLAVRAISQLQALPGGDIKLLCDTVVESVRDLTGYDRVMVYKFHEDEHGEVVAESKRDDLEPYIGLHYPATDIPQASRFLFKQNRVRMIVDCNATPVLVVQDDRLTQSMCLVGSTLRAPHGCHSQYMANMGSIASLAMAVIINGNEDDGSNVASGRSSMRLWGLVVCHHTSSRCIPFPLRYACEFLMQAFGLQLNMELQLALQMSEKRVLRTQTLLCDMLLRDSPAGIVTQSPSIMDLVKCDGAAFLYHGKYYPLGVAPSEVQIKDVVEWLLANHADSTGLSTDSLGDAGYPGAAALGDAVCGMAVAYITKRDFLFWFRSHTAKEIKWGGAKHHPEDKDDGQRMHPRSSFQAFLEVVKSRSQPWETAEMDAIHSLQLILRDSFKESEAAMNSKVVDGVVQPCRDMAGEQGIDELGAVAREMVRLIETATVPIFAVDAGGCINGWNAKIAELTGLSVEEAMGKSLVSDLIYKENEATVNKLLSRALRGDEEKNVEVKLKTFSPELQGKAVFVVVNACSSKDYLNNIVGVCFVGQDVTSQKIVMDKFINIQGDYKAIVHSPNPLIPPIFAADENTCCLEWNMAMEKLTGWSRSEVIGKMIVGEVFGSCCMLKGPDALTKFMIVLHNAIGGQDTDKFPFPFFDRNGKFVQALLTANKRVSLEGKVIGAFCFLQIPSPELQQALAVQRRQDTECFTKAKELAYICQVIKNPLSGMRFANSLLEATDLNEDQKQLLETSVSCEKQISRIVGDMDLESIEDGSFVLKREEFFLGSVINAIVSQAMFLLRDRGLQLIRDIPEEIKSIEVFGDQIRIQQLLAEFLLSIIRYAPSQEWVEIHLSQLSKQMADGFAAIRTEFRMACPGEGLPPELVRDMFHSSRWTSPEGLGLSVCRKILKLMNGEVQYIRESERSYFLIILELPVPRKRPLSTASGSGDMMLMMPY

SEQ ID NO: 5577 - protein, 169 aa, Triticum aestivum
  unsure (1)..(169): unsure at all Xaa locations
MAETEYRCFVGGLAWATDDNNLQQAFSQYGEILDAKIINDRETGRSRGFGFVTFGSEESMRQAIEEMNGKELDGRNITVNEAQSRRSGGGGGGGGYGGQRGGGGGYGGGGGGYGGXAGGCFGQGGGGCXAQAGGGYGGHLGGRWLPMTVAVASRWSALVATPGCPLEVL

SEQ ID NO: 5578 - protein, 371 aa, Aspergillus niger
MSGTRAYNILVLPGDGIGPEVMAEAIKVLRTFNSSSMQFHLQEELIGGISIDTHGHSVTQPVKDAAVAADAVLFAAVGGSKVDHIRRGLDGPEGGLLQVRKAMDIYANLRPCSVDVPSREIARDFSPFRQEVIEGVDFVVVRENCGGAYFGKKVEEENYAMDEWGYSTTEIQRIARLAAELALRHDPPWPVISLDKANVLASSRLWRRVVENTISVEYPQVKLVHQLADSASLIMATDPRVLNGVILADNTFGDMLSDQAGSLIGTLGVLPSASLDGLPHPGKQEKVRGLYEPTHGSAPTIAGKNIANPTAMILCVSLMFRYSFNMENEARQIEDAVRAVLDRGLRTPDLGGNSSTQEFGDAVVAALQGKY

SEQ ID NO: 5579 - protein, 449 aa, Lactococcus lactis subsp. lactis
MENSTGLKSSLKTRHIVMLSLGGAIGSGLFLGSGKVIAQAGPSVLLSYILAGLTLYVVMYGVGKMVIHQDEHKAGMAGVVAPFIGDHWAHFADWVYWATWMAVLIAEEAGVSTFLAMLIPGVPLWVFALIVAVLGTAINLWSVRAFAETEYWLAFIKVAVILILIALGIYLLVINDAHLGFVADTAQKVSTKSTAPSFAPNGFSGFLTSLLVVIFSFGGSELAAITVAETENPKVAIPRAIRGVLIRIISFYVIPIFLFLHLLPWSEVLNPDAASPFATIFARVGIPHADKIVLVIIVIAIFSAVNSAIYATSRSLYSRIQGSNSYVGQRLGKLSKNQVPTNAILVSSFVLFIGVLLSAILGDGFWQFVAGSISFTISIVWILLLVAALVLYFKHKEVTNWFVKLATLVVLIALTIIFIMQIVTNPWTLSVFALVICLLSYFTYRKKKA

SEQ ID NO: 5580 - protein, 548 aa, Listeria monocytogenes
MKKRWNSVFKLVLMVAAILGISLYVTTSQGVEVRAESITQPTAINVIFPDPALANAIKIAAGKSNVTDTVTQADLDGITTLSAFGTGVTTIEGVQYLNNLIGLELKDNQITDLTPLKNLTKITELELSGNPLKNVSAIAGLQSIKTLDLTSTQITDVTPLAGLSNLQVLYLDLNQITNISPLAGLTNLQYLSIGNAQVSDLTPLANLSKLTTLKADDNKISDISPLASLPNLIEVHLKNNQISDVSPLANTSNLFIVTLTNQTITNQPVFYQNNLVVPNVVKGPSGAPIAPATISDNGTYASPNLTWNLTSFINNVSYTFNQSVTFKNTTVPFSGTVTQPLTEAYTAVFDVDGKQTSVTVGANELIKEPTAPTKEGYTFTGWYDAKTGGTKWDFATDKMPAEDITLYAQFTINSYTATFDIDGKLTTQKVTYQSLLEEPVAPTKDGYTFTGWYDAKTGGTKSDFATGKMPAGNITLYAQFTKNDNPNPDDPTTNTPTGNGDGTSNPSNSGGNTTLPTAGDENTMLPIFIGVFLLGTATLILRKTIKVK

SEQ ID NO: 5581 - protein, 825 aa, Hordeum vulgare subsp. vulgare
MAFSPRSPWSRSKKPDIYSTVVVHDDEDDAHGGGAARAEDDDDDDPSALPPLLQRLPKDFGGASFDDDDDPYSSDLDDASLSATVVIKRGAPASTSSSSRSPFLDLRRSSPRAAEADPYSTFVVHGTARSGGASSPRESVSGTFIRHSGGPPSPRESVSGTFIRHTRGSSSPRESYSGTFIHHTSGASSPRDPASGAGAGFGSSFMTPSTGQAEEDRQPSLLMQQQQSRRQASMSSVPDSVTREDPSTKYELLHELGKGSYGAVYKARDLRTQELVAVKIISLTEGEEGYEDIRGEIEMLQQCSHPNVVRYFGSYQGEEYLWIVMEYCGGGSVADLIGITEEPLDEPQIAYICRETLKGLAYLHTIFKVHRDIKGGNILLTEQGEVKLGDFGVAAQLTRTMSKRNTFIGTPHWMAPEVIQESRYDGKVDVWALGVSAIEMAEGMPPRSTVHPMRVIFMISSEPAPMLEDKEKWSLLFHDFIAKCLTKDARLRPAAIEMLKHKFIEKCNTGASKMLAKIKEAKIIRETAVQNQLPDSDDAMDATVRINEDYGETVPTNSQSTHETKNDGSGGDFGTMIVHPEDGDEAVESSIFPRAEFIPGLGSINSFTHDPKRAELISKFWAENTADSDATKGRDLDGLPDTQEPKAMPRSIGTFKHHKGVEGTVLRHDNTASPGVASTMTKLSSSPSRKAFSVQDKLWSIYAAGNTVPIPFLKAIDISPLALVSDSVAGNGPAGSSTTDALEAVRELFSGDGQAKKGRKGQNEVPLPPGVHDRLTTSPTLMNLAQALAYHKTCYEDMPLQDSQATEEQQTIQNLCDTLRTILRL

SEQ ID NO: 5582 - protein, 155 aa, Debaryomyces vanrijiae var. vanrijiae
MVQPVTVFKRVYSKVIGVVNFEQSSESDPISITWEISGNDANALIGFHVHTFGDNTNGCTSAGPHFNPFTKEHGAPEDDNRHVGDLGNVTTDTSGVAKGSKQDLFVKLIGQNSILGRTVVIHAGTDDLGKGGNAESKKTGNAGARLACGVIGLTN

SEQ ID NO: 5583 - protein, 379 aa, Cercospora zeae-maydis
MATEQIPDKGLAGVCVNEGPDFKVEVQEVDIPEPSKQNCWTISVNSSLTERWPESGELLIRLNCTGLCMSDIHFMVNDWAVPPMSQFGTKCAGHEGAGVVVKLGPNVSGWEVGDRAGIKPLWDVCHNCEHCWNGRENYCQHGVYTGLVAEGTYRQYLTSPAIYTSRIPEGVPDEVAGPIMCSASTMHRALVDSGLKAGDFVVFPGGGGGVGIQGVQLAKAMGMRPIVIDSGEAKSKLSKELGAEEFIDFKEHEDVAARVKEVAGGIGAHGVLVTAYQAYKDSFSYLGNRIGGRIMCIALPPAGTVNMGTDPNFIVFKNVRVIGTLVGTMQDTAAALEYARRGLLKGIAKVQGVSRFDKSVQALQRGKVAGRIVIDFNKK

SEQ ID NO: 5584 - protein, 340 aa, Burkholderia fungorum
MTTKGTILVTGGAGFIGSHTCVELLNGGYDVVVIDNLVNSNRESLRRVEKITGKAVTFYEADARDEAALNRIFDAHPITGAIHFAALKAVGESVAKPIEYYSNNVGSLLTLLGVMRERNVKQFVFSSSATVYGVPKSSPIDESFPLSATNPYGQSKLIAEQVLRDLEVADPSWRIATLRYFNPVGAHESGLIGEDPAGIPNNLMPYVAQVAVGKLEKLRVFGGDYDTPDGTGVRDYIHVVDLARGHLAALDALVTRDASFVVNLGTGQGYSVIDVVKAFEKAAGRPVPYEIVARRPGDVASCFADPAAAEKIIGWRAQFGIERMCADHWRWQSTNPQGFA

SEQ ID NO: 5585 - protein, 245 aa, Corynocarpus laevigatus
ALSIAGAVQSQKLAVCAISQLQSLPGGDIKLLCDTVVESVRELTGYDRVMVYKFHEDEHGEVVAESKRADLDPYIGLHYPATDIPQASRFLFKQNRVRMIVNCHASSVRVIQDEELRQPLCLVGSTLRAPHGCHAQYMANMGSIASLAMAVVINGTDEEGTGGRNSMRLWGLVACHHTSARCIPFPLHYACEFLMQAFGLQLNVELQLALQLSEKHVLRTQTLLCDMLLRDSPTGIVTQSPSIMD

SEQ ID NO: 5586 - protein, 314 aa, Glycine max
PCRSTSKSVSSSSEDDNELRRGPWTLEEDNLLSQYIFNHGEGRWNLLAKRSGLKRTGKSCRLRWLNYLKPDVKRGNLTPQEQLIILELHSKWGNRWSKIAQHLPGRTDNEIKNYWRTRIQKQARHLKIYTDSREFQELVRRFWMPRLLQKAKESSSSNMSIQNQAIPMPFDYVSQHLTVGTIPPWQGPCMNEAGPTYMDQHEQNSDSEHNNGSCISLSESANIPKVPQHFGHTTITQFHALNTNDFGTFTYEGYNVNNNVYEMDNFKTTTTWVAEDAQYPIGDCQMVGSNWVNNDFACNMWNMDELWQFSKLQK

SEQ ID NO: 5587 - protein, 349 aa, Oryza sativa (japonica cultivar-group)
MAGTVTVPSASVPSTPLLKDELDIVIPTIRNLDFLEMWRPFFQPYHLIIVQDGDPTKTIRVPEGFDYELYNRNDINRILGPKGSCISFKDSACRCFGYMVSKKKYVFTIDDDCFVAKDPSGKDINALEQHIKNLLSPSTPFFFNTLYDPYREGADFVRGYPFSLREGAKTAVSHGLWLNIPDYDAPTQMVKPRERNSRYVDAVMTVPKGTLFPMCGMNLAFDRDLIGPAMYFGLMGDGQPIGRYDDMWAGWCMKVICDHLSLGVKTGLPYIWHSKASNPFVNLKKEYKGIFWQEDIIPFFQNATIPKECDTVQKLLPLPRPSRSGRSSARSTPICQACRCHGHLDRGLG

SEQ ID NO: 5588 - protein, 364 aa, Brexia madagascariensis
VQSQKLAVRAISRLQSLPGGDIKLLCDTVVESVRDLTGYDRVMVYKFHEDEHGEVVAESQRPDLEPYIGLHYPATDIPQASRFLFKQNRVRIIVDCHASSVRVIQDDGLMQPLCLVGSTLRAPHGCHAQYMENMGSIASLAMAVIINGNDEEVIGGRNPTRLWGLVVCHHTSARCILFPLRYACEFLMQAFGLQLNMELQLAAQLLEKHVLKTQTLLCDMLLRESPTGIVTQSPSIMDLVKCDGAALYYQGNFYPLGVTPTEAQIKDIVEWLLAFHGDSTGLSTDSFADAGYPGAALLGDAVCGMAVAYITNRDFLFWFRSHTAKEIKWGGAKHHPEDKDDGQRMHPRSSFKAFLEVVKRRSLP

SEQ ID NO: 5589 - protein, 521 aa, Candida maltosa
MAIEQIIEEVLPYLTKWYTIIFGAAVTYFLSIALRNKFYEYKLKCENPVYFQDAGLFGIPALIDIIKVRKAGQLADYTDTTFDKYPNLSSYMTVAGVLKIVFTVDPENIKAVLATQFNDFALGARHAHFDPLLGDGIFTLDGEGWKHSRAMLRPQFAREQIAHVKALEPHVQILAKQIKLNKGKTFDLQELFFRFTVDTATEFLFGESVHSLYDEKSGIPNDIPGRENVREAFNTSQHYLATRTYSQIFYWLTNPKEFRDCNAKVHKLAQYFVNTALNATEKEVEEKSKGGYVFLYELVKQTRDPKVLQDQLLNIMVAGRDTTAGLLSFAMFELARNPKIWNKLREEVEVNFGLGDEARVDEISFETLKKCEYLKAVLNETLRMYPSVPINFRTATRDTTLPRGGGKDGNSPIFVPKGSSVVYSVYKTHRLKQFYGEDAYEFRPERWFEPSTRKLGWAYLPFNGGPRICLGQQFALTEASYVIARLAQMFEHLESKDETYPPNKCIHLTMNHNEGVFISAK

SEQ ID NO: 5590 - protein, 348 aa, Carica papaya [sequence omitted]

SEQ ID NO: 5591 - protein, 407 aa, Streptomyces coelicolor A3(2)
MTAPVRTARGSEELIRAEEPVLAHNYHPLPVVVARAEGAWVEDVEGRRYLDMLAGYSALNFGHRHPALVEAAHRQLDRLTLTSRAFHNDRLAGFAERLAALTGTDMVLPMNTGAEAVESGIKVARKWAYDVKGVPADRATIVVAADNFHGRTTTIVSFSTDETARSGFGPFTPGFRIVPYNDLAALEAAVDETTAAVLIEPIQGEAGVLIPDDGYLAGVRELTRRKGCLFVADEIQSGLGRTGHTLAVEHESVVPDVVLLGKALGGGIVPVSAVVGRRDVLGVLHPGEHGSTFGGNPLAAAVGTAVVELLETGAFQRRAAELGAVLREGLAALVGRGVVGFRARGLWAGVDVDPALGSGREISERLMREGILVKDTHGSTIRLAPPLTVTAEELTGALGTLEKVLTS

SEQ ID NO: 5592 - protein, 210 aa, Sophora affinis
YDRVMAYKFHEDDHGEVIAEITKPGLEPYLGLHYPATDIPQAARFLFMKNKVRMIVDCHAKHVKVLQDEKLPFDLTLCGSTLRAPHSCHLQYMANMDSIASLVMAVVVNDSDEDGDSSDAVQPQKRKRLWGLVVCHNTTPRFVPFPLRYACEFLAQVFAIHVNKEIELEYQLIEKNILRTQTLLCDMLMRDAPLGIVSQSPNIMDLVKCD

SEQ ID NO: 5593 - protein, 360 aa, Azotobacter vinelandii
MSKQILVLPGDGIGPEIMAEAVKVLQLANEKYQLGFVLGYDELGGAAVDKYGVPLADETLERARAADAILLGAVGGPKWDAIDPAIRPERGLLKIRSQLGLFGNLRPALLYPQLAEASTLRPEVVAGLDILIVRELTGGIYFGAPRESRLLANGERMAYDTLPYSESEIRRIAKVGFDMARVRGKKLCSVDKANVLASSQLWRAVVEEVAKDYPDVVLSHMYVDNAAMQLVRAPKQFDVIVTDNMFGDILSDEASMLTGSIGMLPSASLDADNKGMYEPCHGSAPDIAGKGIANPLATILSVSMMLRYSFGQVEAANAIEQAVSKVLDQGLRTGDIWSEGCRKVGTAEMGDAVVAALATL

SEQ ID NO: 5594 - protein, 178 aa, Pyrococcus abyssi
MNPFHDLEPGPNVPEVVYALIEIPKGSRNKYELDKKTGLLKLDRVLYSPFFYPVDYGIIPRTWYDDDDPFDIMVIMREPTYPLTIIEARPIGLFKMIDSGDKDYKVLAVPVEDPYFKDWKDIDDVPKAFLDEIAHFFKRYKELQGKEIIVEGWEGAEAAKREILRAIELYKEKFGSKE

SEQ ID NO: 5595 - protein, 431 aa, Schizosaccharomyces pombe
DPAWGFAVSWNYFLNYFVTCPLELTTCAITFKFWTEINSAAWISIFLAVVIVINLFGVRAYGEVEFILSTIKVIATVGFIILAIIINCGGVPTDHRGYIGGSIIKQKPFRHGFKGFCSVFTTAAFSFSGTEIIGLAAAEVGNPRKSVPSAVKQVFWRIAIFYVVSLILIGLLVSPDDPRLMGNGDVSVSPFVLAIQEANIKGLPSVFNAVIIISVVSVTNSTTYTAARTLQGMATLKQAPKFFSYTDRVGRPLIAMVVVLLFGFFAYINEADKNGSDISDTVFDWLLAISGLSSFFTWGSICLSHIMFRLAFKKQGHSLKELGFVSPMGIWGSVIGLGFNILCLMAEFYVSLFLIGGSPNANDFFQGYLAACIALAFFIGYKIYDRSHIPSLDKLDIDTGLKTYDNQDEEKEEYSSKGPLNILKKAWNAVC

SEQ ID NO: 5596 - protein, 544 aa, Rubus idaeus
MENKHQDDHEFIFRSKLPDIYIPNHLPLHTYCFENISQFHDRPCLINGNTGETFTYAEVELTSRRVAAGLDKLGIQQNDVVMLLLQNCPEFAFAFLGASYIGAMSTTANPFYTPAEVAKQAKASNAKLIITQSAYVDKVKDFAKLNDVKVMCVDETSSEDVLHFSELMSADESETPAVKINPDDVVALPYSSGTTGLPKGVMLTHKGLVTSVAQQVDGENPNLYFHKEDVILCVLPLFHIYSLNSVFLCGLRVGAAILIMQKFEINKLLELVEKEKVTIAPFVPPIVLSIAKCPDLHRYDLSSIRMVMSGAAPMGKELEDTVRAKLPNAKLGQGYGMTEAGPVLSMCLAFAKEPYEIKSGACGTVVRNAEMKIIDPDTNESLPRNQSGEICIRGSQIMKGYLNDPEATENTIDKEGWLHTGDIGYIDDDDELFIVDRLKELIKYKGFQVAPAELEAMLISHPNLSDAAVVSMKDEAAGEVPVAFVVRSNGSKISEDDIKQYISKQVVFYKRISKVFFTDKIPKAPSGKILRKDLRARLAAGLPN

SEQ ID NO: 5597 - protein, 818 aa, Oryza sativa (japonica cultivar-group)
MAASSSPRRLGFLAALVFAVSVSASVSSVSGGSGPITTNGGNYTRVCDPARFAAAGLDMAGFPYCDASLPYADRVRDLVGRMTLEEKVANLGDRAGGAPRVGLPRYLWWGEALHGVSDVGPGGTWFGDAVPGATSFPLVINSAASFNETLWRAIGGVVSTEIRAMYNLGHAELTYWSPNINVVRDPRWGRASETPGEDPFVVGRYAVNFVRGMQDIDGATTAASAAAATDAFSRPIKVSSCCKHYAAYDVDAWNGTDRLTFDARVQERDMVETFERPFEMCIRDGDASCVMCSYNRINGVPACADARLLTETVRRDWQLHGYIVSDCDSVRVMVRDAKWLGYTGVEATAAAMKAGLDLDCGMFWEGVHDFFTTYGVDAVRQGKLKESAVDNALTNLYLTLMRLGFFDGIPELESLGAADVCTEEHKELAADAARQGMVLLKNDAALLPLSPEKVNSVALFGQLQHINATDVMLGDYRGKPCRVVTPYDGVRKVVSSTSVHACDKGSCDTAAAAAKTVDATIVVAGLNMSVERESNDREDLLLPWSQASWINAVAEASPSPIVLVIMSAGGVDVSFAQDNPKIGAVVWAGYPGEEGGTAIADVLFGKYNPGGRLPLTWYKNEYVSKIPMTSMALRPDAEHGYPGRTYKFYGGADVLYPFGHGLSYTNFTYASATAAAPVTVKVGAWEYCKQLTYKAGVSSPPACPAVNVASHACQEEVSFAVTVANTGGRDGTHVVPMYTAPPAEVDGAPRKQLVAFRRVRVAAGAAVEVAFALNVCKAFAIVEETAYTVVPSGVSRVLVGDDALSLSFPVQIDLQAAA

SEQ ID NO: 5598 - protein, 213 aa, Listeria monocytogenes
ETITVSTPIKQIFPDDAFAETIKDNLKKKSVTDAVTQNELNSIDQIIANNSDIKSVQGIQYLPNVTKLFLNGNKLTDIKPLTNLKNLGWLFLDENKIKDLSSLKDLKKLKSLSLEHNGISDINGLVHLPQLESLYLGNNKITDITVLSRLTKLDTLSLEDNQISDIVPLAGLTKLQNLYLSKNHISDLRALAGLKNLDVLELFSQECLNKPIN

SEQ ID NO: 5599 - protein, 181 aa, Corynebacterium jeikeium
AQGEIDLATVRDLHFLTAKPFLYVFNSDESVLTDDAKKAELRELVAPADCVFLDAATEADLLELDDEEAAELLESVGQTEPGLQTLAKAGFATLGLQTYLTAGPKEVARGRIHQGDTAPQAAGVIHTDFEKGFIKAEIVAFEDLDELGSMAEARAHGKVRQEGKDYVMADGDVVEFKFNVS

SEQ ID NO: 5600 - protein, 80 aa, Zea mays; identical to SEQ ID NO: 2575

SEQ ID NO: 5601 - protein, 97 aa, Glycine max
  unsure (1)..(97): unsure at all Xaa locations
ICHFFTAIVGAKWWVQQXFGKSLPFLNXLPYLTGNPTFKARKCTKKTLGDTPTVTCNVSNVYKVVKAKNGSMPLALAMLXPFVVLVGCVLVWDYLSP

SEQ ID NO: 5602 - protein, 392 aa, Tristellateia madagascariensis
DLEPVNPADVPLTAAGALKSYKLAAKAISRLQSLPSGNISLLCDVLVKEVRDLTGYDRVMVYKFHEDEHGEVVSECRRSDLESYLGLHYPATDIPQASRFLFMKNKVRMICDCLAPPVKVIQDERLPQPLSLCGSTLRSPHGCHAQYMANMGTIASLVMSVTINEDDDTMDGDQQQMARKLWGLIVCHHTSPRFVPFPLRYACEFLIQVFGVQINKELELAAQVREKHILRIQTMLCDMLLRDAPVGIITQSPNVMDLVKCDGAALFYKNKFWLLGITPTEAQIRDIAEWLLEYHSGNTGLSTDSLMEAGYPGASVLGDAVCGMASVSITSRDFLFWFRSHTAKEIKWGGAKHDPDDKDDGRKMHPRSSFKAFLEVVKWRSLPWEDVEMDAI

SEQ ID NO: 5603 - protein, 311 aa, Bacteroides thetaiotaomicron VPI-5482
MNRITSLFGIQYPIIQGGMVWCSGWRLASAVSNAGGLGLLGAGSMHPETLREHIRKCRAATDRPFGVNIPLMYPQIEEIMAIVAEEGVKIVFTSAGNPKAWTGWLHERGIIVAHVVSSSRFAMKCEEAGVDAVVAEGFEAGGHNGREETTTFCLIPAVRSATTLPLIAAGGIGTGEGIFAAMVLGAEGVQIGTRFALTDESSASPVFKEYCLGLGEGDTKLLLKKLAPTRLVRNNFRDAVERAEDGGASAEELRTLLGRGRAKKGIFEGDLEEGELEIGQVSAIVSRQQSVAEVMNELVEAMQRAAEKKYW

SEQ ID NO: 5604 - protein, 424 aa, Methanothermobacter thermautotrophicus str. Delta H
MKPNLRRELGLFDAVNLVVGTIVGADIYIVAAYGAGSLGPASILAWLLAGLMALIIALVFSEASAMLPRTGGPYVYAGEALGRFTGFITGWSLWVSSWVAIAVFPLAFIYYLEYFIPLDPPAEAVIKVLFILSLTIINIAGVGRAGKVNDILTILKVAPVLLFAVLGAIHLALNPGLLVSNYTPAAPMGLGALGTVTVLVFWAYVGFELVTVPADEVRDPERTIPLSITLGMIFVTLFYILTNAVILGLVPWRVLASSTAPLTVAGYSLMGGIGALILTAGAVFSIAGSEEAGMLTTARLLFAMSEDGFLPGFLSRVHRRFGTPHMSILVQNLTALLAALTGTVSGLIELSVVTLLLPYAVTCISLAILRRRDGSGIPLKSVLGVLVCIYLLMNTTPSTTAWGLLLILSGAPLYLIFGFKRLRR

SEQ ID NO: 5605 - protein, 205 aa, Zea mays
  unsure (1)..(205): unsure at all Xaa locations
MAGSMELPTKGGFSFDLCRRNAMLEKNGLKMPGFRKTGTTIVGLVFADGVVLGADTRATEGPIVADKNCEKIHFMAPNIYCCGAGTAADTEAVTDMVSSQLQLHRYATSRESRVVTALTLLKTHLFNYQGHVSAALVLGGVDVTGPHLHTVYPHGSTDTLPFATMGSGSLAAMSVFESKYREGLTRXEEGIALVAEAIRAGIFND

SEQ ID NO: 5606 - protein, 210 aa, Zea mays
MARGGAWAAVAAAAVWWMAAGAGAVWLEIAPSGTKCVSEEIQSNVVVIGDYSVLYDHHHAQPTISVKVTSPFGDIVHKKEKVSMGQFAFTTAEAGNYLACFSIDGEDRGLVVKLNLDWKIGLASRDWDSVAKKEKIEGVELELLKLEVAVQSIHDNLLLLKSKEANMRDVSEQTNSRVTWLSMLSLVVCIAVSVLQLWHLQQYFRKMKLI

SEQ ID NO: 5607 - protein, 302 aa, Panicum miliaceum
MADAKQQQAVAPSAAWMTVKPFVNGGASGMLATCVIQPIDMVKVKIQLGEGSAATVTKKMLANEGIGSFYKGLSAGLLRQATYTTARLGSFRVLTNKAVEANEGKPLPLLQKAVIGLTAGAIGASVGSPADLALIRMQADSTLPAAQRRNYKNAFHALYRIVADEGVLALWKGAGPTVVRAMSLNMGMLASYDQSVELFRDTLGAGELSTMLGASAVSGFCASACSLPFDYVKTQIQKMQPDANGKYPYTGSLDCVMKTLKSGGPFKFYTGFPVYCVRIAPHVMLTWIFLNQIQKFEKDIGL

SEQ ID NO: 5608 - protein, 346 aa, Bacillus subtilis subsp. subtilis str. 168
MKAARWHNQKDIRIEHIEEPKTEPGKVKIKVKWCGICGSDLHEYLGGPIFIPVDKPHPLTNETAPVTMGHEFSGEVVEVGEGVENYKVGDRVVVEPIFATHGHQGAYNLDEQMGFLGLAGGGGGFSEYVSVDEELLFKLPDELSYEQGALVEPSAVALYAVRSSKLKAGDKAAVFGCGPIGLLVIEALKAAGATDIYAVELSPERQQKAEELGAIIVDPSKTDDVVAEIAERTGGGVDVAFEVTGVPVVLRQAIQSTTIAGETVIVSIWEKGAEIHPNDIVIKERTVKGIIGYRDIFPAVLSLMKEGYFSADKLVTKKIVLDDLIEEGFGALIKEKSQVKILVRPN

SEQ ID NO: 5609 - protein, 563 aa, Vibrio cholerae
MRMIQPNQFNHPPCALPPPNEMLLRWAKERPNEVYLKQIINRQFVEFTYAEVADKALRLVSALRALGADPGDKVALISKNCAEWFICDLAMMLGDYISVPIFPTAGSETIDYCLEHSESKILIVGKLDDNKATAHVLAERPNLISISLPYPSAAKCQYEFQTLIKQHQPSEERPTHFDEKLMSIVYTSGTSGQPKGAMLTYGAFTWSAQQLINHIGIEENDRLFSYLPLAHITERVYIFGSSIIGGVLTAFPESLDTFIEDVKMHRPTLFISVPRLWTLFQQRIQDKLPQKKLNILLKIPFVNSLIKRKLADGLGLDQARVLGCGSAPVSPALLEWYRSVGLNITEAWGMTESFAYSTLNYPFRADKIGTVGNAGPGIELKIAEDEEILVRSKGLFAGYYKNDTATAESFNDDGWLHTGDIGSLDSEGYLTIQGRKKDTFKTAKGKFVAPVPIEKKLFEYSRVEMMCLIGSGLPAPILLAVPHNFPHFDRARYERTTQKVIARINSELESHEQIKGVLMIKDPWSIDNGILTPTLKIKRHVLEKKYHDVGQNWPKGQLVVWEE

SEQ ID NO: 5610 - protein, 384 aa, Mycobacterium tuberculosis CDC1551
MRAVVIDGAGSVRVNTQPDPALPGPDGVVVAVTAAGICGSDLHFYEGEYPFTEPVALGHEAVGTIVEAGPQVRTVGVGDLVMVSSVAGCGVCPGCETHDPVMCFSGPMIFGAGVLGGAQADLLAVPAADFQVLKIPEGITTEQALLLTDNLATGWAAAQRADISFGSAVAVIGLGAVGLCALRSAFIHGAATVFAVDRVKGRLQRAATWGATPIPSPAAETILAATRGRGADSVIDAVGTDASMSDALNAVRPGGTVSVVGVHDLQPFPLPALTCLLRSITLRMTMAPVQRTWPELIPLLQSGRLDVDGIFTTTLPLDEAAKGYATARARSGEELRFCLRPDSRDVLGAHETVDLYVHVRRCQSVADLQLEGAADGVDGPSMLN

SEQ ID NO: 5611 - protein, 258 aa, Schizosaccharomyces pombe
FDFEYYQRNLLLQEKGFPTPKATSTGTTIVGVIAKDCIVLGADTRATAGPIIADKNCKKLHLISPNIWCAGAGTAADTEFVTSMISSNIELHSLYTNRKPRVVTALTMLKQHLFRYQGHIGAYLVLGGYDCKGPHLFTIAAHGSSDKLPYVALGSGSLAAISVLETKYQPDLERHEAMELVKEAIEAGIFNDLGSGSNCDLVVIDEEKATPYRGYSKPNERATKQSKYTYDRGTTAVLKEDIYKFVTVQDLDEMQVDV

SEQ ID NO: 5612 - protein, 163 aa, Enterococcus faecalis V583
MKKEYFIAASADVYGNVQLAKDSNIWFQSVLRGDSNTITIGEGSNIQDGTIIHVDEDAPTIVGKYVTVGHQCMLHGCKIGDGALIGMGSTILNNAIIGENSLIGAGSLVTEGKIIPPNVLAFGRPAKVIRPLTAAEIASNHTNALHYIQRAEEFRQQKYPKLT

SEQ ID NO: 5613 - protein, 346 aa, Saccharomyces cerevisiae
MSASKEEIAALIVNYFSSIVEKKEISEDGADSLNVAMDCISEAFGFEREAVSGILGKSEFKGQHLADILNSASRVPESNKKDDAENVEINIPEDDAETKAKAEDLKMQGNKAMANKDYELAINKYTEAIKVLPTNAIYYANRAAAHSSLKEYDQAVKDAESAISIDPSYFRGYSRLGFAKYAQGKPEEALEAYKKVLDIEGDNATEAMKRDYESAKKKVEQSLNLEKTVPEQSRDADVDASQGASAGGLPDLGSLLGGGLGGLMNNPQLMQAAQKMMSNPGAMQNIQKMMQDPSIRQMAEGFASGGGTPNLSDLMNNPALRNMAGNLFGGAGAQSTDETPDNENKQ

SEQ ID NO: 5614 - protein, 254 aa, Pseudomonas putida KT2440
MSQLRTIVITGAANGIGRAVAESFAAQAEHLLILLDRDLATLQGWVTEGEFAARIETHQANIADLASLQLLFKGLADRVGFVDVLVNSAGVCDENEPEDLDNWHKVISINLNGTFYVTSLCLPLMADGGRIVNMSSILGRAGKVRNTAYCASKHGIIGMTKALALDLAPRRITVNAILPAWIDTPMLQGELAAQARIAGITHEQILRNAKKKLPLRRFIQGDEVAAMVRYLASPQASGVTAQSLMIDGGAGLGM

SEQ ID NO: 5615 - protein, 250 aa, Brassica juncea
MTKSYPTVSEDYQKAIEKCKRKLRGLIAEKNCAPIMVRLAWHSAGTFDCASKTGGPFGTMRFDAEQGHGANSGIHIALRLLDPIREQFPTISFADFHQLAGVVAVEVTGGPEIPFHPGREDKPQPPPEGRLPDATKGCDHLRQVFTKQMGLSDKDIVALSGAHTLGRCHKDRSGFEGAWTSNPLIFDNSYFKELLTGEKEGLLQLVSDKALLDDPVFRPLVEKYAADEEAFFADYAEAHLKLSELGFADA

SEQ ID NO: 5616 - protein, 308 aa, Oryza sativa
  unsure (1)..(308): unsure at all Xaa locations
XPFNTFRLEPTNLFENEGLLSLQSDSSGLGFIDIDNDNGNPQMCASYASEIYTNLMASELIRRPRSNYMEALQRDITKGMRGILIDWLVEVSEEYKLVPDTLYLTINLIDRFLSQHYIERQKLQLLGITSMLIASKYEEICAPRVEEFCFITDNTYTKAEVLKMEGLVLNDMGFHLSVPTTKTFLXRQIFKLYFQVPSITLGYLANYLAELTLIDYSFLKFLPSVVAASAVFLARWTLDQSDIPWNHTLEHYTSYKSSDIQICVCALRELQHNTSNCPLNAIREKYRQQKFECVANLTSPELGQSLFS

SEQ ID NO: 5617 - protein, 214 aa, Paeonia parnassica
IVESVGEGVTDLKPGDHVLPVFTGECKVCRHCKSEESNMCDLLRINTDRGVMLNDGKSRFSINGQPIFHFVGTSTFSEYTVVHVGCVAKINPEAPLDKVCVLSCGISTGLGATLNVAKPKKGSSIAIFGLGAVGLAAAEGARIAGASRIIGVDLNPKRFEEAKKFGVTEFVNPKDYNKPVQEVIAEMTDGGVDRSVECTGSIMAMISAFECVHD

SEQ ID NO: 5618 - protein, 174 aa, Zea mays
MNRKPGDWDCRACQHLNFSRRDICQRCSEPRGVADRGGGGGGGDYASFGGRGGSSFGGGFGAAGSDVRPGDWYCSCGAHNFAIRSSCFKCSAYKEEAAVNSGAGGFDGDMSRSRGYGFGSGAAGAGAGAARTTNRPGWKSGDWICTRSGCNEHNFASRMECFRCNAPRDSGTEV

SEQ ID NO: 5619 - protein, 435 aa, Methanocaldococcus jannaschii
MELKNKKLSLWEAVSMAVGVMIGASIFSIFGVGAKIAGRNLPETFILSGIYALLVAYSYTKLGAKIVSNAGPIAFIHKAIGDNIITGALSILLWMSYVISIALFAKGFAGYFLPLINAPINTFNIAITEIGIVAFFTALNFFGSKAVGRAEFFIVLVKLLILGLFIFAGLITIHPSYVIPDLAPSAVSGMIFASAIFFLSYMGFGVITNASEHIENPKKNVPRAIFISILIVMFVYVGVAISAIGNLPIDELIKASENALAVAAKPFLGNLGFLLISIGALFSISSAMNATIYGGANVAYSLAKDGELPEFFERKVWFKSTEGLYITSALGVLFALLFNMEGVASITSAVFMVIYLFVILSHYILIDEVGGRKEIVIFSFIVVLGVFLLLLYYQWITNRFVFYGIIATFIGVLIFEIIYRKVTKRTFSNNMYVKS

SEQ ID NO: 5620 - protein, 470 aa, Neurospora crassa
MEVAPAYEPRSARTLEAALIEKKKEEAAAKSLVRLQLLAKTRCRPLHFQPQSIRQHSTLLPLPHPRPSSQPHIFHGYGHLPSVQNMPPQFGRPGQSQARTLASLGGPQSNSTHTPCPVGGGAGTPPPPSAGNGSGGPAQSPNTKPLLGSSTLTRPNITTAISSARTQQIARHLSSSSVATMASQYSVRKVGAPYTLEHRVYIEKDGVPVSPFHDIPLYANAEQTILNMVVEIPRWTNAKQEISKEELLNPIKQDTKKGKLRFVRNCFPHKGYLWNYGAFPQTWEDPNSIHPETKAKGDNDPLDVCEIGELVGYTGQVKQVKVLGVMALLDEEETDWKVIVIDVNDPLAPKLNDVEDVERHLPGLIRATNEWFRIYKIPDGKPENQFAFTGECKNKTYAMDVVRECNEAWERLITGKTAPGGVSTTNVTVQHSSSRVAPDQLPPLPPNENLPPAPIDSSIDKWFFISGASA

SEQ ID NO: 5621 - protein, 291 aa, Triticum aestivum
PASSDENALYNVDLVSSILEEFMVQRNGDDEALEDGESYPASLVSGGDSELALVRGVDGYLADIAKDPIRRGEKFIAIAEMAPLAARPTHDGLYRAIDMYLKEHPSLSKSEKKRLCGLMDCKKLTAEASSHAVQNERLPLRLVVQVLFFEQLRASASADAAAASDHHPSSALRSLLPRENGNSYGSSRSAATTATTEDDQWGGGGVPASGDTSSFRSMSGLGNNKSGGNGGKATAKGPLQMPRKMLSKLWSGKASSGENSGGSDTSESPGSVNLEAETKSTHSRNTRHSVS

SEQ ID NO: 5622 - protein, 453 aa, Emericella nidulans
MTSNGTNGSATAYHASSTQEAIQAENDFAAHNYHPLPVVFARAQGTSVWDPEGRHYLDFLSAYSAVNQGHCHPKLVAALVDQASRLTLSSRAFYNDVFPKFAEMVTKYFGFDMVLPMNTGAEAVETGIKIARKWGYKVKGIPENEAIILSAENNFHGRTMAAISLSSDPESRENYGPYVPNIGCTIPGTEKPITYNDKAVREAFEKAGSNLAAFLVEPIQGEAGIIVPDDDYLQLARSLCDQHNVLLICDEIQTGIARTGKLLCHEWSGIKPDMVLLGKAISGGMYPVSCVLGRKDVMLTVEPGTHGSTYGGNPLACAVAIRALEVVQEENMVERAEKLGQAFRSGLEAIQNPIIQTVRGKGLLNAIVIDESKTNGHTAWDLCMLMKEKGLLAKPTHQNIIRLAPPLVITEEEIAKALEIIKAAVAELPNLKGAAEDKVVPPPEKKVKITLEN

SEQ ID NO: 5623 - protein, 173 aa, Helicobacter pylori
MNLEKLEVSHDADSLCVVIEISKHSNIKYELDKESGALMVDRVLYGAQNYPANYGFVPNTLGSDGDPVDALVLSDVAFQAGSVVKARLVGVLNMEDESGMDEKLLALPIDKIDPTHSYVKDIDDLSKHTLDKIKHFFETYKDLEPNKWVKVKGFENKESAIKVLEKAIKAYQG

SEQ ID NO: 5624 - protein, 526 aa, Yarrowia lipolytica
MIQSVFLALAILIAYLGFAEWFSRFQHRRISKKKGCGMPPMANGGFLGWYGLYKTYQITSERTYPHSMRMGLEAFGHTFVYPVPGTDMLQTIHPDNIKAILATQFKDFSLGTRHKIMLPTLGDGIFTLDGEGWTHSRALLRPQFARDQVSHVASLERHIQVLFKTIKKENKECDPAKGFDIQELFFMLTLDTATEFLCGDSVDSLTDYLADPTAPQLDHSGIDENVRRAFPEAFNTAQWFCSIRAKLMKLYFFAGTVFYRKKYADANKIVHDFTDFYVSKALAARKEKFQELDQEGKYIFLYELAKETRNPKVLRDQMLNILLAGRDTTASLLSWVMFRMARQPETWKKLRQAVINDFGDTPDELSFESLKRCEYLRYVLNEGLRLYPSVPMNFRVATRDTTLPKGGGPDLDQPIFIPKGGIVVYSVYHTHRAEEYWGKDTEEFIPERWDPAEGYQIARGWEYLPFNGGPRICLGQQFALTEAGYVLARLAQEFETVTSCDDKPLPPKYNTHLTMSHDDGVWLKME

SEQ ID NO: 5625 - protein, 224 aa, Zea mays
TLSTQHADGQTRDRIQQICWSQRRRPPAAPQDLGPRPVAGGVGAAVGNPADVAMVRMQADGRLPLAERRNYRGVGDAIGRMARDEGVRSLWRGSSLTVNRAMIVTASQLATYDQAKEAILARRGPGADGLATHVAASFTAGIVAAAASNPVDVVKTRMMNMKVAPGAPPPYAGAVDCALKTVRSEGPMALYKGFIPTVMRQGPFTVVLFVTLEQVRKVFKGVEF

SEQ ID NO: 5626 - protein, 152 aa, Lycopersicon esculentum
MVKAVAVLNSSEGVSGTILFTQDGAAPTTVNGNISGLKPGLHGFHVHALGDTTNGCMSTGPHYNPAGKEHGAPEDEVRHAGDLGNITVGEDGTASFTITDKQIPLTGPQSIIGRAVVVHADPDDLGKGGHELSKSTGNAGGRIACGIIGLQG

SEQ ID NO: 5627 - protein, 276 aa, Sulfolobus solfataricus
MRYNLPVLVVHGGAGSWQIADQDKAKLTISEALERGYYEFRKGSAIEAVVEAIYYMEESGVFDAGKGSVRNSAGYIEMDAGIMVGNTLQVGGIMGLREGSAIKKALEILFQNRHVLMIGSNYNSSNSNNSAIYESKVSGDTVGAVALDQHGNLVAGTSTGGIKGKLPGRVGDSPIPGAGYYATSNVAVSSTGIGEIILRILPAKEVDILVSLGFTIDDALRAVVNKVTKTFGKDNIGMIGLDKYGNASAYYNTKGMARGVISSDGVKKVYVFEGDI

SEQ ID NO: 5628 - protein, 95 aa, Buchnera aphidicola
  unsure (1)..(95): unsure at all Xaa locations
ASLNDSNFGLYEPAGGSXPDIAGKNIANPIAQILSIAMLVRYTMKLPIXSDQIESAVIDTLKKGYRTLDIANDKEKCESTNDIGDIISYILKKRI

SEQ ID NO: 5629 - protein, 73 aa, Glycine max
  unsure (1)..(73): unsure at all Xaa locations
MSIDSTEAGTNFEPELKPVDRYMTCPLLLRVITKIDSHHSXNTLACDASSXKDAAHIYTCMDTNIRELTDIVI

SEQ ID NO: 5630 - protein, 358 aa, Zea mays
  unsure (1)..(358): unsure at all Xaa locations
MSCFACCGDEDTQVPDTRTQYPGHHPARADAYRPADQPPKGSQPVKMQPIAVPAIPVDELREVTKGFGDEALIGEGSFGRVYLGVLRNGRSAXRVKKLDSNKQPDQEFLXAQVSMVSRLKHENVVELLGYCADGTLRVLAYEFATMGSLHDMLHGRKGVKGAQPGPVLSWLQRVKIAVGAAKGLEYLHEKAQPHIMHRDIKSSNVLLFDDDVAKIADFDLSNQAPDMAARLHSTRVLGTFGYHAPEYAMTGQLSSKSDVYSFGVVLLELLTGRKPVDHTLPRGQQSLVTWATPRLSEDKVRQCVDSRLGGDYPPKAVAKFAAVAALCVQYEADFRPNMSIVVKALQPLLNAHARATNP

SEQ ID NO: 5631 - protein, 641 aa, Prochlorococcus marinus subsp. pastoris str. CCMP1378
MKELAYWPAAKSLSKNEKFTSTRKDINNLDHVDQIWEYLKLRCGNTIAINDLRGKNKEKISYSELADLITKVSNSFKNYGLVKGDVVTLISENSPRWLIADQGLMRLGAINAVRGINSPSVELEYIIEHSNSVGLIVQSKEVWLKLNKKNELKKRFKFIINLEDEQFEDLINWPEFIKAGEENLLKNNSFEKYNHQINDIASILYTSGTTGKPKGVPLTHANFLHQIINLANIADPEPGTSVLSVLPIWHSYERSAEYFFFSCGCTQFYTNPKFLKDDIKQVKPVVMATVPRLWEAIHDGFFLALKKMPPKKQKIIKILIKNSSIFKRNLRKIRNLEINQVSSLAKISLTISVIGRFFIHKISSTFLWPSILKQLCGEKLKFPINGGGALPEHVDLFFESLGIDVLVGYGLTETSPVLTCRRRELNVRGSSGQPLAFTEIKIMNEEKDKILKFKEIGKILVKGPQVMKGYLNNISATKDVLSKDGWFDTGDLGFLIPNGSLVITGRAKDTIVLSSGENIEPNPLETEILSSEFINQVQLVGQDKKCLTALVAPNIELVENKFFENDISKLNSNKKIGLFFKSQINNLLKNRLGARFEEQILECYFVDAFTLENGLLTQTLKQKRREIVDLYSTHIEEMYKK

SEQ ID NO: 5632 - protein, 263 aa, Zea mays
MAATSLARLSRRTTISATAAAPSLRRLLSVTSTASVAATAPPPPPPSATGAAAVGADRVRWDYRGQRKLVPLGQWMPKVAVDAYVAPEAVLAGQVTVHDGASVWSGAVLRGDLNKITLGFCANVQERCVLHAAWTAPTGLPAETLVDRYVTVGAYCLLRSCTIEPECIIGQHSVLMEGSLVETNSILEAGSVLPPGRRIPTGELWAGSPARFVRKLTNEEIMEIPKLATAINDLMQSHFSEFLPYSNAYLEVEKLKKSFSIPL

SEQ ID NO: 5633 - protein, 118 aa, Glycine max
  unsure (1)..(118): unsure at all Xaa locations
RGHEYMLNEAXNPHLFEIRKHKXYSHDKVTHMLAYYDLDGFIYHAPQLCNVSLRQXEGTLYYIQKACTTLASKLEKIGYAGPADSENKTAXDGIKNANETIDIKEVKRGEHILTSLQR

SEQ ID NO: 5634 - protein, 520 aa, Agrobacterium tumefaciens str. C58 (Cereon)
MPSTRRNSPERPFHSAAGNNQALAARARVMASWNISNPNMSASAIWLPERISPMTIDIKNIAEMDRNAVLHPFTQLKDFASGKLGEPTIVETGKGIRIQDAHGKQLIDGFAGLYCVNVGYGRTEVAEAISRQAYRLAYYHSYAAHTTDELAILSDRLVRMAPGKMSKVFYGMSGSDANETQAKLVWYYNNLRGKPQKKKIISRERGYHGCSVVAGSMTGMSFYHDHMDLPRVGILHTGVPHHYWGAEAGETELEFSKRRAAELEALILREGPDTIGAFIAEPVLGTGGITPPPEGYWPAIQEVLKKYDVLLIADEVITGFGRTGSMFGSQHYGIEPDLITVAKGLTSAYFPLSGAIVGEKVYTVMEDGADRVGAFSHGYTYSGHPIGAAAANAVLDIVEKEDLPGNAQAVGSYFQEQLKAKFAQLPIVGEVRGVGLMGAIEFVADREKKTRFAPHLTVGARVSKAARNGGLIARAMPHGDILGFAPPLVTTKAEVDEIIAIAEAAVRTVMDDLVQAGEKI

SEQ ID NO: 5635 - protein, 200 aa, Triticum aestivum
  unsure (1)..(200): unsure at all Xaa locations
VMFIYVIVPLCYWRFNTFDARRFPIFSNQLFTSTGQKYDTTKVLTADFDLNVAAYDSYGKLYLSPLFAISIGSGFLRFSATIVHVLLFHGADMWRQSRRAIGAAAKLDVHARLMQRYKQVPQWWFLXVLLAGSIAVSLLMCFLWKEQVQLPWWGMLFAFAXLAFVVTLPIGVIQATTNQQPGYDIIAHRMLAXAQIRRLN

SEQ ID NO: 5636 - protein, 80 aa, Zea mays
  unsure (1)..(80): unsure at all Xaa locations
LPCVRLFEVRDDVKLPSYKGENINDKMFDEKNHILDPXGCFRXYAQSATTLNLLCVFSTGGYTDIQRVTQWKLDVTEHSK

SEQ ID NO: 5637 - protein, 154 aa, Glomerella cingulata
MVKAVCVVRGDSKVTGSIVFEQESESAPTKITWDISGNDANAKRGMHIHTFGDNTNGCTSAGPHFNPHNKTHGAPEDSNRHVGDLGNIETDANGNSKGTVTDSHVKLIGPESVIGRTIVVHGGTDDLGKGDNEESLKTGNAGPRPACGVIGISN

SEQ ID NO: 5638 - protein, 221 aa, Oryza sativa (japonica cultivar-group)
MAEEKGKAVMPMEVDQVEDEREAETVVEAVQKAVYDALEKVEMMEEEGEAAVAEAADKLLEEAVEKAVTEALEEAGWDAAEKALSDDLEKVSLEAESARMITLESSDGEVVKVKEASARLSKTIGNIIDDGRGDEAIPLPDVSYKTLKKVVEYCDKHADEKSDTDEQKEELKNWDKAFIDELAEDDDSLVKVIMASNYLKIDGLHNLASQCKTTREQIGKA

SEQ ID NO: 5639 - protein, 230 aa, Zea mays
MKKIFGAKKDKGPPPSIQDATERINKRGETVDEKIKKLDEELARYKEQIRKTRPGPSQEAIKARAIRLLKHKRMYEEQRNMLYNQTYNLDQVGFAADGLKDAQQTMNAMKAANKELKGMMKTVKIDEIDNMQDEMTDLMDVSNEIQETLGRSYNIPDDVDEEELMGELDALESDMEFDSAAVPSYLQPDSDFDADLNLPAAPSRPAMVPAGGLQEDELGLPAVPRASLRS

SEQ ID NO: 5640 - protein, 142 aa, Oscillatoria sp. PCC 7821
IYRFNEGGDGNIIAEIKQPEQKAFLGLRYPDSDIPKQAKHLYTLNWLRLIPDMDYQPCQLVTSPTANPEVEIQPLDMSYCGLRSISPLHIEYLKNMEVAASLTISLIQQQKLWGLIACHHNSPKFIPYEVRTVCEFLGQLMS

SEQ ID NO: 5641 - protein, 117 aa, Triticum aestivum
  unsure (1)..(117): unsure at all Xaa locations
LVTQVSRGHYRGASGXPGSGRGVXLVAEDLRKKAEGVVGKARSLXAANSVEAVVDVVDGEPKHVLCDAVEKHHADLLVVGSQGYGAIRRALLGSVSDYCAHHADCSVVIVKQPGSKN

SEQ ID NO: 5642 - protein, 854 aa, Cellvibrio gilvus
MHRKNHAAAAARTALVAAIAAAFPLFTPGAFAAPEPAEPAQKPWLDASLDADQRARLAVQAMTQQEKLRWVFGYFGHDFGKSKKHPDALPQSAGYIPGTPRLGLPALFETDAGQGVASQSGANVRERTALPSGLSTASTWDPKVAYAGGAMIGSEARASGFNVMLAGGVNLQREPRNGRNFEYAGEDPLLAGTMIGQAIKGVESNRIISTLKHFVLNDQETGRNELDARIDKAALRMSDLLAMELALEQSDAGSVMCAYNRLNGPYTCEHPWLLSEVLKRDWGFRGYVMSDWGATHSTVAAANSGLDQQSGQEFDKSPYFGGALEEAVKTGAVPQKRLDDMVTRIVRTMFGKGVVDNPLKPGVAIDFAANGGQPPDGEEGMVLLKNEGRLLPLAKTVRTIAVIGGHADAGVLSGGGSSQVYPVGGIAVKGLLPATWPGPVVYYPSSPLRAIQAQAPNAKVVFDDGRDPARAARGRWGRRRPGLRQPVDRRGQRRPDARAAGRPGRADHVGGGRQRAHRGRAADRRTGHHALAGARSGRAGSLVSGHQRRRGDRECAVWRGQSVRPPAGHLPAIRAATAAPETRWRSEEPRAAVRRRLPRRCGGRLQVVRPEGPQAAVPVRARPVLHNLRVLRSVRPAQGWPPARALQGDQHRQRGRQGRAAGVRRADVHQMGGAEAPGRLEQGRPAAGRDQGSRGRGGAARAGHVRREVAHLAPSERQDPLDAGRRRLRRQRHQRDRRAACQHAGRTRPRTLTPGETHATTHPLGRLAGASGARPGRGSATPATGQPVPGPHGAATPGGRRVGSPVARELITVSGFGGSGRPAPTRPDASLSPCRACPRDGPIPSRSRAAAASR

SEQ ID NO: 5643 - protein, 131 aa, Oryza sativa
MALEWVVLGYAAGAEAIMLLLLTLPGLDGLRRGMISVVRSALKPMMSVVPFCLFLLMDIYWKYETRPTCDDDHCTPSEHLRHQKSIMKSQRNALLIAAALLLYWILFSITSLVVRLDQLQQRVDKLKKRDD

SEQ ID NO: 5644 - protein, 256 aa, SYNECHOCOCCUS SP. WH 8102
MQGPVQDLCLRHCNTASMIWIQALLLNTVLIAVAQRAPLLTLAGWVHAGALGTILWGCLGWRGWVAVVAYLVLGSLVTRLGLREKQERGLAEARGGRRGPENVWGSAATGACLALLIGAGVEPGPLLLVGFSASFSAKLADTFGSEIGKRWGRRPVLITTLRSVPPGTEGAISLAGTLASAAGSVLMTLVMWQLQLLPSISVSLVVMLIGLLATLAESLLGALAQDRFRWLSNELVNALQTLLAAVMAMLWLGGRI

SEQ ID NO: 5645 - protein, 379 aa, Neurospora crassa
MASPQQIRTPITDLFKINHPIFLAGMNVAAGPKLAAAVTNAGGLGVLGGINYTPDMLRDQIDELKSHLKDKNAPFGVDLLLPQVGGNARKTNYDYTKGKLNELIDIIIQSGAKLFVSAVGVPPKHVVDKLHAHGIVYMNMIGHPKHVKKCLDLGVDIICAQGGEGGGHTGDIATTILIPAVVEACKGAISPLTKKEVLVVAAGGIHSGPLLASALMMGASAVWVGTRFVLCEEAGASEAHKEAVRTASFSDTIRTLIFTGRPLRVRKNPYIENWETERAQEIKELTSKGKLPYEADLDKLMSGAADIPQAMKDAYKADNGSEEVDVDDLLDHFQPFLMGQCAAVCNEKKNAKQIVDEFINDAVAVIRKGNSFITVPSKL

SEQ ID NO: 5646 - protein, 538 aa, Oryza sativa (japonica cultivar-group)
MATGPDLTPPAAAASAEAPSASAAKKDRHIVSWSTEEDDVLRTQIALHGTDNWTIIAAQFKDKTARQCRRRWYNYLNSECKKGGWSREEDLLLCEAQKVLGNKWTEIAKVVSGRTDNAVKNRFSTLCKRRAKDDELFKENGSLCSSTSSKRALVQTGCLTSGASGSAPPIKQMRPCNSDFKENMTPNMRLVGQDKSTQDSRQPLAIVYQNNQDNMNTMDTQNLVAKTAAKQLFAGEQNCVKHEGNFLNKDDPKIATLLQRADLLCSLATKINTENTSQSMDEAWQQLQHHLDKKDDNDMSESSMSGMASLLEDLDDLIVDPYENEEEEDQDLREQTEQIDVENKQNSSQTSMEVTSQMVPDNKMEDCPNDKSTEDNNMEPCPGEDIPTSENLTEAAIEDSLLQCVEYSSPVHTVIQAKTDAEIAASENLSEVLEHNRLQCIQLASPAQTTTPVEANAETPASEKLREVVKCNNPSCIEFTSPAHTVPTFLPYADDMPTPKFTASERNFLLSVLELTSPGSRPDTSQQPSCKRALLNSL

SEQ ID NO: 5647 - protein, 199 aa, Leavenworthia crassa
SVGEGVTDLQPGDHVLPIFTGECGECPHCHSEESNMCELLRINTERGGMILDGESRFSINGKPIHHFLGTSTFSEYTVVHSGQVVKINPKAPLDKVCIVSCGLTTGLGATLNVAKPKKGQSVAVFGLGAVGLGAAEGARIAGASRIIGVDLSSKGFEEAKKFGVTEFVNPKEHNKPVQQVIAEMTNGGVDRSVECTGSV

SEQ ID NO: 5648 - protein, 233 aa, Aeropyrum pernix
MVASIEKIIEEGVFVATGEGLSLRALDTSHVAMVDLYYPNTAFIEYDIGGESVEFGVSFDLLSKVLRRARKEDELVLEVEGSRLAVKLKSRGERTFRIPQVVMTYEKLPEPKVSFTVRARMLGSTFREAVRDLEPHSETLTLRALEDALLLVGSSEMATVEIELSQSRGSLLDYEAESQDRASYSIEYFSEMLSAAQAADAVVVSFSEDAPVRVDMEYLGGGRLTFYVSPKIE

SEQ ID NO: 5649 - protein, 144 aa, Glycine max
MEDASASKFIPHQIGGVQNDALRFGLHGVKSDIVGSHPLQSSLQSTRRMDEAMKRQCKVNLYGTAFPMKEELDRQILSRFQRPPGPIPSSMLGLETVTGSVDHFGFEDCLNDPRESETFRPLDMHHGMEVRLGLSKGPVYPSII

SEQ ID NO: 5650 - protein, 336 aa, Halobacterium sp. NRC-1
MPPTDDQPLGFVQLGDTGLQTSALQFGTWRFGKRTESGDLEISEQRAHDLLDTYADAGGRYIDTADVYGGGDSERWIGDWLSDRDRDRYTIASKIYWQVRDGDPNSRGTNRKTIRNRITALLDRLGTEYLDVLYIHRWDGDTTARELMRTLNDLVADGLVHYLGASTLQPNAWRIARANELARAEGWEPFSVLQPRYNLVDREIEGDYLTFAREQGLAVCPWSPLAQGFLTGKYSRDDGLTGESKASDSSRWADTYLTDANFDAHDVLDAVADEVEASPPQVALAWLLHRDGITAPIVGARTPDQLSENIDAATIDLTDDQMARLTDAAAGPYADL

SEQ ID NO: 5651 - protein, 233 aa, Streptococcus pneumoniae TIGR4
MTKTILVTGGTSYIGSHTVKALLNAGYQVHVLDNLSTGNRAAVDSRASFKELDVYDASALKAYLEENQIDAVLHCAGEIVVSESIENPSKYFTANVAGMNQVLKVLSEVGIQKIMFSSTASLYGNNCIDKPVTEDTLLDPVNPYAETKLMGERMIYWMANRYDWKYVIFRYFNVAGAEMDASNGLRVKNPTHIIPNINKTALGQNDSLKIFGDDYDTRDGSCIRDYIYVLDLA

SEQ ID NO: 5652 - protein, 294 aa, Staphylococcus aureus subsp. aureus Mu50
MVIQWYPGHMAKAKREVSEQLKKVDVVFELVDARIPYSSRNPMIDEVINQKPRVVILNKKDMSNLNEMSKWEQFFIDKGYYPVSVDAKHGKNLKKVEAAAIKATAEKFEREKAKGLKPRAIRAMIVGIPNVGKSTLINKLAKRSIAQTGNKPGVTKQQQWIKVSNALQLLDTPGILWPKFEDEEVGKKLSLTGAIKDSIVHLDEVAIYGLNFLIQNDLARLKSHYNIEVPEDAEIIAWFDAIGKKRGLIRRGNEIDYEAVIELIIYDIRNAKIGNYCFDIFKDMTEELANDANN

SEQ ID NO: 5653 - protein, 203 aa, Sinorhizobium meliloti
MTRSVFRFLSRQPETVEIASQHYLLRLPRYADYRQWYRLRSESRAFLEPWEPTWRADEMTEGAFRSRVNRNEQEFASGQAVPLFLFHKPDETLLGGLTIGHIRRGAAQNCMIGYWMGQKHAGQGHMYEALKLTIPYIFKGLELHRIEAACIPENARSIRLLEKAGFEREGYLRQYLKINGQWRDHLMFSLLSVDAVPNRNLPL

SEQ ID NO: 5654 - protein, 206 aa, Triticum aestivum
LEESAGFWLSRRLQNNQGIDVGATVHEIRRQARQKQTRARDRARYGSWQQQCAPPAATDRKKRTSEERRESTVKKSKQEASTASPPKQPVPKVKLGEKITALQQIVSPFGKTDTASVLFETIKYIKFLHEQVQLLSEPYTNASRSKGNCNNLLPWGDRAEASKGEGEHDLRERGLCLVPVSWTPEVYRDGNAMDYWTPAYRGCLYR

SEQ ID NO: 5655 - protein, 439 aa, Triticum aestivum
MAGWYEEAAGLLLRRSALAEMAVDVLLCAVPIWAAVMIGLFIGWAWRPRWTGLIFLGFRSRLRLLYVPPGLGARRLWLACTALSAFSVAPQLLSSAFRRHGKYQRKDPSNDDTDACGDSGACANGRSIFEVKHGIVTEKDLDHLVQLLDNKESGHTTWQHLMERTTSNMTYKAWRHEPEVGPIMHCSQTIFEDATPELVRDFFWDDDFRLKWDPMLVCFKILDEFPLNGTTIIHWIKKFPFFCSDREYIFGRRIWESGKAYYCVTKGIPYPSLPKKEKPRRVELYFSSWRIRPVQSPKKDGQQHMACEVTLFHYEDMGIPKDVAKVGVRHGMWGAVKKLQSGFRAYQLMRKSENILSRSAIMARVTTKTCIAGSDGSLDQGPFSTEQASTEDDNSRAVQHGFDWKWVVVGGAVAAVCVLNTGIVGKALLLGAARRQAKK

SEQ ID NO: 5656 - protein, 173 aa, Helicobacter pylori
MNLDQLEVSHDADSLCVVIEISKHSNIKYELDKESGALMVDRVLYGAQNYPANYGFVPNTLGSDGDPVDVLVLSDVAFQAGSVVKARLVGVLNMEDESGMDEKLLALPIDKIDPTHSYVKDIDDLSKHTLDKIKHFFETYKDLEPNKWVKVKGFENKESAIKVLEKAIKAYQG

SEQ ID NO: 5657 - protein, 1070 aa, Bacillus anthracis str. Ames
MLVAATLSLPFAVYATPILAATAATENMAVQSPKKHVFDAVIKAYKDNSDEESYATVYIKDPKLTIENGKRIITATLKDSDFFDYLKVEDSKEPGVFHDVKVLSEDKRKHGTKVIQFEVGELGKRYNMQMHILIPTLGYDKEFKIQFEVNMRTFVESDIEEDEEEQIEDTQNIIRDKRLQQAINKNVLNRKDVNEPIFEEDLKEIKELNIYAGQGIESLKGLEYMENLERITIQGSDVRNIAPISQLKRLKVVDLSFNKIENVEPLVNLEKLDILELQNNRIADVTPLSQLKKVRTINLSGNKISDIKPLYNVSSLRKLYVSNNKITDFTGIEQLNKLGTLGVGSNGLVNIEPISQMSGIVELNLEKNDIKDITSLSKLTGLQSLNLEENYVSDVSSLSNLINLYELKLATNEIRDIRPIQELGKRIKIDAQRQKVFLDEAYMNEEVKIPVYDVNGTALQNIEWKSEGGSITNGVIKWNSLGEKMYEFKMDAGESKIRFQGRVIQNIVEKREESSNVIQDMKLRQYMNKHNFERKNVNTPITKEDLLTVKALKITDGKKEGITDFSGLEFMTNVEELTLQNVNMKNAEFISSLRNLKSVDLSYNQIEDIKPLHSLEDLEKLNVSDNGIKNVPELFKMQKLKTLDLSNNKLDNAALDGIHQLENLDALLVNNNEINNLDEISKVSKLNKLEMMSNKVRDISPLASLKNLQWLNLSDNKIQDISTLSSMLDLLSLKLAGNEIRDVRPVIQLAQWITVDIKNQKIVLEDGQMNQEIQIPIYDLEGEIFEDIELKSTDGIVTDRGTVVWKTPGAKIYSFSLNGNYHGLSLLFSGTVTQNIVAKEEPKEPVEEVEGSKEEPIKEAEGSKEEPKEPAKEVEGSKEEPKEPAKEVEGSKEEVKEPAKEVEGPKEEVKEPTKEVEGPKEEVKEPTKEVEGPKEEVKEPMKEVEGSKEEVKGPTKEAEGSKEEVKEPTTEVEGSKEVKEPGKEVEGSKDAINQSAVAQETNVNNQVGKEKVVENQNMKENKPAVTKQEESKKSLGATGGQENTSTLLSGLALVLSALSMFVFRKRLFKK

SEQ ID NO: 5658 - protein, 152 aa, Glycine max
  unsure (1)..(152): unsure at all Xaa locations
YLTHTHSLSHTHTKFPLQTWRQFSLLRSSFLRLFPNQLSSSYSRIHKAPQLFRARSSLLQDKEEKVIVQDSFPSKTSTXTPLVNELGGNWVNTSAFEKRIIKVEQSVNIFLTDSVIKILDTLYHDRHYARFXVLETXARVPYFAFMSVLHMY

SEQ ID NO: 5659 - protein, 700 aa, Hypocrea jecorina
MILGCESTGVISAVKHFVANDQEHERRAVDCLITQRALREVYLRPFQIVARDARPGALMTSYNKVNGKHVADSAEFLQGILRTEWNWDPLIVSDWYGTYTTIDAIKAGLDLEMPGVSRYRGKYIESALQARLLKQSTIDERARRVLRFAQKASHLKVSEVEQGRDFPEDRVLNRQICGSSIVLLKNENSILPLPKSVKKVALVGSHVRLPAISGGGSASLVPYYAISLYDAVSEVLAGATITHEVGAYAHQMLPVIDAMISNAVIHFYNDPIDVKDRKLLGSENVSSTSFQLMDYNNIPTLNKAMFWGTLVGEFIPTATGIWEFGLSVFGTADLYIDNELVIENTTHQTRGTAFFGKGTTEKVATRRMVAGSTYKLRLEFGSANTTKMETTGVVNFGGGAVHLGACLKVDPQEMIARAVKAAADADYTIICTGLSGEWESEGFDRPHMDLPPGVDTMISQVLDAAPNAVVVNQSGTPVTMSWAHKAKAIVQAWYGGNETGHGISDVLFGNVNPSGKLSLSWPVDVKHNPAYLNYASVGGRVLYGEDVYVGYKFYDKTEREVLFPFGHGLSYATFKLPDSTVRTVPETFHPDQPTVAIVKIKNTSSVPGAQVLQLYISAPNSPTHRPVKELHGFEKVYLEAGEEKEVQIPIDQYATSFWDEIESMWKSERGIYDVLVGFSSQEISGKGKLIVPETRFWMGL

SEQ ID NO: 5660 - protein, 337 aa, Pelobacter carbinolicus
MARKIMFKDALNEAMRLEMERDESVVLIGLDVAGGAGTVTLDKERDSWGGVLGVSKGLYPLFPDRIIDTPISESAYIGAAVGASACGLRAIGELMFSDFMGVCFDQLYNQAAKFRYMFGGKAVTPVTIRTMIGAGFSAAAQHSQSPYSMFAHVPGLKCIIPSNPYDAKGLLAASIADDDPCVFFEHKALYTMKGEVPEEHYTIPLGKANVVQEGKDVTIVALARMVQFAEKAAKKLAKDGIECTIIDPRTISPMDWDAIYSSVEKTGRLVVVDESYDLCGVASDICGTCSQNVFGALKAAPQMVTAPFVPTPFAANLEAAYLPDAKKIEAAVRKTME

SEQ ID NO: 5661 - protein, 327 aa, Cyanidium caldarium
MSMMFLYEALRAAIDEEMGKDSNVFIVGEDVGHYGGSYKVTKDLHVKYGDLRVLDAPIAENSFTGMAIGAAMTGLRPIVEGMNMGFMLLAFNQISNNLSMLQYTSGGNFNIPVVIRGPGGIGKQLAAEHSQRLESCFQSIPGLQIVACSTAYNAKGLLKSAIIEKKPILFLEHVLLYNLKGFVPDEEYYLPLDKAEVVRSGSDVTIVTYSRMRYHVLAAVEKLVLNGQDPEIIDLISLKPLDLHTISKSIKKTHKIVIVEECAQTGGIAAELISLINTYLYDELDSPAVRLSSKDVPIPYNGNLEKSTLIQPDQIVDVVTNLLQYKT

SEQ ID NO: 5662 - protein, 131 aa, Triticum aestivum
  unsure (1)..(131): unsure at all Xaa locations
TGYILLFALGKXHSHAHNHPXEEAVAGLVLVPALSPCATTLPVFLAVGNSSSMMILGIIVLLFSTITVMTSLVALSFYGASQIKFHWVERYDKVLVGSVLCLVGVLTYVFHPHDGEEHSLHAQVHRKLVGP

SEQ ID NO: 5663 - protein, 741 aa, Listeria monocytogenes
MKTVLGKTNVTDTVSQTDLDQVTTLQADRLGIKSIDGLEYLNNLTQINFSNNQLTDITPLKDLTKLVDILMNNNQIADITPLANLSNLTGLTLFNNQITDIDPLKNLTNLNRLELSSNTISDISALSGLTNLQQLSFGNQVTDLKPLANLTTLERLDISSNKVSDISVLAKLTNLESLIATNNQISDITPLGILTNLDELSLNGNQLKDIGTLASLTNLTDLDLANNQISNLAPLSGLTKLTELKLGANQISNISPLAGLTALTNLELNENQLEDISPISNLKNLTYLTLYFNNISDISPVSSLTKLQRLFFYNNKVSDVSSLANLTNINWLSAGHNQISDLTPLANLTRITQLGLNDQEWTNPPVKYKVNVSIPNTVKNVTGALIAPATISDGGSYAEPDITWNLPSYTNEVSYTFNQSVTIGKGTTTFSGTVTQPLKAIFNAKFHVDGKETTKEVEAGNLLTEPAKPVKEGYTFVGWFDAQTGGTKWNFSTDKMPTNDIDLYAQFSINSYTATFDNDGVTTSQTVDYQGLLQEPTAPTKEGYTFKGWYDAKTGGDKWDFATSKMPAKNITLYAQYSANSFTATFDVDGKTTTQAVDYQGLLKEPKTPTKAGYTFKGWYDEKTDGKKWDFATDKMPANDITLYAQFTKNPVAPPTTGGNTPPTTNNGGNTTPPSANIPGSNTSTGNSASTTSTMNAYDPYNSKEASLPTTGDSDNALYLLIGLFAVGTAVALTKKARASK

SEQ ID NO: 5664 - protein, 252 aa, Triticum aestivum
  unsure (1)..(252): unsure at all Xaa locations
HCLRPAAEIFPRNQGLEVLDXNTFSSGKGNVGMLKFPREANSILLDSAFPLGAPDTYSAQQASVEGPGSNGMVINGLPISIYAQETVGCAVVDFNGFTAAATSTGGFMNKMTGSIGDSPFIGAGTYVXGNAMCSXTGEGEAIIRSTLAREVTSVMESKVFPLQEAVEYNVTERLVEGFAGFITVSGTGEKACGLICTGMFRECVPEGGFMEVAFWYSIGRAHQEMCLHVVRIQMLGQSCAGHHGFPVRILVW

SEQ ID NO: 5665 - protein, 392 aa, Aristolochia grandiflora
DLEPVNLADAQVSASGALKSYKLAAKAISRLQSLPSGNIVLLCDVLVREVRDLTGYDRVMAYKFHEDEHGEVIAECKRPDLEPYLGLHYPATDIPQASRFLFMKNKVRMIYDCSATPVSVIQDKGLAQPLCLGGSTLRAPHGCHSQYMANMGSIASLVMSVTINEDDDEKGSGQRGRKLWGLVVCHHCSPRFIPFPFRYACDFLMQVFGIQINKEVELAAQVREKHILRTQTLLCDMLLRDAPMGIVNKSPNVMDLVKCDGAALYYQNKFWLLGTTPTEAQIRDLAQWLLQYHNNTTGLSTDSLVEAGYPGAQDLGDAVCGMAAVKITSRDFLFWFRSHAGKEIKWGGAKHDPKEHDGDGKKLHPRSSFNAFLEVVKWRSTPWEDVEMDAIQ

SEQ ID NO: 5666 - protein, 376 aa, Ischaemum afrum
  unsure (1)..(376): unsure at all Xaa locations
ALSIAGAVQSQKLAVRAISRLQALPGGDVKLLCDTVVEHVRELTGYDRVMVYRFHEDEHGEVVAESRRDSLEPYLGLHYPATDIPQASRFLFRQNRVRMIADCHATPVRVVQDPGLSQPLCLVGSTLRAPHGCHAQYMANMGSIASLVMAVIISSGGDDEQTGRGGISSAMKLWGLVVCHHTSPRCIPFPLRYACEFLMQAFGLQLNMELQLAHQLSEKHILRTQTLLCDMLLRDSPTGIVTQSPSIMDLVKCDGAALYYXGKYYPLGVTPTESQIKDIIEWLTVCHGDSTGLSTDSLADAGYLGAAALGDAVCGMAVAYITPSDYLFWFRSHTAKEIKWGGAKHHPEDKDDGQRMHPRSSFKAFLEVVKSRSLPW

SEQ ID NO: 5667 - protein, 156 aa, Zea mays
  unsure (1)..(156): unsure at all Xaa locations
MAASDVEYRCFVGGLAWATDDHSLHNAFSTYGEVLESKIILDRXETQRSRGFGFVTFSTEEAMRNAIEGMNGKELDGRNITVNEAQSRGGRGGGGGGYGGGRGGGGYGGGGRRDGGGGYCGGGGYGGGGGYGGGGGGYGGGNRGGGYGNSDGNWRN

SEQ ID NO: 5668 - protein, 197 aa, Proteus sp. LE138
MSIYAFEGVIPVVHPTAYIHPSAVLIGDVIIGAGVYIGPLASLRGDYGRLIVEAGANLQDGCVMHGYTDMDTIVQENGHIGHGAILHSCIIGRDSLVGMNSVIMDGAIIGEESIVAAMSFVKAGFQGQARQMLMGSPAKHVRDISDQDMQWKRMNTREYQDLTVRCRQGLVETTPLTAPEANRPRLRGTTEVKPKGQ

SEQ ID NO: 5669 - protein, 132 aa, Zea mays; identical to SEQ ID NO: 5380

SEQ ID NO: 5670 - protein, 370 aa, Lolium perenne
MAPTAAEQTEHHQHTRKAVGLAARDDAGHLSPLAITRRSTGDDDVVIKILYCGICHSDLHALKNDWKNSRYPMIPGHEIAGEVTEVGKNVSKFKAGDRVGVGCMVNSCRSCESCDKGFENHCPGMILTYNSVDVDGTVTYGGYSSMVVVHERFVVRFPDAMPLDKGAPLLCAGITVYSPMKYHGLNVPGLHLGVLGLGGLGHVAVKFGKAFGMKVTVISSSPGKKEEALGRLGADAFIVSKDADEMKAVMSTMDGIINTVSANIPLTPLFGLLKPNGKMIMVGLPEKPIEIPPFALVATNKTLAGSIIGGMSDTQEMLDLAAKHGVTADIEVVGAEYVNTALERLAKNDVRYRFVIDIGNTLDNVAATTE

SEQ ID NO: 5671 - protein, 327 aa, Mycoplasma pneumoniae
MSKTIQANNIEALGNAMDLALERDPNVVLYGQDAGFEGGVFRATKGLQKKYGEERVWDCPIAEAAMAGIGVGAAIGGLKPIVEIQFSGFSFPAMFQIFTHAARIRNRSRGVYTCPIIVRMPMGGGIKALEHHSETLEAIYGQIAGLKTVMPSNPYDTKGLFLAAVESPDPVVFFEPKKLYRAFRQEIPADYYTVPIGQANLISQGNNLTIVSYGPTMFDLINMVYGGELKDKGIELIDLRTISPWDKETVFNSVKKTGRLLVVTEAAKTFTTSGEIIASVTEELFSYLKAAPQRVTGWDIVVPLARGEHYQFNLNARILEAVNQLLK

SEQ ID NO: 5672 - protein, 282 aa, Zea mays
MMESQPLQAPTATAPAPGSAEPAGAPPAVTPGKEFTRTCKGLVVVLIGGYVLLQLLPSSLNYLAIIPSKTIPYVWTVFTAGYIEQVLPGAIGSSLGLLFCGKDIEPAWGRKEFLKFIILINSICGILAFCFAIGLYYVTGKESFLVTPLSGFHGCLAGFLVALKQLLPNLELPMCFFWKIKAKWMPFFVVCFSSIMAFIVPDSINFLPTLVSGMYVSWLYLRYFQRNPLTGLKGDPSDDFSFPSLFPAAMRERGERVLEERLAADNAGDTEASPRGHGTAED

SEQ ID NO: 5673 - protein, 143 aa, Triticum aestivum; identical to SEQ ID NO: 5481

SEQ ID NO: 5674 - protein, 208 aa, Magnolia praecocissima
NRQVTFCKRRNGLLKKAYELSVLCDAEVALIVFSSRGRLYEYANNSVRNTIDRYKKACADSSSLGCVSEANSQYYQQESSKLRQQIALLQNANRHLMGEALSSMTVKELKQLENRLEKGISRIRSKKNELLFAEIEYMQKREVDLQNDNMYLRAKITENERAQQQMGMLPAPEYDVMPGFDSRNFLQVNLMDSSHHYSHQEQTALQLG

SEQ ID NO: 5675 - protein, 792 aa, Streptococcus pyogenes M1 GAS
MKTKKVIILVGLLLSSQLTLIACQSRGNGTYPIKTKQSRKGMTSNKIKPIKKSKKTNKTHKGVAGVDFPTDDGFILTKDSKILSKTDQGIVVDHDGHSHFIFYADLKGSPFEYLIPKGASLAKPAVAQRAASQGTSKVADPHHHYEFNPADIVAEDALGYTVRHDDHFHYILKSSLSGQTQAQAKQVATRLPQTSSLVSTATANGIPGLHFPTSDGFQFNGQGIVGVTKDSILVDHDGHLHPISFADLRQGGWAHVADQYDPAKKAEKPAETHQTPELSEREKEYQEKLAYLAEKLGIDPSTIKRVETQDGKLGLEYPHHDHAHVLMLSDIEIGKDIPDPHAIEHARELEKHKVGMDTLRALGFDEEVILDIVRTHDAPTPFPSNEKDPNMMKEWLATVIKLDLGSRKDPLQRKGLSLLPNLETLGIGFTPIKDISPVLQFKKLKQLLMTKTGVTDYRFLDNMPQLEGIDISQNNLKDISFLSKYKNLTLVAAADNGIEDIRPLGQLPNLKFLVLSNNKISDLSPLASLHQLQELHIDNNQITDLSPVSHKESLTVVDLSRNADVDLATLQAPKLETLMVNDTKVSHLDFLKNNPNLSSLSINRAQLQSLEGIEASSVIVRVEAEGNQIKSLVLKDKQGSLTFLDVTGNQLTSLEGVNNFTALDILSVSKNQLTNVNLSKPNKTVTNIDISHNNISLADLKLNEQHIPEAIAKNFPAVYEGSMVGNGTAEEKAAMATKAKESAQEASESHDYNHNHTYEDEEGHAHEHRDKDDHDHEHEDENEAKDEQNHAD

SEQ ID NO: 5676 - protein, 312 aa, Rhodobacter sphaeroides
MAPSKPPAVHEWQPQAPCRSRVASGTLLPPAVRASRMAAPEASFRAPEPAMPHIEIGDLRLNYLDEGRATGAPVVFAHALGSDLRIWDNLIPLLPQDLRLVRYDLRGHGRSTTPEPPYAMGALIRDAERLMEALSIREAVFVGCSIGGMIAQGLAVKRLDLVRGLVLCDTAAKIGTPEIWQDRIDQVRSYGLESLADPTMKRWFAPAFRQGPEGQLWRERFIEGDPDGYAGGAAAIAGTDFYTTTARLTLPTLALVGSEDGSTPPDLVRETAELIRGSRFEIVRGAGHVPSVDKPAEVAALVTEFLRSIGHV

SEQ ID NO: 5677 - protein, 188 aa, Vibrio vulnificus CMCP6
MSSIRSYKGIHPQIGERVYIDSTSVIVGDIRIGDDSSIWPLVAARGDVNHIHIGARTNIQDGSVLHVTHKNAENPHGYPLLIGNDVTIGHKVMLHGCDIHDRVLVGMGAIVLDDVVVESDVMIGAGSLVPPGKRLESGYLYVGSPIKQARPLSEKERAFLLKSADNYVQNKNDYLTEVKDLHERQTNR

SEQ ID NO: 5678 - protein, 328 aa, Clostridium perfringens str. 13
MAILVCGGAGYIGSHMVAELIENNKEVVILDNFEKGHEDAILGGKLYKGDLRDRKILDKIFTENNIEAVIDFAAYSLVGESMTEPLKYFNNNVSGTISLLEAMRDHNVKYIVFSSTAATYGEPENIPILETDKNLPTNAYGESKLLVEKILKWCDTAYGIKYTALRYFNAAGAHVNGKIGEDHSPETHLIPLILQVALGKRDKIMMFGDDYDTKDGTCVRDYIHVSDLASAHSLALERLMNGGESRIYNLGNGTGFTVKEVVEVARKVTGHPIPAEVAPRRAGDPAILIASSDKAIEELNWKPKFNSLETIIETAWNWHKNHPNGYEK

SEQ ID NO: 5679 - protein, 340 aa, Bifidobacterium longum DJO10A
MTTVLVTGGAGFIATHTDIELLNKGYDVISVDNYGNSSPVALERVEQITGKPVKRYDGDVRDEALMERVFAENNIDWVIHFAGLKAVGESVAKPIEYYDNNLYSTLVLLKVMKKHNVKKIIFSSSATVYGTPKELPITEETPTGGTTNPYGTSKLFQEQILRDVHVADPSWTIVLLRYFNPVGAHESGLLGEDPKGIPANLTPYVAKVAVGELKEVQVYGDDYDTPDGTGVRDYIHVVDLAKGHVAVIDHIDKEGVFVYNLGTGHGYSVLEVIKAYEKAAGHPIPYAIKPRRPGDIAACYADASKAEKELGWKAELTIDDMAASSLNWQTKNPNGFRDAE

SEQ ID NO: 5680 - protein, 572 aa, Glycine max
MAEDDGYTKDGTVDYCGNPANKKETGTWKACPYILGNECCERLAYYGMSTNLVLYFKNRLNQHSATASKNVSNWSGTCYITPLIGAYLADSYLGRYWTIAVFSIIYAIGMTLLTLSASVPGIKPTCHGHGDENCRATTLESAVCFLALYLIALGTGGIKPCVSSYGADQFDDTDSAEKERKSSFFNWFYFSINIGALIASSLLVWIQDNVGWGWGFGIPAVAMAIAVVSFFSGTRLYRNQKPGGSAITRICQVVMASIRKYNVEVPADESLLYETAETESAIKGSRKLDHTNELRFFDKATVLAQSDKVKESTNPWRLCTVTQVEELKSILRILPVWATGIIFSTVYGQMSTLFVLQGQTMDTRVGNSTFKIPPASLSIFDTLSVIFWVPVYDRIIVPIATKFTGNKNGLTQLQRMGIGLFISIFSMVAAAILELIRLRMVRRHNYYQLEEIPMTIFWQVPQYFIIGCAEVFYFIGQLEFFYEQAPDAMRSFCSALSLTTVALGQYLSSLLVTIVTKISTRNGSPGWIPDNLNFGHIDYFFWLLALLSVVNLIAFLVVSMLYTYKRPVGTLR

SEQ ID NO: 5681 - protein, 179 aa, Bacillus anthracis str. A2012
MKKRLFFSCCLLFLMAGCDQGKPKEIDVKLHNASGDEVGTAKVTQQTSGVKITIKGEGFAPGPHGLHVHEIGECKAPRFESAGNHFNPDDKKHGLLNPKGAENGDLPNVIADGSGKIKAEIDAPHITLEEGKTTIHRKDGASIIITENADDGMTQPTGKSGDRIACGVIVKKASDMKKK

SEQ ID NO: 5682 - protein, 348 aa, Lotus japonicus
MGRTPCCDEIGLKKGPWTPEEDAILVDYIQKHGHGSWRALPKLAGLNRCGKSCRLRWTNYLRPDIKRGKFTEEEEQLIINLHAVLGNKWSAIAGHLPGRTDNEIKNFWNTHLKKKLLQMGLDPVTHRPRLDHLNLLSNLQQFLAATNMVTSFTNTLDSNAALRLQSDATQLAKLQLLQNILQVLGTNPASNLELLNQLGPSSSISDTFLHEALGLNQSKLQELYKSSIGFPSHQNLSNLQTLEVPHHLQQHYMNGGSTINSCMQSRKVVDEQLDATNSSSTIPLNSLPNLVSASPQCSTVKEMENKVNPNECSNPSSTSTTFEMWGDFMCEEVNDDYWKDLIDQESNR

SEQ ID NO: 5683 - protein, 357 aa, Capsicum annuum
MAISISAMSFRTSVSSSYSAFLCNSKNPFCLNSLFSLRNSHRTFQPSLSRKSSRVRATLLKENEEEVVVEKSFAPKSFPGNVGGGNNGEPPDNSSSNGLEKWVIKIEQSVNIFLTDSVIKILDTLYHDRHYARFFVLETIARVPYFAFISVLHLYESFGWWRRADYLKVHFAESWNEMHHLLIMEELGGNAWWFDRFLAQHIAVFYYFMTVSMYALSPRMAYHFSECVEHHAYETYDKFIKDQEAELKKLPAPKIAVSYYTGGDLYLFDEFQTSREPNTRRPKIDNLYDVFMNIRDDEAEHCKTMKACQTHGSLRSPHTNPCDESEDDPGCSVPQADCVGIVDCITKSVADPNVGRR

SEQ ID NO: 5684 - protein, 235 aa, Zea mays; identical to SEQ ID NO: 3077

SEQ ID NO: 5685 - protein, 513 aa, Schizosaccharomyces pombe
MESQPVIWYCHSCSNEFQRPGNCPRCNSDFVEMVEPNTAPEDDPRAANFVNATEFNDPNAMLQNILQSLGQGVVPNVNPTDANRTANPNTNSNPNPNATNAQPNPTMFSTGQFSTEQGLPNVFFGAAAAQPGSGTPFVMPGIVNAAQIRNFFQNIMGGNAPQPEANSEQARNANTETSNPPFASAQTQGQEHRPSSPNPAEHMTGAYVNTPLNQPPSYAASTQPEFQQTTSPIFSSSSTPPPPPPRPSQPTSGESQNTNPRFPFSAQSFVFSVGPNGALHQVNTSTENPQNAQAGAIPITDLGSILERIFGSLNQPGAQQGEGEPFNPANMFSNIFNLSGNPGDYAWGARGLDDIISQLMEQAQGHNAPAPAPEDVIAKMKVQKPPKELIDEEGECTICMEMFKINDDVIQLPCKHYFHENCIKPWLRVNGTCAICRAPVDPNSQQRNNTSTDSANGHNPSNHANPSTSTTNDQGATLRNESFNAASQSNLSSEHGHSSRTPMDDFVDEEPLE

SEQ ID NO: 5686 - protein, 337 aa, Zea mays
MAPWAIAIHGGAGVDPNLPEHRQEEAKRVLARCLQVGVDLLRAGAQALDVVEAVVRELETDPFFNSGRGSALTRAGTVEMEASIMDGRGRRCGAVSGVSTVKNPVSLARRVMDNSPHSYLAFDGAEEFARAQGLETVDNSYFITEDNVGMLKLAKEAGSILFDYRIPLAGTDTCSALAGAADSNGGGVHKAGMVMNGLPISVYAPETVGCAVVDASGACAAATSTGGLMNKMAGRIGDSPLIGSGTYACGACAVSCTGEGEAIIRCTLARDVAAVMEYKGLPLQQAVDYCVKERLDQGFAGLIAVSGTGEVAYGFNCTGMFRGCATEDGFMEVGIWE

SEQ ID NO: 5687 - protein, 262 aa, Streptomyces caeruleus
MTSPADATTEVAVSQESVAMVTGAGRGIGAATAERLAAEGMAVIVVDRTEQDTRATVAAIRTAGGRARGIGCDVAVAQAVTAAVATAVEEFGRIDVLVNCAGINRDRLLLTMGDQEWDTVLDVNLGGTMRCSFAVGRHMRRQGHGRIINFSSVAARGNAGQTNYATAKGAIAGFTRTLAAELGPHGVTVNAIAPGFVATPMVDELAERLGGDRDSVMSEAAKSSAVGRIGTPEEIAATVVFVARPESGYLTGETVHVDGGRP

SEQ ID NO: 5688 - protein, 138 aa, Glycine max
  unsure (1)..(138): unsure at all Xaa locations
WVAQKLGPEARNNGLGFPKKKLSVDAQHYHAWFHKQGALQTLGGWENELNYCPELLKEALFSNFAWNPKNFVKTRSPFLGGLKAIKKSQVLYPLEALKAPPENXSSWRNFRGLXKGETTSRGNDPQVFSGCLKIFRTN

SEQ ID NO: 5689 - protein, 184 aa, Zea mays
  unsure (1)..(184): unsure at all Xaa locations
LKLQNGLPASVHKRGKRKGWLDXYESSQISMPNSHQNIRNLVRDDLIITKPQKVHSTTRATKAHEANHHERDSGYGKRTSTMEARLPTKILXQCRRMRVLRRLLCKYREAKKIDKHMYHDMYMNGKGNMVKNNRXIMDSIHKSKGENARXKTLSDQFDDKSAKSNVNHERKIATTDERLLHRPR

SEQ ID NO: 5690 - protein, 391 aa, Hevea brasiliensis
MEFPETNNNPIITLSFLLCMLSLAYASETCDFPAIFNFGDSNSDTGGKAAAFYPLNPPYGETFFHRSTGRYSDGRLIIDFIAESFNLPYLSPYLSSLGSNFKHGADFATAGSTIKLPTTIIPAHGGFSPFYLDVQYSQFRQFIPRSQFIRETGGIFAELVPEEYYFEKALYTFDIGQNDLTEGFLNLTVEEVNATVPDLVNSFSANVKKIYDLGARTFWIHNTGPIGCLSFILTYFPWAEKDSAGCAKAYNEVAQHFNHKLKEIVAQLRKDLPLATFVHVDIYSVKYSLFSEPEKHGFEFPLITCCGYGGKYNFSVTAPCGDTVTADDGTKIVVGSCACPSVRVNWDGAHYTEAANEYFFDQISTGAFSDPPVPLNMACHKTESLRTLASV

SEQ ID NO: 5691 - protein, 393 aa, Triticum aestivum
MAAASSLHVAAPAATPRVGSAGPKSASAARSVRVARSGAAARHGGRLVACAAVATKADAPASEAASKSEGHEVLLFEALREGLMEEMQADPTVCVFGEDVGHYGGSYKVTKGLADMFGDLRVLDTPIAENSFTGMGVGAGMKGLRPVVEGMNMGFLLLAYNQISNNCGMLHYTSGGQFKIPLVIRGPGGVGRQLGAEHSQRLESYFQSIPGIQMVACSTPYNAKGLLKAAIRSDNPVVLFEHVLLYNLKEKIPDEEYICSLEEAEMVRPGSQLTILTYSRMRYHVMQAVKTLVNKGYDPEVIDIRSLKPFDLHTIGNSIKKTHRVLIVEECMRTGGIGASLRSAIIDNFWDELDARPVCLSSQDVPTPYAATLEDATVVQPAQIVAAVEEICQ

SEQ ID NO: 5692 - protein, 220 aa, Zea mays
CSAGDVALLLELVDGGSLDAVSRRRGAFAEAALAEVAAQALSGLAYLHARRVVHLDVKPSNLLATAAGEIKVADFGIARVLSRSGDHCTSYVGTAAYMSPERFDPEAHGGHYDPCAADVWSLGVTVLELLMGRYPLLPAGQQPNWAALMCAICFGEPPALPDGAASPELRSFISACLHKDYCRRASVAELLAHPFIVGRDVLASRDALQQKFLTMMPYKD

SEQ ID NO: 5693 - protein, 390 aa, Tetracentron sinense
DLEPVNPADVPVTAAGALKSYKLAAKAISRLQSLPSGNLSLLRDVLVQEVSDLTGYDRVMVYKFHEDEHGEVVAECLISDLEPYLGLHYPATDIPQASRFLFMKNKIRMICDCLAPPVKVIQDKRLVQPLSLCGSTLRAPHGCHAQYMENMGSIASLVMSVTINDDDDEIESDKRGRKLWGLVVCHHTSPRFVPFPLRYACEFLIQVFGIQLNKEVELVAQLREKQTLRTQTVLCDMLLRDAPVGIVTQSPNVMELVKCDGAALYYRSTFWLLGVTPTEAQIRDIAEWLLEYHNGSTGLSTDSFMEAGYPGAAVLGDAVCGMSAVKITSKDFLFWFRSHTAKEIKWGGAKHDPFDKDDGKKMHPRSSFKAFLEVVKWRSLPWEDMEMDAI

SEQ ID NO: 5694 - protein, 126 aa, Desulfitobacterium hafniense
MPLHSAVHRAEKLERDYQARGFEVLGFPCDQFGHQEPGDEAEIKEFCSLTYDVTFPMYAKVDVNGDKAHPLWKWLKDEKGGFLGIDAIKWNFTKFLIGRDGRVLKRYAPTDKPESIAADIEKALAA

SEQ ID NO: 5695 - protein, 374 aa, Chloroflexus aurantiacus
MLDYHSITDTSPFSTMTNKSRTRGSTCMILGGYMRGTALYGPYDVRSEYVPDPTIIEPTDAIIRLSATCICGSDLWPYRGVDPITRPVPMGHEYVGIVEEVGSAVKIIKPGQFVVGSFFASDNTCPICQAGYQTSCVNRQPGAPTGAQAEYARIPLADGTLVPTPDLPPADLIPDLLAASDVLGTGWFAAVAAEVGPGKTVAVVGDGAVGLLAVLSARQMGAERIILIGSRHPQRQALAQEFGATDVIEARGDEAIEMLKELTDGLGVHSTIEAVGTQESMMQAIRATRPGGHVGVVGVLHDVAIPGREFFFSHVHLHGGPAPVRRFLPELINLIWQRVIKPGKVFDLTLPLEQVAEGYRAMDERRAIKVLLKP

SEQ ID NO: 5696 - protein, 192 aa, Pirellula sp.
MSRFLLLTLALGCLMNAPQPVSAADSTADHECVLAHEAKTIEGKEVDLHDYEGKVVLIVNVASKCGYTKQYAGLQSLYEAHKDDGLVILGFPCNQFGSQEPGTNADILEFCSARYNVTFPMMGKVDVNGDDASPLYKQLTSVEAKPAGKGPISWNFEKFLIGRDGQVVGRYKSKVAPSDEELVSAIKSALKG

SEQ ID NO: 5697 - protein, 371 aa, Populus alba
MSFLQQQETHNQSPALALDGLYCEEDGFGEDYSCGLDDETSQVYDQNVKKEQNLSSVLLEQDLFWEDSELLSLISKEKETHVVFDSVGSRDGSLMVVRREAVEWFLRVKAHYGFSALTGVLAVNYFDRFISSSRFRRDKPWMGQLAAVACLSLAAKVEETQVPLLLDLQVEDAKYVFEAKTIKRMELWVLSTLHWRMNPVTSISFFDHIIRRLGLKTHMHWEFLWRCERLLLSVISDSRFMSYLPSILATATMLHVIKEVEPRNQLQYQTQLMAVLKTNEDEVNECYRLILEQPGSQNQRHKRKYLSTPSSPNGVIDASFSSENSNDSWAVASSISSSSSVPQFKRSRAQVQQMRLPSLNRMCVDVLSSPH

SEQ ID NO: 5698 - protein, 353 aa, Oryza sativa
MAAAVVANGASGDSSKAAFAEIYSRLKEEMLEDPAFEFTDESLQWIDRMLDYNVLGGKCNRGISVIDSFKMLKGTDVLNKEETFLACTLGWCIEWLQAYFLVLDDIMDNSQTRRGQPCWFRVPQVGLIAVNDGIILRNHISRILQRHFKGKLYYVDLIDLFNEVEFKTASGQLLDLITTHEGEKDLTKYNLTVHRRIVQYKTAYYSFYLPVACALLLSGENLDNFGDVKNILVEMGTYFQVQDDYLDCYGDPEFIGKIGTDIEDYKCSWLVVQALERADENQKHILFENYGKPDPECVAKVKDLYKELNLEAVFHEYERESYNKLIADIEAHPNKAVQNVLKSFLHKIYKRQK

SEQ ID NO: 5699 - protein, 504 aa, Streptomyces avermitilis MA-4680
MAQSTRTVIPKGFRSAELGWPELHRIPHPPHRLPVVGDVLGVNVRTPVQDSLRIGRRLGPVFRRKAFGKEIVFVGGADLAAELADESRFAKHVGLGVANLRPVAGDGLFTAYNHEPNWQLGHDVLAPGFSREAMAGYHPMMLAVTERLIDHWDREQTAGRAVDVPGDMTKLTLETIARTGFGHDFGSFERARPHPFVTAMVGTLTYAQRRNVVPEPLAPLLLRTATRRNAADLAYLNRTVDALVRARRTTSGEGDLLDRMLDTARPGTGERLAPENIRRQVITFLVAGHETTSGALSFALHYLSRHPDVAARARAEVDRVWGGTARPGYDQVAKLRYVRRVLDESLRLWPTAPAFAREARRDTVLGGVHPMREGAWALVLTAMLHRDPGVWGADAERFDPDRFDAQAVRSRAAHTFKPFGTGARACIGRQFALHEATLVLGLLLRRYELRAEPGYRLRVAERLTLMPEGLRLRLDRRVPAVEDVPVANPEVSSGPRCPVTGAGE

SEQ ID NO: 5700 - protein, 147 aa, Triticum aestivum
  unsure (1)..(147): unsure at all Xaa locations
TNTTHNTSNPLPPPFPPKFNYPPTXKXFXXKNYTLLYTISXKXXQXIKIXPLIILFIYSXXKPYIPLXILSIXXCXXXXSFXHLLHXNKKXDFIEQFXEXLLVKQDGXNXEXRDVTXXXMRXVXSNXXVXPSVFIFFGRPGTRGGAP

SEQ ID NO: 5701 - protein, 235 aa, Brucella suis 1330
MLPGDPLGNPFVATLFWSAATILLYLAAKRVYRRFPLWWLTPLAVTPLLLMALVIGLDENYRVYFSATHWLVALLGPATVAFAIPIYQQCATIRRYWPVLLAGVLVGSSAAMASAWGLAHLLGLNEAISLSLMPRSMSTPFAMTVSGDIGGRPDLTAIFVVLTGIFGAALGEIMLHWLPVRSALARGALFGMGAHGAGVARAHQIGSEEGSIAGLVMVLVGLVNVLAAPLIAHFL

SEQ ID NO: 5702 - protein, 459 aa, Bacillus subtilis subsp. subtilis str. 168
MIGNSSKDNFGQQQKLSRGLKNRHIQLMAIGGAIGTGLFLGSGKSIHFAGPSILFAYLITGVFCFFIIRSLGELLLSNAGYHSFVDFVRDYLGNMAAFITGWTYWFCWISLAMADLTAVGIYTQYWLPDVPQWLPGLLALIILLIMNLATVKLFGELEFWFALIKVIAILALIVTGILLIAKGFSAASGPASLNNLWSHGGMFPNGWHGFILSFQMVVFAFVGIELVGLTAGETENPQKVIPKAINQIPVRILLFYVGALFVIMCIYPWNVLNPNESPFVQVFSAVGIVVAASLINFVVLTSAASAANSALFSTSRMVYSLAKDHHAPGLLKKLTSSNVPSNALFFSSIAILIGVSLNYLMPEQVFTLITSVSTICFIFIWGITVICHLKYRKTRQHEAKANKFKMPFYPLSNYLTLAFLAFILVILALANDTRIALFVTPVWFVLLIILYKVQTQQRT

SEQ ID NO: 5703 - protein, 202 aa, Pyrobaculum aerophilum str. IM2
MTTTVGIAVKDGVVLATDKRVTAGYYIAHKRGEKIWKIDDHVAATMSGGVADLQSVLSFLTLRAHEYKIEYKRPIPISALVNYMSLILFYSRPYIYIVHSIIGGVDEEEGAVLYMVDWLGTVTKEKYIATGSGSPYAKGALEVGYREDMTLEDAVDLAIKAVKAAIRNDPGSGEGIDVVVITRKEGFKRVFTTQQKLVLPSL

SEQ ID NO: 5704 - protein, 267 aa, Sulfolobus solfataricus
MLGKVIQLIKRSDLVVEVLDAREPSLTRSKKIEDIIVKNYKNILLVLNKGDLVPLWVLKAWKDYFKTEENIESVYVSATSHLGTKILRDTMKSLLKGNKGIVVFVGYPKSGKSSVINALKGRHSAQTSAHPLEYGYTKSIQLFKIDNKIYAWDTPGVIPPDGNELEKTIRGYNADLLEDPVKPALMLINRVIEFSKESLISVYKVDFNNPYELLERIAIRRGWFYKSTKEPNIDMAARAVIRDYHEGKIAYYTLPPSLYRDDKSNSI

SEQ ID NO: 5705 - protein, 371 aa, Nicotiana tabacum
MANEENKASPTNTSRASNNRAFDDTLAAASSNGNDPLLKRVVLGELTNLEYVVGSTKTNTHNSKRKIKLKKTAPTKRKKVAKQSFKSDAATNFSPNDDLQKCAYAPLIYQHLHSLEVEERRRPLSNYMEKIQNDVTPTMRMILVDWLVEVADEYKLVSDTLYLTVTFIDRFLSSHVLARNSLQLLGVSCMLAASKYEEISPPHVEDFCYITDNTYTGEEVVNMERELLNFLDFEISNPTTKTFLRIFTKAAQDNVDFLTLHFEFLGCYLTELSLLDYSCVQFLPSVVAASAIFLSRFTILPKVHPWNLALQQCTGYKPSELKDCVLVIHELQSGRRAASVQAVRKKYMDHKYKCVAALHPPDIPACFFDDA

SEQ ID NO: 5706 - protein, 368 aa, Nicotiana tabacum
MGIQHNEHNQDQTQSFLLDALYCEEERWEETIEDEILEKEATLPLPLPLLEQDLFWEDEELLSLFTKEKETISNFETIKTDPLLCLSRKEAVKWILKVNAHYGFSTFTAILAINYFDRFLSSLHFQKDKPWMIQLVAVTCLSLAAKVEETQVPLLLDFQVEDAKYVFEAKTIQRMELLVLSSLKWRMNPVTPLSFVDHIIRRLGLKSHIHWEFLKQCERILLLVIADCRFLSYMPSVLATATMLHVIHQVEPCNAADYQNQLLEVLNISKEKVNDCYELITEVSYNSISHKRKYESPINSPSAVIDTFYSSENSNESWDLQTSSSIPSTYSPRDQFLPLFKKSRVQEQQMRLTSLSRVFVDYAVGSPR

SEQ ID NO: 5707 - protein, 618 aa, Zea mays
MAAVAAATSHLLRHHRNPHLLLLRAAISSSRALPQQPELSPDPTAGTPDLAGAAPLPPNPSTGSPFYTQNWRNPAAANPPSSLLPTVVAGSPFGAQHFMAAFYDAPDVTGLKETFAKYMAEQRWEDMKHLFDHWVRSLDAATGKPNHPDVDLFNHYLRANLMTRALPHEMLDLADHMLEFELQPNTASYNLVLKSMVASQETEGAEKLIERMLQTGTFPDDESYNLVVGLLIRQNLVDSSLKYLDLMLKSGYMLSLTVFTDYIRACMRSGRLDTLTSIIEKCKTTDKNKVLCPEWTWCIDIADAAFEANNSKLALFALEYLARWIARGENVKPPVQLSVNEGLVISALSAAGRTYNTDLLNAAWSLLRKSLRQKRAPTQETYLAKIYAHSSIGQLQRAFGTLREFENAYGNSEDIDLELFSPFTSLHPLVVACCKDGFSTLDSVYGQLENLIHADPPYKSLAALNCVVLGCANIWDINRAYETFVAIKEKFDLTPDIHSYNALLCAFGKLKQTGEACNVFQHVLTLGVKPNATTYSLLVDAHLANKDPKAALAIIDEMVDAGFTPSKDTLRKVRRRCSRESDFDSDEKVQSLAKQFNYRMGGENRREMLYSIEYNPVY

SEQ ID NO: 5708 - protein, 305 aa, Miscanthus transmorrisonensis
IESVGEGVTDVAPGDHVLPVFTGECKECPHCKSAESNMCDLLRINTDRGVMIGDGKSRFSINGKPIYHFVGTSTFSEYTVMHVGCVAKINPQAPLDKVCVLSCGISTGLGASINVAKPPKGSTVAIFGLGAVGLAAAEGARIAGALRIIGVDLNPSRFEEARKFGCTEFVNPKDHKKPVQEVLAEMTNGGVDRSVECTGNINAMIQAFECVHDGWGVAVLVGVPHKDAEFKTHPMNFLNGRTLKGTFFGNFKPRTDLPNVVELYMKKELEVEKFITHSIPFVEINKAFDLMAKGEGIRCIIRMEN

SEQ ID NO: 5709 - protein, 211 aa, Glycine max
MHVNVTILPRVRPRVRPRVRGRVGGPRVRPRVRKKLGFVTLSFACESESNNNQSIIMSSAKKITLKSSDGEAFEVDEAVALESQTIKHMIEDDCADSGIPLPNVTSKILAKVIEYCKKHVEAANPEDKPSEDDLKAWDADFVKVDQATLFDLILAANYLNIKSLLDLTCQTVADMIKGKTPEEIRKTFNIKNDFTPEEEEEVRRENQWAFE

SEQ ID NO: 5710 - protein, 250 aa, Pisum sativum
MGKSYPTVSPDYQKAIEKAKRKLRGFIAEKKCAPLILRLAWHSAGTFDSKTKTGGPFGTIKHQAELAHGANNGLDIAVRLLEPIKEQFPIVSYADFYQLAGVVAVEITGGPEVPFHPGREDKPEPPPEGRLPDATKGSDHLRDVFGKAMGLSDQDIVALSGGHTIGAAHKERSGFEGPWTSNPLIFDNSYFTELLTGEKDGLLQLPSDKALLTDSVFRPLVEKYAADEDVFFADYAEAHLKLSELGFAEA

SEQ ID NO: 5711 - protein, 336 aa, Glycine max
  unsure (1)..(336): unsure at all Xaa locations
AEFTLYTTCKLLRKGTPSCGKSRSGNPNNNNLFDGRQGESDHWSELDTDLYNWTKALRPVQWFPGHIAKAEKELKEQLKLMDVVIEVRDGRIPMSTSHPQMDLWLGNRKRILVLNREDMISTADRNAWADYFTRNGTKVVFSNGQLGMGTMKLGRLAKELAADVNVKRRSKGLLPRAVRAGIVGYPNVGKSSLINRLLKRRMCPAAPRPGVTRELRWVRFGKDLELLDSPGILPMRISDQSAAIKLAICDDIGERSYDVADVAAILVQMLSKLPTVGRDALCKRYKIDVDCRDGRIFIEKLAVXVFNGDVHQAAFRVLADFRKGKFGWTALERPPK

SEQ ID NO: 5712 - protein, 232 aa, Pasteurella multocida
MMNWSLYGYSFLTLLAFAVAVKISRHWKSILFNSFVLTVTLLVVILLTIDISYDDYLQGNAPLNNLLGISIVALAVPLYEQLHQISRYWKNILLITCLASLLSMLSGAGLALYLGATPEMVATVLPKSVTTPIAMAVSQGLGGIPSIAAVGVVIAGLQGSVLGLLTLKKLKVKHAEARGLAIGAISHALGTVTCMESDQKAGSYSSIALVLCGIMTSILAPITFKILYFFMA

SEQ ID NO: 5713 - protein, 127 aa, Zea mays
MCSPAADMPPQGGFPEVRYRRYLPKRGPSGLVILSGIAAISAYGFYKVAEGNLERRELKRENLWARIHLIPLLTAEADRDAYRRSEAAKAREAEIMKNVEGWKAGESVYNNTKYYTPPNFVIVPEEN

SEQ ID NO: 5714 - protein, 117 aa, Glycine max
  unsure (1)..(117): unsure at all Xaa locations
GVLTGKYKKGVIPPXDSRFALENYKNLASRSLVDDVLKRVDGLKPIAEELGVPLSQLAIAWCAANPNVSSVICGATKESQIQENMKAIDVIPLLTPVVMEKIEAVVQSKPKRPESYR

SEQ ID NO: 5715 - protein, 208 aa, Rhodospirillum rubrum
MILTTDRLVLRPFRFSDAAAIIAYATAPDFIRFLPIPLANPERAADFVAQRVREGQPDGLGDWHFVVQCRGGGAPVGAVRLGLRDEENRQGDVGYVLHPAARGQGLATEAVRGLLDFGFRLLDLERIWASADVDNRASWRVMERVGMRREGVSRHTMRVDGVWRDSVLYAVLAGDAAARALPKVGRLADGAAEDRGAEEEESSVRIVG

SEQ ID NO: 5716 - protein, 508 aa, Oryza sativa (japonica cultivar-group)
MMAEALREVLPLPYFPGQPCWYLQERRGAEAWSAEENKVFERALAQVDLDSPNRWEMVAAMLPRKTVIDVMNHYRDLENDVGSIEAGLVPFPHYSSSLSPASSGFTLQDWDGSDGGFRRGCYLKRGRAPDQERKKGVPWTEEEHKSFLMGLKKYGRGDWRNISRYFVTSRTPTQVASHAQKYFIRLNSGGKDKRRSSIHDITTVNLPEEDTSNPSPSPPSVLTTASDQLGSLVDTKPVPPPPSLGAQRHFMSPLPGALGVSHHPYGNVKLEPNASFLAGGDAMRTLVTAVLSGGEPHKEEHRAPPPIISTGTTRLRPSRSPVSVCDWLASWLQSCFMRLRIAKYWTEGPLTGYCFDQEHQGFPRKRKRKALLDRCDYTIHCMNLSLDCLFGKPHRPASAGGQCISTPTPSAIPIPDRMHGEIGDHRPEIKWHRCYCRFVLCSSDFCSCEVEESASTGGGALLSSICSAIGHGRESESIIDAIALLGRHVRPRLRANIQILQMDDIIEE

SEQ ID NO: 5717 - protein, 324 aa, Halobacterium sp. NRC-1
MCGFVVAAAGAAFAGQAVVAASAGAPVGQPQFVFLAVSGALLAGIMRTLFALRDAPLVLGSVVVVLWVVTALAPLAGVPTVAAWERVLVALAVTTAFGWVSRALGATSIAGMLTGVFLGLLAVVLGGYGWFVVLVAFFAVGSLATKFKYELKADRGVAEPNDGARGTANVLGNSAAALIALVLYAAHAHVPFADTAFLFAYAGSVATALADTLSSEVGGLFDTPRLVTTFERVDPGTDGAVTWQGELAGVVGATIIAVLSVAVFGVTLRGGGVVVAAGVAGMTADSLAGATIEGRVLTNQGVNFLATLTGAAVGGALALAVGVA

SEQ ID NO: 5718 - protein, 501 aa, Catharanthus roseus
MALASIEKVATGLICFILLIFSLKRIGHPRDWALVGILSVWFPSLGHIYEKLAKSLAKNDKTFVLKGSFLSKQDVIFTCDPANMHHVMSTNFSNYPKGPENRNVFDVYGEMLFTADHEKWKSHRKVTNAYFHDQRFNGFSQKVNKEVIEKELFPFLDHAAEEALVFDLQDVFQRLMLDSSSILTTGQNHRSLRVGLPYDETLEAINIANYQIFVRHILPAKIWKFQKWLGIMGEKKIKKAWRILDDISVEYMNRRKKEISSTISSQEDMDVVKFSEEDHVVLKSVDASDNLLRDTVKGILLAGTDTTATVLSWFFWLILKNPRVEQKIREEIELYLKQKNGEHGLYTNPEELNELMYLHAAIYETMRLYPAAPFTSRKSIQADVFPTGHQVNPNTTIVMAYYAVGRMKSIWGEDCLEFKPERWLSDKGKLIPVQTNKFLAFGTGPRICPGKELGLNRVKAVAAAIIPKYSFKIMRNKPVMPAACATLYLKDGLIVRVNKII

SEQ ID NO: 5719 - protein, 593 aa, Glycine max
MAVDSEVPRAERSAKALQFIEEVTKNTDSVQERVLTEILTQNAETEYLKRFGLNGATDRDTFKSKVPVVTYEDLQPDIQRIANGDSSPILCSHPISEFLTSSGTSAGERKLMPTIHEEMDRRQLLYSLLMPVMNQYVSDLDKGKALHFLFIKAEAKTPGGLVARPVLTSYYKSEQFRKRPFDPYNVLTSPNEAILCPDSFQSMYTQMLCGLIMRHEVLRVGAVFASGLLRAIRFLQLNWEQLSHDILTGTLNPKITEPSIKERMSKILKPDPQLAAFIKNECSVENWERIIVRIWPNTKYLDVIVTGAMAQYIPTLDYYSGGLPKPCTMYASSECFFGLNLKPMSEPSDVSYTILPNMGYFEFLPHDDSSPVTLSKDSPPRLVELADVELGKYYELIITTYSGLCRYRVGDILQVTGFHNSDPQFRFVRRKNVLLSIDSDKTDEAELQKAIENASELLKEFNTSVVEYTSFADTKSIPGHYVIYWELMMKDSSHPPTNQVLNQCCLVMEESLNSVYRQGRVADNSIGPLEIRVVKNGTFEELMDYAISRGASINQYKVPRCVSFTPIMELLDSRVVSFHFSPAAPHWTPERRR

SEQ ID NO: 5720 - protein, 380 aa, Glycine max
MVQAQPLQHVGNGAGKEDQAYFDPSAPPPFKIANIRAAIPKHCWEKNTLRSLSYVLRDVLVVTALVAAAIGFNSWFFWPLYWPAQGTMFWALFVLGHDCGHGSFSNSPLLNSIVGHILHSSILVPYHGWRISHRTHHQNHGHVEKDESWVPLTEKVYKNLDNMTRMMRFTLPFPIFAYPFYLWSRSPGKEGSHFNPYSNLFSPGERRDVLTSTLCWGIMLSVLLYLSLTMGPLFMLKLYGVPYLIFVMWLDFVTYLHHHGYKQKLPWYRGQEWSYLRGGLTTVDRDYGWINNIHHDIGTHVIHHLFPQIPHYHLIEATKAAKAVLGKYYREPQKSGPLPLHLIKYLLHSISQDHFVSDSGDIVYYQTDSQLHKDSWTQSN

SEQ ID NO: 5721 - protein, 437 aa, Nostoc punctiforme
MKTNQIPPGSFGLPVLGETLSFVFDRDFAKKRYHQYGPIFKTHLLGRPTVVMAGPEALEFVLSSHIENFSWREGWPDNFKTLLGESLFLQDGEEHRRNRRLMMPALHGPALASYFSTMEDITRSYLQKWEKKQEFTWFQEFKQLTFDIASQLFLGTRPGPECVRLSQLFTTLTNGLLAINPLPLPFTTFGKAIAARNEILEHLTQVVRERQQNPTQDTISLLIKAKDEDGNSLSEKEIIAQAVLLLFAGHETTTSMLTWLCTELACHPEVLEKARVEQLQLASQGDLDLEQLGKMPYLEQVLWEVERLHQPVGGGFRGVIKDFELNGYHVPTGWQLYYSIGVTHQIEEIYSEPELFDPDRFSPQRQEHKKYPFSLVGFGGGPRICIGIAFAKMEMKIVAAHLLRSYHWEILPNQSLEVVAVPTNRPKDGLRVRFQPR

SEQ ID NO: 5722 - protein, 365 aa, Triticum aestivum
SDECRRASRRYRVFEVAVSRLASFGRQDGIKAIIEAQKPFLEPSNEGFATRLIRLYGRASMPSHAAATFHELPTQHKSTMTFNALLAAYAEAGDFDGLTAAFQEIPATHPSVVPSVYSYNILIRSLCQKPDLSAALDVVLLMEKHGVSADIITFNTLLNGFCNNGPTDEAETVWEMMKERNLEPDAKCYNAKLRGLVAEGRTDDAAAVLERLEKDGPKPDTVSYNELIRGYLKAGRLQEAKKLYDDLGKNHCAANKGTYETLVPHLVQAGDLDCALRYCYEMFSSKRSSRVECGVLQDVVNALVDASRVEEAAKLVDIGRKKYYYSRKGLRMPGSAKGSELRAETDEEEAISEEKECEVEDETEK

SEQ ID NO: 5723 - protein, 127 aa, Glycine max
MARGGKLTKLKSVLKKWNSFGNNSKHSRHHSISAVADDESSSRSDLHAVYVGKSRRLYRVASDVVDHPVFRELVERSRDSDQQQQSEDTTINVVACEVVLFEHLLWMLDNADPQPESLNELVDFYAC

SEQ ID NO: 5724 - protein, 148 aa, Zea mays
  unsure (1)..(148): unsure at all Xaa locations
REEMAASDVEYRCFVGGLAWATDDHSLNNAFSTYGEVLESKIILDRETQRSRGFGFVTFSXXXXXRSAIEGMNGKELDGRNITVNEAQSRGGRGGGGGGYGGGRRDGGGYGGGGGGYGGGRGGYGGGGGYGGANRGGGYGNNDGNWRN

SEQ ID NO: 5725 - protein, 395 aa, Thermotoga maritima
MRAVRLHAKWDPRPEFKLGPKDIEGKLTWLGSKVWRYPEVRVEEVPEPRIEKPTEIIIKVKACGICGSDVHMAQTDEEGYILYPGLTGFPVTLGHEFSGVVVEAGPEAINRRTNKRFEIGEPVCAEEMLWCGHCRPCAEGFPNHCENLNELGFNVDGAFAEYVKVDAKYAWSLRELEGVYEGDRLFLAGSLVEPTSVAYNAVIVRGGGIRPGDNVVILGGGPIGLAAVAILKHAGASKVILSEPSEVRRNLAKELGADHVIDPTKENFVEAVLDYTNGLGAKLFLEATGVPQLVWPQIEEVIWRARGINATVAIVARADAKIPLTGEVFQVRRAQIVGSQGHSGHGTFPRVISLMASGMDMTKIISKTVSMEEIPEYIKRLQTDKSLVKVTMLNE

SEQ ID NO: 5726 - protein, 167 aa, Zea mays
MCSSGSRGMQRRVWSTSPVERRRRQRLCEMSILWEKSAGWRWLVRRTRDSKPFFFTFAALCGVVPGVIGYGVMQLTGSRNEQLEAHLRSTARPETTMMGQVNRERLAEFLGELQRKEDTNDRYVAALRGETLTRKRYERIQPLPAANAQASQETAGASAEEERPKAK

SEQ ID NO: 5727 - protein, 237 aa, Oryza sativa
MSTLDATRAELGLVVLYLNKAEARDKICRAIQYGSKFISNGQPGTAQDVDRSTTLARKVFRLLKWVNDLHGLISPPAKGTPLTLVLLGKSKNALLSTFLFLDQFVWLGRTGIYKNKERTDRIVRISLYCWMASSVCAGLVELGELKRLSKSMRKLARELRDTDKYENDQYKSKMKQSDERLLALVKAAMDVVVAVGLLQLSPKKITPRVTGAFGFVTSLISCYQQLPSRAPAIKVKA

SEQ ID NO: 5728 - protein, 271 aa, Oryza sativa
MGIVEEAHNLRVVGEGKRGVIVLAHGFGTDQSVWKHLVPHLVADYRVVLFDTMGAGPTNPDYFDFSRYATLEGYALDLLAILQELRVASCIYVGHSVSAVIGAIASISRPDLFSKLVLLSASPRYLNDVDYYGGFEQEDLDELFEAMGSNYKAWCSGFAPLCVGGDMESVAVQEFSRTLFNIRPDIALSVAQTIFQSDVRSLLPLVTVPCHIVQSTKDLAVPVVVSEYLHKHLGGDSIVEVMPSEGHLPQLSSPDIVIPVLLRHIQHDIAV

SEQ ID NO: 5729 - protein, 315 aa, Hordeum vulgare subsp. spontaneum
MATAGKVIKCKAAVAWEAGKPLSIEEVEVAPPQAMEVRVKILYTALCHTDVYFWEAKGQTPVFPRILGHEAGGIVESVGEGVTELVPGDHVLPVFTGECKDCAHCKSEESNLCDLLRINVDRGVMIGDGQSRFTINGKPIFHFVGTSTFSEYTVIHVGCLAKINPEASLDKVCVLSCGISTGLGATLNVAKPKKGSTVAIFGLGAVGLAAMEGARMAGASRIIGVDLNPAKYEQAKKFGCTDFVNPKDHTKPVQEVLVEMTNGGVDRAVECTGHIDAMIAAFECVHDGWGVAVLVGVPHKEAVFKTHPMNFLNEK

SEQ ID NO: 5730 - protein, 227 aa, Pyrococcus horikoshii
MGFKEYYRVFPTYTDINSQEYRSRIETLEPLLMKYMKKRGKVLDLACGVGGFSFLLEDYGFEVVGVDISEDMIRKAREYAKSRESNVEFIVGDARKLSFEDKTFDYVIFIDSIVHFEPLELNQVFKEVRRVLKPSGKFIMYFTDLRELLPRLKESLVVGQKYWISKVIPDQEERTVVIEFKSEQDSFRVRFNVWGKTGVELLAKLYFTKEAEEKVGNYSYLTVYNPK

SEQ ID NO: 5731 - protein, 162 aa, Glycine max
MAASSSEKQVVVIGIDDSEQSTYALNWALDNFFPSPIFKLVLSHSRPTATSAVGFAGPVYAGAAEVLPIVDSDLRKIAARVLETAKQLCFNKSVNDVTAEVVEGDPRNVLCDAVDKYRAAILVVGSHGYGAIKRAVLGSVSDYCAHHAHCTVMIVKKPKIKH

SEQ ID NO: 5732 - protein, 250 aa, Brassica oleracea
MTKSYPTVTEDYQNAIEKCKRKLRGLIAEKNCAPIMVRLAWHSAGTFDCASRTGGPFGTMRFDAEQGHGANSGIHIALRLLEPIREQFPTISFADFHQLAGVVAVEVTGGPEIPFHPGREDKPQPPPEGRLPDATKGCDHLRQVFTKQMGLSDKDIVALSGAHTLGRCHKDRSGFEGAWTSNPLIFDNSYFKELLSGEKEGLLQLVSDKALLDDPVFRPLVEKYADDEEAFFADYAEAHLKLSELGFADA

SEQ ID NO: 5733 - protein, 704 aa, Zea mays
MNLWTDDNASMMEAFMASADLPTFPWGAPAGGGNSSAAAASPPPQMPAAMAPGFNQDTLQQRLQAMIEGSRETWTYAIFWQSSLDSATGASLLGWGDGYYKGCDEDKRKQKPLTPSAQAEQEHRKRVLRELNSLISGAAAAPDEAVEEEVTDTEWFFLVSMTQSFLNGSGLPGQALFAGQPTWIASGLSSAPCERARQAYNFGLRTMVCFPVGTGVLELGSTDVVFKTAESMAKIRSLFGGGAGGGSWPPVQPQAPSSQQPAAGADHAETDPSMLWLADAPVMDIKDSLSHPSAEISVSKPPPHPPQIHFENGSTSTLTENPSPSVHAPPPPPAPAAPQQRQHQHQNQAHQGPFRRELNFSDFASTPSLAATPPFFKPESGEILSFGADSNARRNPSPVPPAATASLTTAPGSLFSQHTATMTAAAANDAKNNNKRSMEATSRASNTNHHPAATANEGMLSFSSAPTTRPSTGTGAPAKSESDHSDLDASVREVESSRVVAPPPEAEKRPRKRGRKPANGREEPLNHVEAERQRREKLNQRFYALRAVVPNVSKMDKASLLGDAISYINELRGKLTSLETDKETLQTQVEALKKERDARPPSHSAGLGGHDGGPRCHAVEIDAKILGLEAMIRVQCHKRNHPSARLMTALRELDLDVYHASVSVVKDLMIQQVAVKMASRVYTQDQLSAALYSRLAEPGSAMGR

SEQ ID NO: 5734 - protein, 370 aa, Hypocrea jecorina
MPVGTVLVTGGTGYIGSFTTLSLLDAGYDVVIVDSLYNSSKVAIDRIELLSGRRPDFYQIDITDEKALDEVFAKHPAIDSVIHFAALKAVGESSIIPLEYYRVNVGGSIALLQSMTRHNVTNIVFSSSATVYGDATRFPNMIPIPEHCPIGPTNTYGRTKSMIEDVITDHVTAQRNNLQKEGKPFEQWNGALLRYFNPCGAHPSGIMGEDPQGVPFNLLPLLGQVATGQREKLLVYGDDYPSRDGTAIRDYIHVVDLARGHLMALNYLRSNQPGVKAWNLGSGRGSTVFEIIKAFSDVVGRPLKYEVVPRRAGDVLDLTANPTLANKELGWKTEHTMEQACEDLWRWVKNNPQGYRQEPPAELLAAIKKA

SEQ ID NO: 5735 - protein, 591 aa, Zea mays
MQLKNESSSVLKTKPSPRILTEAAPWRQQERSATNICREAEGRPRIASVYADIERRVGGFDFLECNNKDFRALRILGALNARDAKDKNDSSGRPMATHRTGYDLTTSGSFQAPISLAKQVDVSIMDGVSLASVAPIAGLRSLRKLPARYSSFTGTNETSTNENIHLRMSRAQLKSEETVSSANSPRPTSSSSPRNVLKNAEPERRSRPPVSPKSPSKKSNEAVSPKGRTRSKPSQVKSHRDEVLQSTGNRISLAKQVDVSIIDCPKPLGGNSTFVPPSNAAATASHKAPSILDSDQNIHSLDNIPSPVSVLDTSFYHKRISDSFKDGETHSSEECWNPNSLPDTPQSKASSEVNQIKPENLEVLIQKLEQLQSMSEEDASIKEVMASVAANKDHQYIYEIMLASGLLHKEHSVTALPGQLQPSNYPINPELFLILEQTKPVSVFAFQTVSGAKKSCKPCAGKLHRRLVFDLVNETIAQKMIICRSGSQPVKFLQSRKLSGWQLFKDLCTEVDRQIKCPEEEENGNMISDEDTVNGTKDWMSFDTMLHGMVWEIERSIFKGLIDEVIGGETIEKMQFGQRKLQRQLSFSSIN

SEQ ID NO: 5736 - protein, 543 aa, Candida tropicalis
MSSSPSIAQEFLATITPYVEYCQENYTKWYYFIPLVILSLNLISMLHTKYLERKFKAKPLAVYVQDYTFCLITPLVLIYYKSKGTVMQFACDLWDKNLIVSDPKAKTIGLKILGIPLIETKDPENVKAILATQFNDFSLGTRHDFLYSLLGDGIFTLDGAGWKHSRTMLRPQFAREQVSHVKLLEPHMQVLFKHIRKHHGQTFDIQELFFRLTVDSATEFLLGESAESLRDESVGLTPTTKDFDGRNEFADAFNYSQTNQAYRFLLQQMYWILNGSEFRKSIAIVHKFADHYVQKALELTDEDLEKKEGYVFLFELAKQTRDPKVLRDQLLNILVAGRDTTAGLLSFLFFELSRNPEIFAKLREEIENKFGLGQDARVEEISFETLKSCEYLKAVINETLRIYPSVPHNFRVATRNTTLPRGGGEGGLSPIAIKKGQVVMYTILATHRDKDIYGEDAYVFRPERWFEPETRKLGWAYVPFNGGPRICLGQQFALTEASYVTVRLLQEFGNLKQDPNTEYPPKLQNTLTLSLFEGAEVQMYLIL

SEQ ID NO: 5737 - protein, 799 aa, Saccharomyces cerevisiae
MSTIYRESDSLESEPSPTPTTIPIQINMEEEKKDAFVKNIDEDVNNLTATTDEEDRDPESQKFDRHSIQEEGLVWKGDPTYLPNSPYPEVRSAVSIEDDPTIRLNHWRTWFLTTVFVVVFAGVNQFFSLRYPSLEINFLVAQVVCYPIGRILALLPDWKCSKVPFFDLNPGPFTKKEHAVVTIAVALTSSTAYAMYILNAQGSFYNMKLNVGYQFLLVWTSQMIGYGAAGLTRRWVVNPASSIWPQTLISVSLFDSLHSRKVEKTVANGWTMPRYRFFLIVLIGSFIWYWVPGFLFTGLSYFNVILWGSKTRHNFIANTIFGTQSGLGALPITFDYTQVSQAMSGSVFATPFYVSANTYASVLIFFVIVLPCLYFTNTWYAKYMPVISGSTYDNTQNKYNVTKILNEDYSINLEKYKEYSPVFVPFSYLLSYALNFAAVIAVFVHCILYHGKDIVAKFKDRKNGGTDIHMRIYSKNYKDCPDWWYLLLQIVMIGLGFVAVCCFDTKFPAWAFVIAILISLVNFIPQGILEAMTNQHVGLNIITELICGYMLPLRPMANLLFKLYGFIVMRQGLNLSRDLKLAMYMKVSPRLIFAVQIYATIISGMVNVGVQEWMMHNIDGLCTTDQPNGFTCANGRTVFNASIIWSLPKYLFSSGRIYNPLMWFFLIGLLFPLAVYAVQWKFPKFKFAKHIHTPVFFTGPGNIPPSTPYNYSLFFAMSFCLNLIRKRWRAWFNKYNFVMGAGVEAGVAISVVIIFLCVQYPGGKLSWWGNNVWKRTYDNDYKKFYTLKKGETFGYDKWW

SEQ ID NO: 5738 - protein, 124 aa, Oryza sativa
  unsure (1)..(124): unsure at all Xaa locations
MGKGGGLSKLRCMIRRWHSSSRIARAPPSAGELEEGSAAAAGRAASLHPVYVGKSRRRYLIAEELVGHPLFQNLVDRTGGGGGGGAATVVGCEVVLFEHLLWMLENADXXQPESLDELVEYYAC

SEQ ID NO: 5739 - protein, 271 aa, Glycine max
MSPSLDLPPKGGFSFDLCRRNAMLQNKGLKAPTFLKTGTTIVGLVFQDGVILGADTRATEGPIVADKNCEKIHYMAPNIYCCGAGTAADTEAVTDMVSSQLQLHRYHTGRESRVVTALTLLKKHLFNYQGHVSAALVLGGVDITGPHLHTIYPHGSTDTLPFATMGSGSLAAMSVFESKYKESLSRDEGIKLVVEAICAGIFNDLGSGSNVDVCVITKGHKEYLRNHLLPNPRTYVNPKGFDFPKKTEVLLTKITPLKEEVEVIEGDAMEE

SEQ ID NO: 5740 - protein, 339 aa, Neisseria meningitidis
MKNILVTGGTGFIGSHTVVSLLKSGHQVVILDNLCNSSINILPRLKTITGQEIPFYQGDIRDREILRRIFAENRIDSVIHFAGLKAVGESVAEPMKYYDNNVSGSLVLAEEMARAGVFSIVFSSSATVYGDPGKVPYTEDMPLGDTTSPYGTSKSMVERILTDIQKADPRWSMILLRYFNPIGAHESGLIGEQPNGIPNNLLPYICQVAAGKLPQLAVFGDDYPTPDGTGMRDYIHVMDLAEGHVAAMQAKSNVAGTHLLNLGSGRASSVLEIIRAFEAASGLTIPFEIKPRRAGDLACFYADPSYTKAQIGWQTQRDLSQMMEDSWRWVSNNPNGYDD

SEQ ID NO: 5741 - protein, 107 aa, Castanea sativa
NPTEAELRDMINEVDADGNGTIGFPEFLNLMARKMKDTDSEEELKEAFRVFDKDQNGFISAAELRHVMTNLGEKLTDEEVDEMIREADVDGDGQINYEEFVKVMMAK

SEQ ID NO: 5742 - protein, 745 aa, Geobacillus stearothermophilus
MENQNRQNAAQCPFHGSVTNQSSNRTTNKDWWPNQLNLSILHQHDRKTNPHDEEFNYAEEFQKLDYWALKEDLRKLMTESQDWWPADYGHYGPLFIRMAWHSAGTYRTGDGRGGASTGTQRFAPLNSWPNNANLDKARRLLWPIKKKYGNKISWADLFILAGNVAIESMGGKTIGFGGGRVDVWHPEEDVYWGSEKEWLASERYSGDRELENPLAAVQMGLTYVNPEGPDGKPDPKAAARDIRETFRRMGMNDEETVALIAGGHTFGKAHGAGPATHVGPEPEAAPIEAQGLGWISSYGKGKGSDTITSGIEGAWTPTPTQWDTSYFDMLFGYDWWLTKSPAGAWQWMAVDPDEKDLAPDAEDPSKKVPTMMMTTDLALRFDPEYEKIARRFHQNPEEFAEAFARAWFKLTHRDMGPKTRYLGPEVPKEDFIWQDPIPEVDYELTEAEIEEIKAKILNSGLTVSELVKTAWASASTFRNSDKRGGANGARIRLAPQKDWEVNEPERLAKVLSVYEDIQRELPKKVSIADLIVLGGSAAVEKAARDAGFDVKVPFFPGRGDATQEQTDVESFAVLEPFADGFRNYQKQEYSVPPEELLVDKAQLLGLTAPEMTVLVGGLRVLGANYRDLPHGVFTDRIGVLTNDFFVNLLDMNYEWVPTDSGIYEIRDRKTGEVRWTATRVDLIFGSNSILRSYAEFYAQDDNQEKFVRDFINAWVKVMNADRFDLVKKARESVTALQIVTSTDLE

SEQ ID NO: 5743 - protein, 418 aa, Oryza sativa
  unsure (1)..(418): unsure at all Xaa locations
YEEAVGLLRRPAVAEMAVDVLLCAVPIWAAVMIGLVIGWAWRPRWTGLLYLGFRSRLRLLYVPPGLGARRLWLACTALSAFSVAXRGSSPPPSAAAASTSARTPXLADDDDAADASGDDVVTEKDLEHLVQLLDNKESGDTTWQHLMERTTSNMTYKAWRREPEVGPIMYCSRTIFEDATPELVRDFFWDDEFRLKWDPMLAYFKILEEFPQNGTMIIHWIKKFPFFCSDREYIFGRRIWESGKTYYCVTKGVPYPALPKKEKPRRVELYFSSWRIRAVQSPKQDGQQSACEVTLVHYEDMGIPKDVAKVGVRHGMWGAVKKFQSGFRAYQQMRDTENTLSRSAIMARVTTKTSIASSSCPLDQEPSNAAKTIDESENSRVDWKWVVFGGAVAAVCVLNTGLVGKALLIGAASRRQAK

SEQ ID NO: 5744 - protein, 303 aa, Zea mays
MQIAGFNVHYRVGWFKKKKKKKKQAPQQLLRSSLSRVAPHRILRFEALCSQGTMAKNYPTVSAEYSEAVEKARRKLRALIAEKSCAPLMLRLAWHSAGTFDVSSRTGGPFGTMKCPAELAHGANAGLDIAVRLLEPIKEEFPTLSYADFYQLAGVVAVEVTGGPEIPFHPGREDKPQPPPEGRLPDATKGSDHLRQVFGKQMGLSDQDIVALSGGHTLGRCHKERSGFEGAWTTNPLVFDNSYFKELLSGDKEGLLQLPSDKALLSDPVFRPLVEKYAADEKAFFDDYKEAHLKLSELGYADA

SEQ ID NO: 5745 - protein, 439 aa, Brassica rapa
TFSFLLVFVVLNLFHPALSIYFNILSSTETLTISGNRTLVSPGNVFELGFFKTTSNSRWYLGIWYKKLYFRTYVWVANRDSPLSTGTLKISGNNLVLLGHSNKSVWSTNLTRRNERSPVMAELLANGNFVMRDSNNNDASGFLWQSFDFPTDTLLPEMKLGYDHKKRLNRFLTSWRNSDDPSSGEFSYQLDTQRGMPEFLVLKEGYPGHRSGPWNGVRFSGIPEDQKLSYMVYNFTENSEEVAYSFRVTNNSIYSRLKINSEGFLERLTWTPASSAWNLFWSVPVDTRCDVYMSCGPYAYCDVNTSPVCNCIQGFNRSNEQQWDMRDGASGCIRGTQLSCSDDGFTRMKKMKLPDTTMAIVDRSIGVKECEKRCLSDCNCTAFANADIRNGGTGCVIWTGELEDIRNYFAVLGQDLYVRLAAADLAKKRNANGKIVTLT

SEQ ID NO: 5746 - protein, 238 aa, Oryza sativa
  unsure (1)..(238): unsure at all Xaa locations
XFVKVDRLINMGRGKIEIKRIENKTSRQVTFCKRRNGLLKKAYELAILCDAEIALIVFSSRGRLYEFSNFSTRSTIERYKKASASTSGSAPVIDVNSQYFQQEAAKMRHQIQTLQNANRHLIGESIGNMTAKELKSLENRLEKGISRIRSKKHELLFSEIEYMQKREADLQNENMFLRAKVSYPYTVNNHDLHTCLVGGAKVGLNFSSSHKNISFIETYIFVRETKFSPSSQTPLIYI

SEQ ID NO: 5747 - protein, 149 aa, Solanum tuberosum
MADQLTEDQISEFKEAFSLFDKDGDGCITTKELGTVMRSLGQNPTEAELQDMINEVDADGNGTIDFPEFLNLMARKMKDTDSEEELKEAFRVFDKDQNGFISAAELRHVMTNLGEKLTDEEVDEMIREADVDGDGQINYDEFVKVMMAK

SEQ ID NO: 5748 - protein, 82 aa, Brassica rapa
PKELRNLEGRLDRSVNRIRSKKNELLFAEIDYMQKREVDLHNDNQLLRAKIAENERNNPSMSLMPGGSNYEQIMPPPQTQPQ

SEQ ID NO: 5749 - protein, 593 aa, Saccharomyces castellii
MPRNVIQPNKEKTVDYSSTEYLPNELESPSFNLDATEESRSGLVHRFVDSFKRAQDSTENDLEDGTKPLGDASHLKKAMKSRHVIMMCVGTGIGTGLLVANASGLSYGGPGSLVIGYVLVSFVTYFMIQAAGEMAVAYPTLPGNFNSYTSMFISKPFGFATVWLFFIQWLTVFPLELITASLTIKYWNDKINADVFIVIFYVFLLFIHFFGVKAYGEAEFIFNSCKVLMIAGFIILSIVINCGGAGKDGYIGAKYWRDPGSFAEGDSVEKFKGICYILVTAYFSYGGAELFSLSVNEQENPRKSTPQAAKQSIYRILIIYLLTMILIGFNVPHNNDQLMGSGGSATHASPYVLAASIHGVKVVPHFINAVILISVISVANSALYASPRLMCSLAEQGYAPKFLDYVDREGRPLRALILCAVFGVIGFVSASSKEEEVFTWLAAIAGLSELFTWSGIMLSHVRFRQCMKLHGRSEEEIGFRAVTGIWGSMYGISFNMLVFIAQFWVALAPPSLHGKVDAESFFQSYLAAPIWLFFYFGYMLYKRDFTFLVPLDKIDLNFHRRIYDPELIRQEDEENKEKIKNSSVWVRMFHFWC

SEQ ID NO: 5750 - protein, 250 aa, Oryza sativa
  unsure (1)..(250): unsure at all Xaa locations
MGQNATRPNWSPVYIRPEWHGGPVKTPSLSSTSSPLRLPRRVSPAPATVRRLRLRAMSKYGTIPTSSSSDGPPPGSSSSSPLDFISRAKARGATALAERRPWRELADPRAASVPRGLGGAYRRARANLGHFSMNYAIVVLAVVFLSLLWHPVSLIVFLACMVAWLFLYFLRDEPLALCGRAVGEGAVLAVLSVLTLVLLLLTGATVNILTSLLVGVVIVLLHAVFHRPADSIDEEAGRCSLWVPLXALPP

SEQ ID NO: 5751 - protein, 463 aa, Listeria innocua
MNSLFRRKPIEDLMHNKSGSTHLKQTLGPLDLTLLGVGAIVGTGIFILPGTVAAKNAGPAIIFSFVIAAIVCAIAAMCYSEFASSVPVAGSAYTYGYVVFGELIGWLLGWALILEYGLAVASVASGWSSYLNALLSGFHISIPEAVSGPFNPEVGTFINLPAIIIVLVIAFLLTLGIKESTRVNTIMVAIKVGVILLFLVVGVFYVKPDNWQPFMPFGISGVMNGAALVFFAYLGFDAVSSAAEEVKNPQRTMPIGIIGSLLICTILYVAVSAVLTGMVPYTDLNVTDPVAYALQVINQDWVAGIVSLGAVVGMITVILVMSYGATRLIFAMGRDGLLPKVLAEINQKYQTPVKNTWIFAFIVAIISGLVPLDRLAELVNIGTLLAFMMVSIGIIFLRKNKSIQQSGFKVPFYPVLPIISFLLCAFLISRLSVHTWILCGIWFVIGLIVYFAYGRKNSELLKK

SEQ ID NO: 5752 - protein, 228 aa, Gossypium nelsonii
FTSLCHTDVYFWEAKGQTPLFPRIFGHEAGGIVESVGEGVTHLKPGDHVLPVFTGECGNCRHCKSKESNMCDLLRINTDRGVMLSDGKTRFSINGKPIYHFVGTSTFSEYTVAHVGSVAEINPAAPLDKVCILSCGISTGLGAALNVAKPTKGSTVAIFGLGAVGLAAAEGARIAGASRIIGVDLNPNRFEEAKKFGCTEFVNPNDHNKPVQEVLAEMTNGGVDRSVE

SEQ ID NO: 5753 - protein, 462 aa, Vibrio parahaemolyticus RIMD 2210633
MSNQHQYFGHPRGLFLLFGTELWERFSYYAMRAILVLYLTDTTMNGGLGWSTKDALDLYGIYTGLVYITPLIGGYLADNYLGQRRSILLGGALMAIGQFTLALPADALGFGALHTFYLGLALLICGNGLFKPNISTMVGDLYNEGDNRRDGAFTIFYMGINLGALLAGVVSGSVTNSFGWKAGFVAAGVGMIISLVMQMSLSQSWLGDIGREPAAKRDLNNKNAKTKQPLTKEEVDRIKVILVMSLFTIVFWAGFEQAGGLMNIYTQQYTDRMIGGFEVPAAWFQSLNPFFIITLAPVLAVLWVKLGKREPNSPAKFALAMFFLALGFLCMVGAVMEQGGDTNVKTSMLWLVGAFFFHTLGELCLSPIGLSLVTKLAPLRLASLMMGAWFGCNAIANYVAGYVGSHVGELGAMAIFSGIAVTALISGVILMLFSNTLVRWMHGAENTHSTAEQIEEQQTQVA

SEQ ID NO: 5754 - protein, 160 aa, Pseudomonas putida KT2440
MSAFHDLKLEALNGGELPLAPFKGQVVLVVNVASKCGLTPQYKALENLYQIYKDKGFNVLGLPCNQFAGQEPGSEKEIQDFCSLNYGVSFPLGSKLEVNGPQRHSLYRLLAGEGAEFPGDITWNFEKFLVGKDGRVLARFSPRTAPDDPAVVQAIEKALA

SEQ ID NO: 5755 - protein, 152 aa, Glycine max
MSHGLEMLWANIKDGYLEAVLRGHRSGLLTVADYNNLCQCETLEDIKLNLTASDYGPYLANEPSPLHTTTIVEKCTEKLVDDWNRMRCQADEALGRFMDYCTYGHMIDNVVLIVTGTLHERDVQELLDKCHPLGMFDSIATLAVAHNMRELY

SEQ ID NO: 5756 - protein, 600 aa, Glycine max
MVGASWFRTLWKTQRKDDTNSEKAVIGVLAFEVASLMSKLVNLWQSLSDKQVAKLREEITNSVGIRKLVSEDENFIVRLISLEMLENMAHVAESVARFGKKCSDPSLKDFENAFDELITFGVDPYRWGFTFKKMEKKVKRMEKFISTNATLYQEMELLADLEQTLGRMKAYTESDGPNLIDYQKKVAWKGLEVKNLKANSLWNRTYDYTVLVLARSLFTIFSRINNVFGIQEIIDIGKTKNRSALNSDHANGSRSVSELLQPSVQPSSKVRARFASGPLGDFAATSRPNAQVNKASMFPSDGGGSSTKSGLISAKNRSLKFFSGPLGKNSKKPVPDNGTNKNSKIWNFHGNSTTANGKEIHTRQSRLTQVEPFKGFVPADSSSVIDSHSSPNDVHLAIRNPNEPKANLVTPGKEVHRPQSTFNYLCRLKPPSESLGAASLALHYANVIIMIEKLATSPYLIGVDARDDLYNMLPRRLRSALRTKLKPYSKAMAAAVYDAGLADEWTEAMTGMLEWLAPLAHNMLRWQSERSYEQHCFVSRANVLLVQTLYFASQEKTEAIITELLVGLNYVWRYAKELNKKALLDCGSDGVDNGYSQLNG

SEQ ID NO: 5757 - protein, 125 aa, Rickettsia sibirica
MLIISYKGVTPRIDKSAYIAESSSLIGDVEIGSNSSIWFNTVLRGDVASIKIGNNTNVQDGSVIHASRFNGPVEIGDNITIGHLSLIHACTIHNNAFIGMSATIMDYAVIEEYAFIAAGPAKEDN

SEQ ID NO: 5758 - protein, 458 aa, Glycine max
MVRENAVMGGASEERGVRVTRAMARAVLGGVSASSRPSFKKQHKNNKGFGRVALADVTNISKKGCATSKSQARGGYKKTNTKGASNVSIQVLSTQEDVRAKLAKDLPSISMVQSHDANVAERQEGTEVVQPSMSVMAGPLLSMQDSMKSDEILRSPNKDVDMMITEKLKLSDGLDIVDIDSVELKDPQVWSSYAPDIYNSIFVREFERRPSSDYMDMLQQDITPSMRGILIDWLVEVSEEYKLLPDTLYLTVNLIDRSLSQSLVQKQRLQLLGVTCMLIASKYEEICAPRVEEFCFITDNTYTKAEVLKMESEVLNLLHFQLSVPTTKTFLRRFILASQSSYKVSYVELEFLANYLAELTLVEYSFLQFLPSLIAASAVLLARWTLNQSEHPWNSTMEHYTNYKVSELKTTVLALADLQHDMKGCSLNSIREKYKQQKFRSVANLSPKPVQSLFKAQV

SEQ ID NO: 5759 - protein, 198 aa, Oryza sativa
  unsure (1)..(198): unsure at all Xaa locations
XGNIKRXWTTPHHHEDCDAAFSGEQGRHKLANIASLLKKLQQLSVNKDEAPPVDHIAFLCETPSPDHRYVSEILLASGLLMKDLGSGLSQMQLHTSGYPINPDLFFVLEQRKSGWTSKPEGIHQSRSTTNKRAHRKLMFEAVNELLLDKFEKXXTTLITGVAARDPVMSSGQQLVKMICSGIECLKTERSRMCQEDSS

SEQ ID NO: 5760 - protein, 745 aa, Cytophaga hutchinsonii
MKHLYFFTGIFFLSVTCVAQTDSIENKIHALVKKMSLDEKIGQTCLKGTSSRSKGLSEELKEQVRKGLVGAILNLTDTALVLQIQRIAVEESPNHIPLLFGRDVIHGYKTIFPIPLGLAASWDSVLVEKTAMIAAQESYSRCINWTFAPMVDICRDARWGRIAESPGEDPYLASVLARAYINGFQGNNPAQPGRILACSKHFAAYGAAEGGRDYNTVSMSRSTLWNMYLKPFHASVQAGAATFMTSFNDLNGVPASGNAYLLKDVLRNQWKFPGFVVSDWNSVTEMITHGYCTDEKDAALKAFSAGLDMEMTSQAYAHHLKTLIAEKKITEQQLDELVKNILRIKLYAGIFENPYFKEKEKFTLLDSAALTLAKKSAVKSFVLLKNHNNTLPLAATKKIAVIGPLAEAPKEQLGTWIFDGDKTNSQTPLAALKKMYGAENIKYVQGLTHSRDESHDDFNAAYKAAKKSDVVLFFAGEEAILSGEAHSRADIRLPGAQERLIRKLHKAGKPIVLVIMAGRPITIEHILPNVSAVVMAWHPGTMAGPALADVLSGKENFSGRLPVTWPKTVGQIPIYYNHTNTGRPADSVSFVGIKDIPIEAWQSSLGNNSHYLDAGYTPQYPFGYGLSYTKFVCTNSSIEKNTLTVKDSLIVTLSVSNAGSRSGIETIQLYVQDVTASLVRPVRELKAFAQVELKAGETKTVRFAVAVSELGFYNNEGIYVIEPGAFNLWVAQDAAGGMKQSFEIK

SEQ ID NO: 5761 - protein, 457 aa, Salmonella typhimurium LT2
MMDSQQHGEQLKRGLKNRHIQLIALGGAIGTGLFLGSASVIQSAGPGIILGYAIAGFIAFLIMRQLGEMVVEEPVAGSFSHFAYKYWGGFAGFASGWNYWVLYVLVAMAELTAVGKYIQFWYPEIPTWASAAAFFVIINAINLTNVKVFGEMEFWFAIIKVIAVIAMILFGAWLLFSDTAGPQATVRNLWEQGGFLPHGWTGLVMMMAIIMFSFGGLELVGITAAEADNPEQSIPKATNQVIYRILIFYIGSLAVLLSLLPWTRVTADTSPFVLIFHELGDTFVANALNIVVLTAALSVYNSCVYCNSRMLFGLAQQGNAPKALLNVDKRGVPVSSILVSAVVTALCVLLNYLAPESAFGLLMALVVSALVINWAMISLAHMMFRRAKQQQGVKTRFPALFYPFGNVLCLLFMAAVLIIMLMTPGMAISVWLIPVWLLILGVGYLCKEKTAKTVKAH

SEQ ID NO: 5762 - protein, 198 aa, Zizaniopsis villanensis
GQTPVFPRIFGHEAGGIVESVGEGVTDLAPGDHVLPVFTGECKECPHCKSPDSNMCDLLRINTDRGVMIGDGKSRFSINGKPIYHFVGTSTFSEYTVMHVGCVAKINPEAPLDKVCVLSCGISTGLGATINVAKPPKGSTVAIFGLGAVGLAAAEGVRIAGASRIIGIDLNPNRFEEARKFGCTEFINPKDHDKPIQQ

SEQ ID NO: 5763 - protein, 356 aa, Vigna aconitifolia
MSLLSDLINLNLSDTTEKIIAEYIWIGGSGLDLRSKARTLPGPVSDPSKLPKWNYDGSSTGQAPGEDSEVIIYPQAIFKDPFRRGNNILVMCDAYTPAGEPIPTNKRHNAAKIFSHPDVVAEEPWYGIEQEYTLLQKDVNWPLGWPVGGFPGPQGPYYCGAGADKAFGRDIVDAHYKACLYAGINISGINGEVMPGQWEFQVGPAVGISAGDELWVARYILERITEIAGVVLSFDPKPIKGDWNGAGAHTNYSTKTMRNDGGYEVIKSAIEKLGKRHKEHIAAYGEGNERRLTGRHETADINTFLWGVANRGASIRVGRDTEKAGKGYFEDRRPASNMDPYVVTSMIADTTILWKP

SEQ ID NO: 5764 - protein, 494 aa, Spinacia oleracea
MAASAMGVLQEREVFKKYWIEHSVDLTVEAMMLDSQASDLDKVERPEVLSMLPPYEGKSVLELGAGIGRFTGELAEKASQVIALDFIESVIKKNESINGHYKNVKFMCADVTSPSLNISPNSVDIIFSNWLLMYLSDEEVERLVERMLKWLKPGGYIFFRESCFHQSGDHKRKSNPTHYREPRFYTKIFKECHMQDDSGNSYELSLIGCKCIGAYVKSKKNQNQISWLWQKVDSEDDKGFQRFLDSSQYKFNSILRYERVFGPGYVSTGGLETTKEFVSKLDLKPGQKVLDVGCGIGGGDFYMAENYDVEVVGIDLSINMISFALERSIGLKCAVEFEVADCTKKDYPENSFDVIYSRDTILHIQDKPALFRSFHKWLKPGGKVLISDYCKSAGTPSAEFAAYIRQRGYDLHDVKAYGKMLKDAGFVEVIAENRTDQFIQVLQKELDALEQEKDDFIDDFSEEDYNDIVDGWKAKLVRTTEGEQQWGLFIAKKM

SEQ ID NO: 5765 - protein, 595 aa, Oryza sativa (japonica cultivar-group)
MADRVFNQSSATIGAAGGYWSSYYCYKVSDQLSQSCGHEFAMLAKVKVKEEAAMAREQALLLTEIVNRGVEPSGPDAGSPTFSVRVRRRLPDFLQSVNLKYVRLGYHYLISHGVYLATIPVIVLVCGAEVGSLSRDELWRKVWGEATYDLATVLAFLAVLAFTISVYIMSRPRPVYLIDFACYKPADELKVSKAEFIDLARKSGKFDEDSLAFQSRLLAKSGIGDESYMPRCVFEPGTNCATMKEGRAEASAAMFAALDELFDKCRVRPKDVGVLVVNCSLFNPTPSLSAMIVNHYKMRGNILSYNLGGMGCSAGVIAVDLARDMLQASGAGLAVVVSTEAVSFTWYAGKRRSMLIPNAFFRAGCAAVLLSNRRRDFHRAKYQLEHIVRTHKGADDRSFRSVYQEEDEQRIKGLSISRDLVEVGGHALKTNITTLGPLVLPFSEQILFFAGVLFRHLFPSKTSAPPPPSADGDASAAAPYIPDFKRAFEHFCMHAASRDVLEHLQGNLGLRDGDLEASRAALHRFGNTSSSSIWYELAYLEAKGRVRRGDRVWQLAFGSGFKCNSAVWRAVRRVRRPARSPWLDCVEQYPARMNA

SEQ ID NO: 5766 - protein, 250 aa, Zea mays
MAKNYPTVSAEYSEAVEKARRKLRALIAEKSCAPLMLRLAWHSAGTFDVSSRTGGPFGTMKHQSELAHGANAGLDIAVRLLEPIKEEFPILSYADFYQLAGVVAVEVTGGPEIPFHPGREDKPQPPPEGRLPDATKGSDHLRQVFGKQMGLSDQDIVALSGGHTLGRCHKERSGFEGAWTTNPLVFDNSYFKELLSGDKEGLLQLPSDKALLSDPVFRPLVEKYAADEKAFFDDYKEAHLKLSELGFADA

SEQ ID NO: 5767 - protein, 92 aa, Olea europaea
FNGCMSTGPHFNPVGKEHGAPGDENRHAGDLGNITVGEDGTAAINIVDKQIPLTGPHSIIGRAVVVHSDPDDLGRGGHELSKRTGNAGGRTG

SEQ ID NO: 5768 - protein, 772 aa, Ruminococcus albus
MIINLLKRRIKVMDIAHIMEIMTLEEKASLCSGADFWHTKAIERLDIPQIMVSDGPHGLRKNVDGSNDPNEAIEAVCFPTAAALACSYDRELLKDIGKALGEECQSEKVSVILGPGCNIKRSPLCGRNFEYFSEDPYLASQMAISHIKGVQSKGAGTSLKHFAANNQEHRRMSVSAEIDERTLHEIYLAAFESVIKEAKPWTVMCSYNKINGEYSSQNKSLLTDTLREKWGFDGLVMSDWGAVDDRVKGIEAGLDLEMPGSMCKNDKMILKAVEDGKLSVEALDKCVKRILELIDKSLECRTEMDWDKERHHQLAQKAAEKSAVLLKNDDHILPLSKNEKIAFIGAFAEQPRYQGGGSSHINSFRTVSALEAVDGWENITYAKGFSLDNDEINTELEQQAVEAAMNADKVVVFAGLPDSFESEGFDRKHMQLPQCQIDLIDKLSEVNPNIVVVLHNGAPVEMPFANGDEDSNSVKAILEMYLSGQAAGEAVVRILFGEVNPSGKLAETFPLRLEDNPSYLNFPGEADIVKYSEGIFVGYRYYEKKNMEVLYPFGHGLSYTEFEYSDIKISSYEISDKKAFTVEMTVTNSGSRDGEEIIQLYIEPLTPTVIRPIKELKGFEKVFLKAGESKRVVFRLDSSAFAYYSDKIHDWLSESGYYNILIGKSSADICLEEQVHFNSSVRIPILFTLDNTVSDINSTAEGKKLFKDMMSTVFATANGGADQLGDSAREMEMAIANDLPLHAMVSFTDNPDITREKLQMMLDKLNVIINSK

SEQ ID NO: 5769 - protein, 251 aa, Zea mays
MASAAGGGAAGEGEWLKVSQLRPMVEAQDPNAKAVDNLTLRRFLRARDHDVDKASAMFLKFLKWRREAAPGGSVPEEQVRRELSQDKLCMGGVDRAGRPILVAFAARHFSAGRDMAEFKSFVVYFFDKICARIPRGQEKFLCIVDLKGWGYSNCDVRAYIAAIEILQNYYPERLGKALMIHVPYIFMKAWKMIYPFIDTNTRDKFVFVEDKSLQETLRREIDEGQLPEFLGGKMDVIPLKDYGVQQQPQAV

SEQ ID NO: 5770 - protein, 251 aa, Zymomonas mobilis
MRFQDKIVVITGGGNGMGKAAAERFSSEGAIVVLADWQIKDAEEVAASLPKDRAWPYKIDVSDPDAVKKMMDDIAAKYGKIDVLVNNAGILIPGKIMDASIEDWKKISSVNIDGVIYCAKFAMPYLVKSKGCIVNTASVSGLGGDWGMVYYCTTKGAVVNFTRALALDSGVNGVRVNSVCPCIVKTKMAANWPESAQAQFKNRVSLGRIPEAEEIASVMAFLASDDARFITGVNLPVDGGATASDGQPHLG

SEQ ID NO: 5771 - protein, 265 aa, Magnetococcus sp. MC-1
MVLKIWLHWQSCCKVKEYKSMQNRVAIVTGSTAGIGQEAAKLLAKRGCRVVITGTRETKIMETVEAIRAEGGVAAGVAANIGVDADLDKLVAFAQEQFGEVEILVNNAGITRDNLFMRMKDEEWDEVMALNLTSVFKLSKRVIRAMMKGRYGRIVNVTSVVGFSGNAGQANYTAAKAGLVGFTKSLAQEVATRGITVNGVAPGFIQTAMTDKLNEKTQEAILAQIPMGKMGSVEDIAAAIAFLASDEARYITGETIHVNGGMYMG

SEQ ID NO: 5772 - protein, 149 aa, Achlya klebsiana
MADQLTEEQIAEFKEAGSLFDKDGDGTITTKELGTVMRSVGQNPTEAELQDMINEVDADGNGTIDFPEFLTMMARKMKDTDSEEEILEAFQGFDKDGNGFISAAELRHMMTNLGEKLTDEEVDEMIREADIDGDGQINYEEFVKMMMSK

SEQ ID NO: 5773 - protein, 751 aa, Geobacillus stearothermophilus
MENQNRQNAAQCPFHGSVTNQSSNRTTNKDWWPNQLNLSILHQHDRKTNPHDEEFNYAEEFQKLDYWALKEDLRKLMTESQDWWPADYGHYGPLFIRMAWHSAGTYRTGDGRGGASTGTQRFAPLNSWPNNANLDKARRLLWPIKKKYGNKISWADLFILAGNVAIESMGGKTIGFGGGRVDVWHPEEDVYWGSEKEWLASERYSGDRELENPLAAVQMGLTYVNPEGPDGKPDPKAAARDIRETFRRMGMNDEETVALIAGGHTFGKAHGAGPATHVGPEPEAAPIEAQGLGWISSYGKGKGSDTITSGIEGAWTPTPTQWDTSYFDMLFGYDWWLTKSPAGAWQWMAVDPDEKDLAPDAEDPSKKVPTMMMTTDLALRFDPEYEKIARRFHQNPEEFAEAFARAWFKLTHRDMGPKTRYLGPEVPKEDFIWQDPIPEVDYELTEAEIEEIKAKILNSGLTVSELVKTAWASASTFRNSDKRGGANGARIRLAPQKDWEVNEPERLAKVLSVYEDIQRELPKKVSIADLIVLGGSAAVEKAARDAGFDVKVPFFPGRGDATQEQTDVESFAVLEPFADGFRNYQKQEYSVPPEELLVDKAQLLGLTAPEMTVLVGGLRVLGANYRDLPHGVFTDRIGVLTNDFFVNLLDMNYEWVPTDSGIYEIRDRKTGEVRWTATRVDLIFGSNSILRSYAEFYAQDDNQEKFVRDFINAWVKVMNADRFDLVKKARESVTALQYDSSDRSSAAIDLQ

SEQ ID NO: 5774 - protein, 359 aa, Salmonella typhimurium
MSKNYHIAVLPGDGIGPEVMAQALKVMDAVRVLICVYHSHYDVGGIAIDSSGIPLPKATVEGCEQADAILFGSVGGPKMGKFAPGKPAGARRLLPLRKHFKLFSNLRPAKLYQGLEAFCPLRADIAANGFDILCVRELTGGIYFGQPKGREGSGQYEKAFDTEVYHRFEIERIARIAFESARKRRCKVTSIDKANVLQSSILWREIVNDVAKTYPDVELAHMYIDNATMQLIKDPSQFDVLLCSNLFGDILSDECAMITGSMGMLPSASLNEQGFGLYEPAGGSAPDIAGKNIANPIAQILSLALLLRTADANDAATAIEQAINRALEEGVRTGDLARGAAVSTDEMGDIIARYVAEGV

SEQ ID NO: 5775 - protein, 327 aa, Nostoc punctiforme
MAETLFFNALREAIDEEMARDSSVFVLGEDVGHYGGSYKVTKDLYQKYGELRILDTPIAENSFTGMAVGAAMTGLRPIIEGMNMGFLLLAFNQISNNAGMLRYTSGGNFKIPMVIRGPGGVGRQLGAEHSQRLETYFQAVPGLKIVACSTPRNAKGLLKSAIRDDNPVLFFEHVLLYNLKEDLPEEEYLLPLDKAEVVRQGKDVTIITYSRMRHHVLQAVKTLEKQGYDPEVIDLISLKPLDFDTIGASVRKTHKVIVVEESMRTAGIGAEVIASINDRLFDELDAPVLRLSSQDIPTPYNGNLERLTIIQPEQIVEAVEKMVALRV

SEQ ID NO: 5776 - protein, 171 aa, Oryza sativa
  unsure (1)..(171): unsure at all Xaa locations
XRAAGIGTRQVMENLETLANLQELWLGRNRIKTINLCGLKAIKKLSLQSNRLTSMNGLQECIALEELYLSHNGIQKMGGLSTLQNLRVLDVSSNKLTAIEDVETLSRLEDLWLNDNQIPSLDGIESALASSREKLTTIYLERNPCAKAPNYSSTLKTIFPNLEQLDSDMLA

SEQ ID NO: 5777 - protein, 266 aa, Synechococcus sp. PCC 7942
MGKLDNQIALVTGSSQGIGQEIAIRLASEGASVVIDYRSHPEGAEETRKQVEAAGAQCHLAKDHAPEGYVVQADLGDVTQVRNLVAESIKHFGKLDILVNNAGMERRAPFWEVTEADYDMVLNVNLKGAFFAAQALVQHLLETKRPGKIINISSVHEELPFPNFASYCLSKGGIKMMTRDLAVELGEYGITINNVAPGAIETPINTNLLNNPTELNALLGNIPLKRLGKPKDIASLVLFLASPDADYITGTTIFADGGLLWNYHEQ

SEQ ID NO: 5778 - protein, 517 aa, Zea mays
LSSQSPITPAAQRAETGDALPSPHPPLVSWRRLGGCRCRCRPTSGGQVVLGHFAGDEYHKAVDTFSGIRGSMSNYYDDYDDIDEMEDDYDMDDPIDDMVDEQQGIRDSDAEDNDYGQPNDKIPDTSSADARKGRDIQGIPWEQINITRKKYRQSRLEQYKNYENVPNSGEEAMKDCKPTEKGGIYYEFRRNTRSVKSTILHFQLRNLVWATSKHDIYLVSHYSIRHWSALSGVDTELINVQGHVAPREKHAGSLLEGFYQTQVSTLTVKDNLLVAGGFQGELICKHLDQEGISFCCRTTYDDNAITNAVEIFNTSSGAVHFMASNNDSGVRYYDMERFQLFKHFQFEWPVNHASLSPDRKVVVIVGDDPDGLLIDANSGKTVHSIKGHRDYSFASAWSPDGRTFATGNQDKTCRIWDVRNLSKSVHVLRGNLGAIRSIRFTSDGQFMSMAEPADFVHIYDVKSDYNKRQELDFFGEISGTSFSPDTDTLFVGVWDRMYGSLLQFGRLYNYSYLDSLF

SEQ ID NO: 5779 - protein, 751 aa, Geobacillus stearothermophilus
MENQNRQNAAQCPFHGSVTNQSSNRTTNKDWWPNQLNLSILHQHDRKTNPHDEEFNYAEEFQKLDYWALKEDLRKLMTESQDWWPADYGHYGPLFIRMAWHSAGTYRIGDGRGGASTGTQRFAPLNSWPDNANLDKARRLLWPIKKKYGNKISWADLFILAGNVAIESMGGKTIGFGGGRVDVWHPEEDVYWGSEKEWLASERYSGDRELENPLAAVQMGLIYVNPEGPDGKPDPKAAARDIRETFRRMGMNDEETVALIAGGHTFGKAHGAGPATHVGPEPEAAPIEAQGLGWISSYGKGKGSDTITSGIEGAWTPTPTQWDTSYFDMLFGYDWWLTKSPAGAWQWMAVDPDEKDLAPDAEDPSKKVPTMMMTTDLALRFDPEYEKIARRFHQNPEEFAEAFARAWFKLTHRDMGPKTRYLGPEVPKEDFIWQDPIPEVDYELTEAEIEEIKAKILNSGLTVSELVKTAWASASTFRNSDKRGGANGARIRLAPQKDWEVNEPERLAKVLSVYEDIQRELPKKVSIADLIVLGGSAAVEKAARDAGFDVKVPFFPGRGDATQEQTDVESFAVLEPFADGFRNYQKQEYSVPPEELLVDKAQLLGLTAPEMTVLVGGLRVLGANYRDLPHGVFTDRIGVLTNDFFVNLLDMNYEWVPTDSGIYEIRDRKTGEVRWTATRVDLIFGSNSILRSYAEFYAQDDNQEKFVRDFINAWVKVMNADRFDLVKKARESVTALQGSNYPRSRITKDLQ

SEQ ID NO: 5780 - protein, 348 aa, Glycine max
METRAAAKRKANAAIVVVVEKQHPKRQRVVLGELPNLQNLIVSKIQNPRKEKLQCRKNPNANKPSPTNNTLSSPQLDGSYVSDIHEYLREMEMQKKRRPMVNYIEKFQKIVTPTMRGILVDWLVEVAEEYKLLSDTLHLSVSYIDRFLSVNPVTKSRLQLLGVSSMLIAAKYEETDPPSVDEFCSITDNTYDKAEVVKMEADILKSLKFEMGNPTVSTFLRRYANVASDVQKTPNSQIEHLGSYIGELSLLDYDCLRFLPSIVAASVIFLAKFIIWPEVHPWTSSLCECSGYKPAELKECVLILHDLYLSRKAASFKAVREKYKHQKFKCVANLPTPPYVPSCYFEDQ

SEQ ID NO: 5781 - protein, 178 aa, Zea mays
IVPHPHAAPPPAKKSRRGPRSRSSQYRGVTFYRRTGRWESHIWDCGKQVYLAPHPISNGLANRFTEFFVMAYDRAAIKFRGVDADINFNLSDYEDDMKQMGSLSKEEFVHVLRRQSTGFSRGSSRYRGVTLHKCGRWEARMGQFLAKKAYDKAAIKCNGREAVTNFEPSTYHGELPTE

SEQ ID NO: 5782 - protein, 271 aa, Triticum aestivum
MGIVEEAHNLRVVGEGKRGVIVLAHGFGTDQSVWKHLVPHLVADYRVVLFDTMGAGPTNPDYFDFSRYATLEGYALDLLAILEELGIASCIYVGHSVSAVIGVLASISRPDLFSKLVLLSASPRYLNDVDYYGGFEQEELDELFEAMRSNYKAWCSGFAPLCVGGDLESVSVQEFSRTLFNIRPDIALSVAQTIFQSDVRTLLPLVSVPCHIVQSTKDLAVPVVVSEYLHKHLGGDSIVEVMPSEGHLPQLSSPDIVTPVLLRHIQHDIAF

SEQ ID NO: 5783 - protein, 374 aa, Rhodobacter sphaeroides
MKITAAVLERDGIAGNYAEERPLAIRELDLAEPGPGEVLIRVAAAGICHSDLSVINGTRRRPLPMVLGHEASGHVEALGEGVEDLEHGDHVVCIFAPGCGRCTPCAEGRPALCEKAARHHAVGELMTGHRRLSLGGRSVHHHLGISGFATHAVVARPSLVRVPREVPPHVSALFSCAMLTGAGAVFNTAQIRPGSKVAVVGLGGVGLSAILGAAAAGAAEIVAIDPFPAKMEAARAMGATLSVPADGDTVAAVRDLTAGGVDYAFELAGSVRALETAFAVTRRGGMTVTAGLPHPDDRMSLEALKLVAEERTLKGSYIGSCVPQRDLPRMLALHRRGLLPVEKMLTHRLKLDEINLAMDRLAKGSAIRQVVDLG

SEQ ID NO: 5784 - protein, 501 aa, Staphylococcus aureus
MNFDWIKTRSDFDDDKPAVIDHAKQTSWTYQQLNARADNMAHYLTSQGVKKGDVIGIFAPNDIAILDLLFACFKTGAVFLPLNWRLNPKEIAAIVEDAQLKLLFYAEKHLSSLTDIDQNLLHMDIDVAQYDEIVNPDYHQPFQATPVEPQDLAALIYTSGTTGSPKGVMFSYESFVHNGANLELTYKFNSNYITIVSTPMFHVLGFNDTVLPVLMSGGTLILQRYFNGEELNDMIAQYHPTFIIMIPTMYYSTLRASNFNPENFRAMDYIIQGGSQPLPSIQAAFKQYGINIINGYGLTEAPLVLVNTPENSKRKPMSIGKAVMFVDARILDDNGEEVPTGEIGELAIKAKNVTPGYWNKPAETAKAFHGRYLLTGDLAKMDNDGDIFIIDRKKELIITGGENVLPSEVENALAEHPLVDRCVVVGYDHPKYGESIAAAIILREDEPHYAEILNQHMRSRLAGYKVPRMYVPVTHMPLNSTQKPDKLAIRQMMNDKVSQTL

SEQ ID NO: 5785 - protein, 237 aa, Pyrococcus abyssi
MIAQGMSMLLMLAMPLLGYLAYRAKALDLKGSLAAIFLGYGIVILGGYVPFFALLTFLILGTIATKLKWKEKKALGVNEDSCRSIGNVLGNGLSPLLFVMLEALVKRDWGWAGVFSAIATANADTLASEIGKVFGRNPILITNFRRAKVGESGAVSSVGELVALVGSFLIALISTLVSDNKVPMLFSVTLAGFIGANVDSLVGATLEKKGYVDNNGTNFIATFVGGIIGILIFLLLE

SEQ ID NO: 5786 - protein, 129 aa, Zea mays
MAKYNVVQKNKRQCNQDRKRAAHGEPGTGKLKQRTAPVSMSGKRKKKLERRLNRKQKEAAMIKALENNMGDVDMVSVEESSEAAKGKSQVKFSVKKNSRIQIKRLKGKGTTVLKLIVIHQLKHHFPSWT

SEQ ID NO: 5787 - protein, 371 aa, Hordeum vulgare
MGLLSKKLLVASMVAAVLAVAAVELCSAIPMEDKDLESEEALWDLYERWQSAHRVRRHHAEKHRRFGTFKSNAHFIHSHNKRGDHPYRLHLNRFGDMDQAEFRATFVGDLRRDTPAKPPSVPGFMYAALNVSDLPPSVDWRQKGAVTGVKDQGKCGSCWAFSTVVSVEGINAIRTGSLVSLSEQELIDCDTADNDGCQGGLMDNAFEYIKNNGGLITEAAYPYRAARGTCNVARAAQNSPVVVHIDGHQDVPANSEEDLARAVANQPVSVAVEASGKAFMFYSEGVFTGDCGTELDHGVAVVGYGVAEDGKAYWTVKNSWGPSWGEQGYIRVEKDSGASGGLCGIAMEASYPVKTYNKPMPRRALGAWESQ

SEQ ID NO: 5788 - protein, 789 aa, Glycine max
  unsure (1)..(789): unsure at all Xaa locations
MQQSDQTVLSLRPGGGRGSRLLAPRFDSSSSSSASPAFGSFSADLPLLRPHAGAPSPFSIKAGDARFEGRERVRYTREQLLQLKEGVEILDDVLKIKQDIEAELFGEDQSWARPENNPTQQFQNRYTEPDNRDWRGRSGQLSGNADERSWDNLKENREFGNTSNRQDQLNSQFARTQISSNQGGGPTPTLVKAEVPWSARRGTLSDKDRVLKTVKGILNKLTPEKFDLLKGQLIDSGITSADILKGVISLIFDKAVLEPTFCPMYAQLCSDLNEKLPPFPSDEPGGKEITFKRVLLNICQEAFEGADKLREELRQMTAPDQEMERRDKERLVKIRTLGNIRLIGELLKQKMVPEKIVHHIVQELLGPPDIKVCPAEENVEAICQFFNTIGKQLDESPKSRRINDMYFIRLKELSTNPQLAPRLRFMVRDVLDLRSNNWIPRREEVKAKTITEIHSEAEKNLGLRPGATASMRXNRVXPGALGNTSPGGFPIARPGTGGLMPGMPGTRRMPGMPGIDNDNWEMPKTRSMPRGDMSGMQTGGHSQSPFLSKTSTVNSRLLPQGSGGIISGRSSALVHGAGAPSAARPPNLGFSAEPTPQIPSPVKAVSAIPAEKPQPPAAKLNFDELQRKTVSLLEEYFNVRLLDEALQCVEELKAPAYYPEFVKEAISLALDKSPPCAEPVANLFEYLFIKKILSARDIGTGCMLFASLLDDIGIDLPKAPNNFGEIIGKLVLAGGLDFKVVTEILKKVEDDRFQKAIFSSALQVITSASGQAVLDAQASDIEACQSLFN

SEQ ID NO: 5789 - protein, 394 aa, Xylella fastidiosa Dixon
MTKPIRNVAVLGATGSIGAAALDVLARHPRQFHVSLLAAGQRVDALLALCHTYRPDHAVIGDATLYTTLRDGLNAAGLATKAYAGEAALAELVASTTCDTVVAAIVGAAGLHSTLAAARAGKRLLLANKESLVLAGMLLMREASISGAEIIPIDSEHNAIFQCLRSRTTDGVHRVTLTASGGPFRGHNRTMLAKITPTQAMAHPTWSMGPKISVDSATLMNKGLEVIEAHHLFGLPSEQIDVLVHPQSLVHSLVEFIDGSTLAQLSLPDMRTTLAVGLAWPERIGSGVPGLDLMKHNRLDFEHPDTETFSCLRLARDAMQTGGTAPAVLNAANEIAVSAFLQGRIGFLTIPALIEHALTTLPRYEADTLETLLTVDTETRRITHAALTHFPLPL

SEQ ID NO: 5790 - protein, 400 aa, Pseudomonas chlororaphis
MEDLLKRVLSCEAFQQPQWSEPSQLHDAQAYLRDSASLIRVEDILVLRATLARVAAGEAMVIQSGDCAEDMDESTPDHVARKAAVLDILAGTFRLVTQQPVVRVGRIAGQFAKPRSNNNERIGDVELPVYRGDMVNGREAVCGHRQHDAQRLVRGYSAARDIMQHLGWKASASQEQLSGSPAWTNHEMLVLDYELPQLRQDEQGRVFLGSTHWPWIGERTRQLTGAHVTLLSEVLNPVACKVGPDITQDQLLSLCERLDAKREPGRLTLIARMGAQKVAERLPPLVEAVRQAGHKIIWLSDPMHGNTIVAPCGNKTRMVQAITEEIAAFKHAVTSAGGVAAGLHLETTPDDVSECASDAAGLHQVASRYKSLCDPRLNPWQAITAVMAWKNQPSSTLASF

SEQ ID NO: 5791 - protein, 185 aa, Triticum aestivum
GPEFRGISNPVGIKVSDKLDSSELVKLCEILNPHNKPGRLTLITRMGAENMRAKLPHMIRAVRQAGLIVTWVSDPMHGNTISAPCGLKTRSFDAIRAELRAFFDVHEQEGSYPGGVHLEMTGQNVTECIGGSNTVTFDDLSSRYRTHCDPRLNASQSLELAFAIAERLRRKRDRTWTSLISKVEA

SEQ ID NO: 5792 - protein, 133 aa, Zea mays
  unsure (1)..(133): unsure at all Xaa locations
SQPHLAAKLLALYRATISIIHSVHRLNNNGPVFHAARDDLXSGYGAATAVQESRDAGIGGXDSWKTKKALKNLXYPNHKELNTVLMIIXTIPSVALAGXARHLEERMTEDAMVRSFILQCGDXAESFKEFHAN

SEQ ID NO: 5793 - protein, 356 aa, Avicennia marina
MSLLSDLLNLDLSETTEKIIAEYVWVGGSGMDLRSKARTISGPVSDPSKLPKWNYDGSSTGQAPGEDSEVILYPQAIFRDPFRRGKNILVMCDTYTPAGEPIPTNKRHAAAKIFSHPDVAAEEPWYGIEQEYTLLQKNVKWPMGWPTGGYPGPQGPYYCGVGADKAFGRDIVDAHYKSCLYAGINISGINGEVMPGQWEFQVGPAVGISAGDELWMARYILERITEIAGVVLSFDPKPIQGDWNGAGAHTNYSTKSMRKEGGFEVIKKAIEKLGHRHKEHIAAYGEGNERRLTGRHETADINSFKWGVANRGASVRVGRDTEREGKGYFEDRRPASNMDPYIVTSMIAETTILGKH

SEQ ID NO: 5794 - protein, 322 aa, Leavenworthia stylosa
  unsure (1)..(322): unsure at all Xaa locations
GQTPLFPRIFGHEAGGIVESVGEEVTDLQAGDHVLPIFTGECGDCPHCHSEESNMCDLLRINTERVGMIHDGESRFSIKGKPINHFLGTSTFSEYTVVHSGQVAKINPEAPLDKVRIVSCGLSTGLGATLNVAKPKKGQSVAVFGLGAVGLGAAEGARIAGASRIIGVDLNSNRFEQAKKFGVTEFVNPKEHDKPVQQVIAEMTNGGIDRSVECTGSVQAMIQAFECVHDGWGVAVLVGVPSKDDASRTHPMXXLXERTLKGTFFGNYKPKPDIPGVVEKYMNKELELEKFITHTVPFSEINKAFDYMLNGEGIRCIITMGA

SEQ ID NO: 5795 - protein, 364 aa, Raphanus raphanistrum subsp. raphanistrum
SSNKTLVSPGGVFEFGFFKLASSSCWYLGIWYKNIPERSYVWVANRDNPLHSSTGTFRISGTNLVLLDQSKNTVWSTNLTRRCVKSPVVAELFDNGNFVMRYSNNSDPSGYLWQSFDFPTDTLLPQMKLGFDLKTGPHRFLRSWRSPDDPASGNYTYKLETRGLPEFFLRSEDFLLYRTGPWNGIRFNGVPEMPRLLDNILTENKEEITYTFRMTNHSIYSKFIITHSGFFQLLTWTPKVQLWNVLWSIPNDQCDLYVLCGPYGYCDTKTSMCNCIKGFKPKGSQAWALGDMSQGCVRKTSLSCGGDGFIRLTKMKLPDTTYAIVDKLVGIKECKKRCLKDCNCTAFANADIRKGGSGCVMWTG

SEQ ID NO: 5796 - protein, 689 aa, Oryza sativa
MAPVEDGGGVEFPVGMKVLVVDDDPTCLAVLKRMLLECRYDATTCSQATRALTMLRENRRGFDVIISDVHMPDMDGFRLLELVGLEMDLPVIMMSADSRTDIVMKGIKHGACDYLIKPVRMEELKNIWQHVIRKKFNENKEHEHSGSLDDTDRTRPTNNDNEYASSANDGAEGSWKSQKKKRDKDDDDGELESGDPSSTSKKPRVVWSVELHQQFVNAVNHLGIDKAVPKKILELMNVPGLTRENVASHLQKFRLYLKRIAQHHAGIANPFCPPASSGKVGSLGGLDFQALAASGQIPPQALAALQDELLGRPTNSLVLPGRDQSSLRLAAVKGNKPHGEREIAFGQPIYKCQNNAYGAFPQSSPAVGGMPSFSAWPNNKLGMADSTGTLGGMSNSQNSNIVLHELQQQPDAMLSGTLHSLDGPPSRSRPPVRSLNTFSASEGLSPNQNTLMIPAQSSGFLAAMPPSMKHEPVLATSQPSSSLLGGIDLVNQASTSQPLISAHGGGNLSGLVNRNPNVVPSQGISTFHTPNNPYLVSPNSMGISKQPPGVLKTENSDALNHSYGYLGGSTPMDSGLLSSQSKNTQFGLLGQDDITGSWSPLPNVDSYGNTVGLSHPGSSSSSFQSSNVALGKLPDQGRGKNHGFVGKGTCIPSRFAVDEIESPTNNLSHSIGSSGDIMSPDIFGFSGQM

SEQ ID NO: 5797 - protein, 152 aa, Zea mays; identical to SEQ ID NO: 2114

SEQ ID NO: 5798 - protein, 95 aa, Oxalis medicaginea
  unsure (1)..(95): unsure at all Xaa locations
LYXGINISGTNGEVMPGQWEYQVGPSVGIEAGDHIWASRYILERITEQAGVVLTLDPKPIDGDWNGAGCHTNYSTKSMRDEGGFEVIKKAILNLS

SEQ ID NO: 5799 - protein, 1137 aa, Glycine max
  unsure (1)..(1137): unsure at all Xaa locations
MSTSRPSQSSSNSGRSRRSARAMALATVDAKLHATFEESGSSFDYSSSVRVSGTADGVNQPRPDKVTTAYLHHMQKGKMIQPFGCLLALDEKTRMHTAXVIAYSENAPEMLTMVSHAVPSVGDHPALGIGTDIKTLFTAPSASALQKALGCADVSLLNPVLVHCKTSGKPFYAIVHRVTGSVMVDFEPVRPYEVPMTAAGALQSYKLAAKAITRLQSLPSGNMERLCDTMVQEVFELTGYDRVMAYKFHEDDHGEVIREITKPCLEPYLGLHYPATDIPQASRFLFRKNKVRMIVDCHAKHVRVLQDEKLPFDLTLCGSTLRAPHSCHAQYMANMDSIASLVMAVVVNDNEEDGDTDAIQPQKRKRLWGLVVCHNTTPRFVPFPLRYACEFLAQVFAIHVNKEIELEYQIIEKNILRTQTLLCDLVMRDAPLGIVSESPNIMDLVKCDGAALIYRNKVWRLGVTPSEPQIREIALWLSEYHMDSTGFSTDSLFDAGFPSALSLGDVVCGMASVRVTAKDMVFWFRSHTAAEIRWGGAKHEAGEKDDSRRMHPRSSFKAFLEVVKARSLPWKEYEMDAIHSLQIILRNAFKEDTESLDLNAKAINTRLSDLKIEGINDLKIERMQELEAVTSEIVRLIDTATVPILAVDVDGLVNGWNIKIAELTGLPIGEATGKHLLTLVEDSSTDRVKKMLNLALLGEEEKNVQFEIKTHGSKMDSGPISLVVNACASRDLRDNVVGVCFVAHDITAQKNVMDKFIRIEGDYKAIVQNRNPLIPPIFGTDEFGWCCEWNPAMMKLTGWKREEVMDKMLLGEIFGTQMAPXWFRNREGFIKYDAQLNKXAMTGSETEKVPFGFFARNGKYVECLLSVSKKLDVEGLVTGVFCFLQLASPELQQALHIQRLSEQTASKRLNALSYMKRQIRNPLCGIVFSRKMLEGTDLGTEQKQLLRTSAQCQQQLSKILDDSDLDTIIDGYLDLEMAEFTLHEVLVTSLSQVMTKSNGKSIRIVNDVAEQIVMETLYGDSLRLQQVLADFLLISINFTPNGGQVVVAGTLTKEQLGKSVHLVKLELSITHGGSGVPEVLLNQMFGNNGLESEEGISLLISRKLLKLMNGDVRYLREAGKSAFILSAELAAAHNLKA

SEQ ID NO: 5800 - protein, 593 aa, Oryza sativa (japonica cultivar-group)
MMGAAVTMVDRRMAFAAEADVDSKAAFGFFGGECFVGEGDLVNPAPPPPQQQQVHEGGFAAEDESDGDDDDDDDDDVDDIEELERRMWRDRVRHKRLKELQQSRAGRESRAGDAGGGGRQQRQSQEQARRKKMSRAQDGILKYMLKMMEVCNAQGFVYGIIPEKGKPVSGASDNLRSWWKEKVRFDRNGPAAIAKYQADNAVPGCDGDAGGAAPAGPHSLHELQDTTLGSLLSALMQHCDPPQRRFPLEKGVPPPWWPEGSEAWWPEAGVPKELGPPPYKKPHDLKKAWKVAVLTAVIKHMSPDVDKVRRLVRQSKCLQDKMTAKEIVTWLAVLKQEEDLYLKLHPGALPPPLSAASFNASVSGEYDVEGVDGDEAGNNNLQKAQNDATAFMDLTTTMDAALSNNKFLIMPLMKEEAIDVDFIQKRSEPELMLSSDSHARVYTCGNVQCPHSNYALGFLDRNERNAHQYACKHNAAAAAAESKPPPPHIFEPLGSFDFDLPVDGQRCLAGLMTMYDNDVAAATQMHHHHHQQQQANFFIRDDAPFGGDVAATAAAAPEFRFSSNFNVTGGGAVDYGGAMQQPPAKYAGSNWFY

SEQ ID NO: 5801 - protein, 374 aa, Quetzalia occidentalis
ALSIAGAVQSQKLAVCSISQLQSLPGGDIKLLCDTVVESVRDLTGYDRVMVYKFHEDEHGEVVAESKRPDLEPYIGLHYPATDIPQASRFLFKQNRVRMIVDCHATPVRVIQDDGLLQPLCLVGSTLRAPHGCHAHYMANMGSMASLAMAVIINVNDEEGIGGRNATRLWGLVVCHHTSTRCIPFPLRYACEFLMQAFGLQLNMELQLALQLSEKHVLRTQTLLCDMLLRDSPTGIVTQSPSTMDLVKCDGAALYHQGKYYPLGVTPTEAQIKDIVEWLLAFHGDSTGLSTDSLADAGYPGAVSLGDAVCGMAVAYITNRDFLFWFRSHTGKEMKWGGAKHHPEDKDDGQRMQPRSSFKAFLEVVKSRSLPWEN

SEQ ID NO: 5802 - protein, 410 aa, Triticum aestivum
MGALAESIASHVPSGMLSAGLAALAALPNPGELVRKAARLEDELRELLRLNGRGAGAGAEQGGGNRAQQTRERFLRAYERLKDELLKDRAFNFDFTEETRQWVAKMLDYNVPGGKLNRGLSVIDSYMLLREGTEVDEEDFYLACVLGWCIEWLQASALVMDDITDNAYTRRDNLCWYKLPTVGLSAINDGVLLKCHVQAIIKRYFKEKFYFMELMELWNEIGLQTAMGQMLDLITTHTGAKDLARYRIQGYRRIVKYKTSYYSFYPAGACALLLNGAKLSDYVELKNVLIEMGVYFQIQDDYLDCFGDPQVIGKVGTDIEDYKCSWLIVQAMELANENEMKILYENYGKSCPECVAAVKNVYKELDLQDIFLEYESRVYKHLVSTIDAEPDRAIREILKIFLKKIYRRKK

SEQ ID NO: 5803 - protein, 360 aa, Triticum aestivum
  unsure (1)..(360): unsure at all Xaa locations
HNQTHAPPPPPPPAQPPVAKKSRRGPRSRSSQYRGVTFYRRTGRWESHIWDCGKQVYLGGFDTAHAAARAYDRAAIKFRGVDAGAVPTWACKGEPPSSNTTHATLLVVIVRXASSGFSKTAAAAAPGAPSASFRFXPARAGQFLGKKYIYLGPLVNEVQAARAYDKAAIKCNGREAVTNFEPSTYDAELLNEVAAEGADVDLNLSISQPTSQSPKRDKSSLGLQLHHGSYEGSELKRPKVDAPPEMVAIPHRYPLLTEHPPIWHGQSYPLFLNNEEAARDHSRRPEVATGAVPTWAWRVSHPPPTQPMPLFSSSSSAAASSGFSKTAAAAAPGAPSASFRFDPMAPSSSSSNQHHHHHPR

SEQ ID NO: 5804 - protein, 185 aa, Oryza sativa (japonica cultivar-group)
MVKIKMPALFRRRSGSKSPPLPQADPASGGGSPAPTPEEEMERVFRKFDANGDGRISRSELGALFESLGHAATDDELARMMAEADADGDGFISLDEFAALNATASGDAAAVEEDLRHAFRVFDADGNGTISAAELARVLHGLGEKATVQQCRRMIEGVDQNGDGLISFEEFKVMMAGGGSFAKIA

SEQ ID NO: 5805 - protein, 152 aa, Zea mays
MAGMTDMPMRPARPGPPMQHRGPPPMARLRPEPIDREETCPLLLRVFTRVAGHHQNEEFSVRGKEPKDEVQIYTWKDATLRELTDLVKEVALPARKRNARLSFAFVYPDKNGRFVVRQVGSTFAYGHGRGDDAKTLAELGFQIGDYLSVAIM

SEQ ID NO: 5806 - protein, 490 aa, Neurospora crassa
MAGKQNQAAPKKAVAPRQQHYEFGGPIGAFGITFGLPILVHVFNLFCNDISGCPAPSLLHPKSLDLAQLKREIGWPDNGVFGLFSWSATLWTLGYYALSLVQYRFLPGHHVEGTELSTGGRLKYKLNAFNSAMCTLAILAAGTIAQGAEFPVWTFISDNFAQIISANILFAFALAIFVYVRSFDVKPGNKDMRQLAAGGVTGSLIYDFYIGRELNPRITLPLIGQVDIKEFMEMRPGLLGWIILNCAFIAKQYRLYGYVTDSILFITAIQAFYVFDGIYMEPAVLTTMDITTDGFGFMLSFGDVVWVPFMYSTQTRYLSVHPQQLGAFGLIAVGAVLAAGYSIFRLSNSQKNNFRTNPEDPSVKHLTYLQTKTGSRLITSGWWGIARHINYLGDWLQSWPYSLPTGIAGYQILSAGSNAPGAITMLDGREVVQGEARGWGIVFTYFYILYFAILLIHRDLRDDEKCSKKYGDDWEKYKKLVKWRIVPGIY

SEQ ID NO: 5807 - protein, 396 aa, Bacillus anthracis str. A2012
MIQTKDIIELTDTYGANNYHPLPIVISKAEGVWVEDPEGNRYMDLLSAYSAVNQGHRHPKIINALIDQANRVTLTSRAFHSDQLGPWYEKVAKLTNKEMVLPMNTGAEAVETAIKTARRWAYDVKKVEANRAEIIVCEDNFHGRTMGAVSMSSNEEYKRGFGPMLPGIIVIPYGDLEALKAAITPNTAAFILEPIQGEAGINIPPAGFLKEALEVCKKENVLFVADEIQTGLGRTGKVFACDWDNVTPDMYILGKALGGGVFPISCAAANRDILGVFEPGSHGSTFGGNPLACAVSIAALEVLEEEKLTERSLQLGEKLVGQLKEIDNPMITEVRGKGLFIGIELNEPARPYCEQLKAAGLLCKETHENVIRIAPPLVISEEDLEWAFQKIKAVLS

SEQ ID NO: 5808 - protein, 117 aa, Leavenworthia crassa
GMIHDGESRFSINGKPIHHFLGTSTFSEYTVVHSGQVAKINPEAPLDKVCIVSCGLSTGLGATLNVAKPKKGQSVAVFGLGAVGLAAAEGARIAGASRIIGVDLNSKRFEEARKFGV

SEQ ID NO: 5809 - protein, 339 aa, Cytophaga hutchinsonii
MAKVKSKLEYIWLDGYKPTQSLRSKTKIEENFSGKLEDLSNWSFDGSSTEQAKGGSSDCLLKPVFVCPDPQRKNGYLVMCEVLNADGTPHPTNGRAQIEDDDNDFWFGFEQEYFLYDLSTNMPLGFPAGGYPKPQGPYYCSVGAQNAYGREIIEEHLDVCLDAGLNVEGINAEVAAGQWEFQIFAKGAKRAGDEIWVARYLLERIGEKYGVYVNYHCKPLGDLDWNGSGMHANFSNTLLRTAGSKEVFDKVCEAFRPVVKEHIEVYGAHNELRLTGKHETASIHDFSYGVSDRGASIRIPVLVPAKGWSGYLEDRRPNSAADPYKVAARIIKTVKPVQR

SEQ ID NO: 5810 - protein, 399 aa, Chlorobium tepidum TLS
MFLSRPLVRIASAADRFLHGETEVKIPVKHDDEIGRLARAFNYLSEEIVRLTRKEEWLREVLSSIREAIIVTNASGEIVLANPAASRLFMIEAARKRSIPVTNIEDAAMRELFERVQKRQSGIYNEELTAMTSKGKRTLKVTAVPVMRRGALFDGTVLVINDVTRLRNLERTRRDFVSSVSHELRTPLASIKGYTETLLEGAMNDPENATAFLNIIHQEAEQLTALVNDVLDLSRIESGKIAYSFEPVDVKPQLEKTAALFEPAAARKGVRIELNAPEGLPAVLADRSYFDIVVRNLIDNAIKYVDAESGRVRVSAYATGDSVSIEVADNGIGIPQADLDRIFERFYRVDKARSRELGGTGLGLSIVKHIVLAHKGKVEVRSRINRGTTFTVTLPVAGA

SEQ ID NO: 5811 - protein, 322 aa, Xanthomonas campestris pv. campestris str. ATCC 33913
MHYRRLGSTGLQLSALSFGAWVTFGKQIGRSEARNLIAAAWDNGINFFDNAEVYARGRAEEVMGDVIGDLRLPRDGYCVSSKVFFGAVDDPRPTQRGLSRKHVTDACHAALRRLRVDYLDLYFCHRPDPDTPIQETVRAMDALIRQGKVLYWGTSEWSAEQLRTALEIAAREHLHAPAMEQPEYNLLHRSRLEQEYAPLCEAGLGTTIWSPLASGLLTGKYNAGVDADSRLGQPGNAWLQDEVLGTPESRRLERARAFSAVAAELGQSPARLAIAWCLRNPHVSTVILGASRVAQLEENLAALQTLEQVDAAGWAQVDAATR

SEQ ID NO: 5812 - protein, 180 aa, Bacillus anthracis str. A2012
MGFPKLETERLQLRELTLLDAETMFHYFSKESVIRYFGMDSFENIEQAKTTIQTFKNRYEEGSVFRWGIEKKGTGQLIGTCGFHLINHHHKRAEIGYELDDTYWGQGYASEALQAILTYGFETLQLIRIAAVVYVENKASQKLLSKAGFQEEGLLRKHMIQNGVAHDTILYSLLKEEWKK

SEQ ID NO: 5813 - protein, 281 aa, Lactococcus lactis subsp. lactis
MTWYHELGIKYPLFQGGMAWASNAELVAAVSNNGALGIIGSGGRTANELRRMIRKTKTLTSQPFGVNLMLLDKNIKQLLEVICEEKISVVTTGAGSPKEIIDTIIANNIKLFPVVPNKEIALKMLNLPISGIIVEGNEAGGHVGSQNLASLLKEIAPICPLPLIAAGGIYDHHTASLANILGANGVQVGTAFLLAKECQISPIYQELICKGEENGTSLISDKNGHLTRLLNISSEYPLNKSLKAAVEKGDLINGAFMAGSSSAYLEKIEPVENIIQRIMKK

SEQ ID NO: 5814 - protein, 447 aa, Zea mays
MGSLRVVGWAWTAAAAPEWGVHRRCCRGTPLARPRAATSSLGAGQLRVGTEHGWLWDCRGGGGAGDYAREMEVAVRVVQVACTLCQRVQDSLLRPGPDAAGGDGRVHAKLDRSPVTVADWGVQAIVSWLLSSSFHDEDISIIAEEDDETLSSSDGVTLLESVVEAVNGCLVEAPNYGLRSPEKELRAHDVIQAIRKCSSTGGPKGRFWVLDPVDGTLGFVRGDQYAIALALIEDGEVILGVLGCPNYPMKKEWLNYHQKYYRLMSKVAPPPLGSWHKGCVMYAQKGCGQAWMQPLVHDFGKLNWHHPREIQVSSISDPISATFCEPVEKANSSHSFTAGLAQSVGLRNQPLRVYSMVKYAAIARGDAEIFMKFARAGYKEKIWDHAAGVVIIQEAGGVVTDAGGRPLDFSRGVYLEGLDRGIIACSGALLHQRILNAVDASWNSSTL

SEQ ID NO: 5815 - protein, 197 aa, Mesorhizobium loti
MPGKKILMLTGEFTEEYEIFVYQQAMEAVGHTVHVVCPDKNAGDLIKTSLHDFEGDQTYTEKLGHYALINKTFSEAERQLDQYHAVYCAGGRGPEYIRTDKRVQAIVRHFHETKKPIFTICHGVQILIAVDGVVRGKKVGALAACEPEVTLAGGTYIDLSPTDAYVDGTMVSAKGWTALAAFIRECLKVLGTEIRHA

SEQ ID NO: 5816 - protein, 462 aa, Streptococcus agalactiae NEM316
MSKNNNDHTQKSENGMVRGLENRHVQLIAIAGTIGTGLFLGAGRSISLTGPSIVLVYAITGAFMFFMMRAIGEMLYQDPNQHTFINFITKYLGPGWGFFSTLSYWISLIFIGMAEITAVGEYVQFWFPEWPSWIIQIVFLAILSSINLIAVKAFGETEFWFAMIKVIAILGLIATGIFMVLTNFDTGHGYHASISNITNHFEWFPKGKLNFFMAFQMVFFAYLAIEFVGVTTSETANPRKVLPKAIQEIPMRIILFYAGSLLAIMAIFPWQQLPVNESPFVTVFKLAGIKWAAALINFVVLTSAASALNSTLYSTGRHLFQLANESPNTLTKALKLDQLSRQSVPSRAIIASAVIVGASALISVLPGISDAFSLITASSSGVYISIYVLIMIAHWKYRKSPDFMEDGYKMPAYKILSPITLLFFLFVFVSLFLQDSTYIGAIGATIWIIGFGLYSHFKHKSH

SEQ ID NO: 5817 - protein, 430 aa, Ascobolus immersus
MGGKDYEFGGPIGTGVLMLILPPISHYLHFLITPRGAPPPEFWSAPLETLKSVTPTFSSLFSLHATLAVAAYYLLLVALMYVLPAEIAEGVVLKDGSRLKYRCNAFTTFLVFFTFLGTMTVLEGPTWWFWSYLTDNFAQLQSASIVFSYAMSLWVYIRSYRPMPKGKEVILSPVGFKGNHIHDFWMGRELNPRIGEWLDIKQLHELRPGLMGWILFNLAWTVKQYNTHGFVSDSIVLVNLFETWYVVDALWNESKVLTTMDITTDGLGVMLLFGNAVWVPFMYCLQARYLASFPVHLGLLGIAGVLAVQFTGYAIFRGANNQKNAFRTNPADPAVSHLKFMTTKSGSKLLISGWWGVARHVNYFGDWIMAWSYCLTTGFNTPLTYFYVIYFGILLLHRDRRDEAKCREKYGKDWDRYCKVVKWRIIPGIY

SEQ ID NO: 5818 - protein, 777 aa, Neurospora crassa
MAQAYDDEELSISLSPSQIRSRNKRSGDGASGFGPSTGNLHEYGQHGQQLHPNINAVMADAPLRDKMRTEQRIGAYNIVKTLGEGSFGKVKLAVHRMTGQQVALKIIARKKLISRDMQGRVEREIEYLQLLRHPHIIKLYTVIKTPTEIIMVLEYAGGELFDYIVQHGKMKEDEARRFFQQMLCAVEYCHRHKIVHRDLKPENLLLDDNLNVKIADFGLSNIMTDGNFLKTSCGSPNYAAPEVIGGKLYAGPEVDVWSCGVILYVLLVGRLPFDDEHIPSLFAKIARGSYMVPTWMSPGAASLIKKMLVVNPVQRATIDEIRQDPWFLKDLPAYLHPPVEEFLNTGVDPNKAIKVSDIAPNAPPQEQEKLHNEVTEKISKTMGYGKRDVEEALEADEPSAIKDAYMIVRENKLMQSNLDFATSHPPSASILHLPSGEHRLTQKKSKSLSLRPSSFWSNTNEEYQDTLLKTDEEIPGLTTEESVPSPLHDPNMSSARSIASVSTATSPRPYVSKIGILPSSLPTYHRVFMEREKAKAEGLEPPDAIPTIVEPANQPRSQAEQEETIRRLKPHSRSQLRLDEANKRPQGLTPVHPPKKNKPARWQFGIRSRNAPWEALVCIYKALNKLGAGWIVDEDYERAHRDDDDTDDYDGPSIGSRKKSSSSMDPTKTYRLPADPWHIKIRWTTDKLKKHSVASGLSEAGENTHVSRDGSDSKYQVVAMRMEIQIYEMEHGVYLVDFKVDGYETPDGKLLEDKEVTSPFPFLDMAAKLIMQLADAD

SEQ ID NO: 5819 - protein, 169 aa, Aquifex aeolicus VF5
MFEQWDALCAVLFSFSIAQELKTHADIVNQKGEKIGKAELIQTNSGVLIKLEASNLPPNAELAFHIHELGKCDPPDFKSAKGHFNPFKKKHGLLNPEGPHAGDMPNIHTDDKGNVRVQVLNPFVTLKKGKKNSLFKEGGTALVIHGGPDDYKSDPAGNAGKRIACGVVK

SEQ ID NO: 5820 - protein, 560 aa, Pisum sativum
MLVLFETPAGFALFKVLNEGKLSEVQDLSLDFSTADAARKVVKLKAFSKFENTAEALEAASCLIDGKTSKGLRKFLRAHCDDEILAVADSKLGNIIKEKLKIDCVHNNAVMELMRGVRYQLTELISGLAVQDMAPMSLGLSHSLSRYKLKFSADKVDTMIVQAIGLLDDLDKELNTYAMRVREWYGWHFPELTKIIQDNIQYARSVKLMGDRINAAKLDFSEILTEEVEAEVKEAAVISMGTEIGELDLSNIRELCDQVLSLSEYRAQLYDYLKSRMNTIAPNLTAMVGELVGARLIAHGGSLINLAKQPGSTVQILGAEKALFRALKTKHATPKYGLIYHASLIGQAAPKFKGKISRSLAAKTALAIRCDALGDGQDNTMGLENRAKLEARLRNLEGKELGRFAGSAKGKPKIEAYDKDKKKGAGGLITPAKTYNTAADSVIHQKSNSAMDEDTPEPTTAEKKKEKKEKKEKKDKKEKKKKEEVSATLLADVDGVEEPEHEVVKKEKKKRKQSSENETQNGDTNLNEGEKKKKRKKHAEQEDSADVPSKKNKKKKKNDD

SEQ ID NO: 5821 - protein, 358 aa, Acidithiobacillus ferrooxidans
MKKIAIFAGDGIGPEIVAAARQVLDAVDQAAHLGLRCTEGLVGGAALDASDDPLPAASLQLAMAADAVILGAVGGPRWDAYPPAKRPEQGLLRLRKGLDLYANLRPAQIFPQLLDASPLRPELVRDVDILVVRELTGDIYFGQPRGLEVIDGKRRGFNTMVYDEDEIRRIAHVAFRAAQGRRKQLCSVDKANVLETTRLWREVVTEVARDYPDVRLSHMYVDNAAMQLIRAPAQFDVLLTGNMFGDILSDEASQLTGSIGMLPSASLGEGRAMYEPIHGSAPDIAGQDKANPLATILSVAMMLRHSLNAEPWAQRVEAAVQRVLDQGLRTADIAAPGTPVIGTKAMGAAVVNALNLKD

SEQ ID NO: 5822 - protein, 606 aa, Triticum aestivum
MKFMKLGSNPDTFQDDGSEVRIVETELVSDITVRLGNTKFYLHKFPLLSKCARFQKLIPTTGDENIDIHIRPFPAGPKAFEICAKFCYGMVVTLNAYNVVAARCAAEYLEMNETVDKGNLIYKIDVFLSSSIFRSWKDSIIVLGTTKAHLPWSEDLKLVRHGIGSIASKANVDTSKVEWSYTYNRKKLPAENDLDMQWNGVKKQPAVPKDWWVEDLTDLDIDSYKQVISAIKTMGMVPKDAVGEAIKAYTYKKLPSLSKVSMIHGDGKVRAMLVTITCLLPSEKGSVSCSFLLKLLRATNLLKCGEMCRKELVKRIGRQLDEASVSDLLIPTVDGETTGYDIDMILSIVEEYVRQDSKNAQKHNAEVNGHVQAPSASMITVAKIVDGYLTEVAKDPNTPVLKFINLAEAISGNSRPFHDGIYRAIDMYMKEHPSLSKSDKKKLCCLMDCKKLSPEACAHAVQNERLPLRTVVQVLYHEQTRASAAATVRADSICIGSYESSRSGATTNTEDEWDGVIAVEDLSLSSKTTKLEKCHSAEKSHGSSKSTTNGKAKGGATPKKVLGKMLSSKALTGERSSSDSSDSAILRSQDHPKRTPSRSTKPSAAA

SEQ ID NO: 5823 - protein, 458 aa, Staphylococcus epidermidis ATCC 12228
MENNELQRGLNARQMQMIALGGTIGVGLFMGATSTIKWTGPSVILAYLIAGIFLFLIMRAMGEMIYINPTTGSFATFASDYIHPAAGYMTAWSNVFQWVVVGMSEVIAVGEYMNYWFPSLPNWIPGVIAVLFLMAANLVSVKAFGEFEFWFALIKVVTIVLMIIAGLGLILFGIGNGGNPIGISNLWSHGGFMPNGFIGFFFALSIVIGSYQGVELIGISAGETKNPQTNIVKAVNGVIWRILIFYIGAIFVIVSVYPWNQLGSIGSPFVATFAKVGITFAAGLINFVVLTAALSGCNSGIFSASRMIYTLAKKGQMPKVFTKVMKNGVPFYTVFAVSMGILIGALLNVILPLIIDGADSIFVYVYSASILPGMIPWFMILFSHLRFRRLHPEKVHNHPFKMPGGAIANYLTIMFLLLVLVGMLLNKETVVSVVIGIVFLTAVTLYYLIRYHKKERQI

SEQ ID NO: 5824 - protein, 364 aa, Lycopersicon esculentum
MAIENNDQSFFLDVLYCEEEEEKWGDLLEDEEGVIINPLLLSSEGTTKTNSLLLLPLLLLEQDLFWEDEELLSLFVKEKETRCCFESFGSDPFLCSARVDVVEWILKVNAHYDFSALTAILAINYLDRFLSSLQFQKDKPWMTQLAAVTCLSLAAKVEETQVPLLLDFQVEDAKYVFEAKTIQRMELLVLSSLKWRMNPVTPLSFLDHIIRRLGLKNNVHWEFLRRCESLLLSVMIDCRFVRYMPSVLATAIMLHVIHQIEPCNAIDYQNQLLGVLKISKENVNNCYELISEVSSKPITSHKRKYDENPSSPSGVIDPIYTSESSNDSWDLDLPSFKKSKVQEQQMKMSSSLSRVFVEAVGSPH

SEQ ID NO: 5825 - protein, 329 aa, Triticum aestivum
MGMPAVRRRERDAEAELNLPPGFRFHPTDDELVEHYLCRKAAGQRLPVPIIAEVDLYRFDPWALPDRALFGTREWYFFTPRDRKYPNGSRPNRAAGNGYWKATGADKPVAPRGGRTMGIKKALVFYAGKAPKGVKTDWIMHEYRLADAGRAAASKKGSLRLDDWVLCRLYNKKNEWEKMQLQQQGEEETMMEPKAENTASDMVVTSHSHSQSQSHSHSWGEARTPESEIVDNDPSLFQQATAAAFQAQSPAAAAAHQEMMATLMVPKKEAADEAGRNDLFVDLSYDDIQSMYNGLDMMPPGDDLLYSSLFASPRVRGSQPGAGGMPAPF

SEQ ID NO: 5826 - protein, 325 aa, Triticum aestivum
  unsure (1)..(325): unsure at all Xaa locations
MKDFPGVFPRIFGHEAFGVVESTGEHVEGFAAGDAVVPTFLAQCSECADCRSSRSNVCSKYRFAVRPGMPRDGTTRFRDGDGNPIHHLSSADAWGEYTVVDVTQVVKVDPAVPPATACLLSCGATTGVGAAWKLAKVEPGSSVAIFGLGAXGLAVAEGARICGASKIIGVDLNPDKEELGKKSRASHFINPKELGEKTVSQVIIEMTDGGADYCFECIGLAALMNDAFQSSRAGWGKTIILGVERHGAPLTISSLEILHGKCVMGSLFGGVKPKQDIPILADKYLNKELELDKFITHEVGLKDINTAFDLLLQGKSLRCTIWMDK

SEQ ID NO: 5827 - protein, 114 aa, Glycine max
MPTTTTTKNNSQLPSSWGNNKPPKPQTSVLGPGLGAGIGCGAGIGLGLVGGFGYGRAGPFNHMHLVFGLGMGCGVGVGFGFGQGIGYDFPFRSRISGKSLRSPADPRYSVVIQI

SEQ ID NO: 5828 - protein, 372 aa, Streptococcus mutans UA159
MNTIKTRAAVAWAPNEPLKIEELDLMMPQKGEVMVHITATGVCHTDAYTLSGKDAEGVFPCVLGHEGAGIVEAVGEGVTEFQVGDHVIPLYTAECGKCEFCLSGKTNLCSAVRETQGRGVMPDGTVRFFKDGQPIYHYMGTSTFAEHTVVSEYSLVKIQDNAPLEEVCLLGCGVTTGMGAVLNTAKVEEGATVAIFGLGGIGLAAIIGARMAKASRIIAIDINPDKFDKARKLGATDLVNPNNHAKPIQEVIIDITNGGVDYSFECIGNVEVMRAALECCHKGWGESTIIGVAPAGAEIHTRPFQLVTGRVWRGSAFGGVKGKTQLPGIVGQYMAGEFALSDFITHTMPLEQINDAFDLMHEGKSIRTVIHY

SEQ ID NO: 5829 - protein, 168 aa, Glycine max
MGNDAGSPQGPVTCGSWIRRPENLNLVVLGRSRRGSSCPSLLEIFSFDPKTTSLSTSPLTTYVLEAEEGDPVAITVHPSGDDFVCALSNGSCKLFELYGRETNMKLLAKELAPLQGIGPQKCISFSGDGSKFAAGGMDGHLRIMEWPSMRVILDEPRTHNSVQDMDLV

SEQ ID NO: 5830 - protein, 288 aa, Gossypium hirsutum
MAFPVVDTEYLKEIDKARRDLRALIALKNCAPIMLRLAWHDAGTYDVSTKTGGPNGSIRNEEEFTHGANSGLKIAIDFCEEVKAKHPKITYADLYQLAGVVAVEVTGGPTIDFVPGRKDSNICPREGRLPDAKRGAPHLRDIFYRMGLSDKDIVALSGGHTLGRAHPERSGFDGPWTNEPLKFDNSYFLELLKGESEGLLKLPTDKALLDDPEFRKYVELYAKDEDAFFRDYAESHKKLSELGFTPTSARSKVMVKDSTVLAQGAVGVAVAAAVVILSYFYEVRKRMK

SEQ ID NO: 5831 - protein, 542 aa, Aspergillus fumigatus
MIEAKMTPFEFNQHVNADRLARKLSARQVQMIAIGGTIGTGLFLGTGKALATGGPASMLISYAICGGIVFVTMLSLGEMAAFIPIAGSFCTFAGRFVDDALGFALTWNYWFNDAVSTAADVIALQLLLQYWTDNFPGWAISLIFLIFVILLNVMSVRIYGEIEYWLSLLKVITIIIFIILGIVVNCGGNKDHKYIGDKYFYVGDAPFVGGIGGFASVFVTASFAYGGTESIAITAGETKDPAKNLPRVVRNVFWRIVLFYIISIILIGLNVPYNYPNLSKKTTATSPFTIVFMEAGSAVAGSFINAVLMTSVISAANHALFAGSRLLYTLAVDGHAPHFFGHLNRFQIPWVAVLATSLVSGLCFGASYIGAGQLWTWLQNETSIVGVSNQISWVCIGIASLRFRAAIRRQNLEHLLPFKNWTYPVGPIIAVGLNIVLILVQGWSCFSPSFQAVDFVSFYIEIPIMIVMFLAWKLVKQTRFVHLDEMDLVTDRYDLNAEHAESDGNADGDSPSRVGRILHIKQLQSEKGVLGKLKRVGMWLFL

SEQ ID NO: 5832 - protein, 250 aa, Capsicum annuum
MGKCYPTVSEEYLKAVDKCKRKLRGLIAEKNCAPLMLRLAWHSAGTYDVCSKTGGPFGTMRFKTEQSHGANNGIDIALRLLEPLGEQFPIVSYADFYQLAGVVAVEVTGGPDVPFHPGREDKPEPPVEGRLPDATKGSDHLRDVFVKQMGLSDQDIVALSGGHTLGRCHKERSGFEGPWTANPLIFDNSYFKELLGGEKEGLLQLPSDKALLSDPAFRPLVEKYAADEDAFFADYAEAHLKLSELGFAEA

SEQ ID NO: 5833 - protein, 376 aa, Leuconostoc mesenteroides subsp. mesenteroides ATCC 8293
MAIIWVLVAMILGLQACRQSFYYQTIIIIIVFRGQMQKEKQMYSANKNRYEKMIYNRIGNSGLQISAISLGLWNNFGSVDPYENQKGIIHQAFDLGITYFDLANNYGPIPGSAEENFGKIMATDMKPYRDEMVIASKAGHEMWPGPYGNWNSRKSIIASADQSLRRTGLDYFDIFYSHRPDPMTPVAETAQALDQLVRQGKALYIGISKYSSQETQEIIDIFKELKTPFIIHQPRYNMFDRKAERGLFTTLGENKKGAVGFSSLAQGLLSDKYLKGIPNNSRANKVTIPFLTTEKVEPTINTVQKLNQIAQRRGQTLPQMALAWNLRIPELASVLIGASNPKQVIENVKALDNLSFSPEELLEIDRALSEYAANQA

SEQ ID NO: 5834 - protein, 114 aa, Zea mays; identical to SEQ ID NO: 4579

SEQ ID NO: 5835 - protein, 298 aa, Oenococcus oeni MCW
MAWVADGKLAAAVSNAGGMGIIGAGHAPADVVRHEIEVAKSLTSRPFGVNVMLLSPHVKEVVKVILEEKDSIALITTGAGNPSEYLEGFQKANIRVIPVVPSTGMARIMAREGVDAVIAEGMESGGHIGRMTTMALVPQVADAVDIPVIAAGGIGDGRGLAASIMLGAQGVQMGTRFLVAEECHIHPRYKESVLKAKDIDTLVTGKFAGHPARVLKNKMAVNFIRQEKSEAQKENPDFGGVEELGNGSLRRAVETGDVEKGSYMAGEISGLVTKEQPVAEILQEVTDQAAKLLGGYGN

SEQ ID NO: 5836 - protein, 293 aa, Triticum aestivum
  unsure (1)..(293): unsure at all Xaa locations
GPTKXIDWDTLIDTVCSQAEDVPEIDWCEPGEAAAMEALLGTKDGFLTERIKSYDSDRNYPTKPTALSGLSPYLHFGHISAQRCALEAKKXRHLSPKSVDAFLEELIIRRELADNFCYYQPHYDSVAGAWEWARKTLKDHAADKREHIYTREQLENAKTADPLWNASQLEMVHHGKMHGFMRMYWAKKILEWTSGPEEALSIAIYLNDKYHIDGRDPNGYVGCMWSICGLHDQGWKERLVFGKIRYMNYAGCKRKFNVDAYISYVKRLVAQPKKRKPEESLNSAAKYSKSEKD

SEQ ID NO: 5837 - protein, 364 aa, Escherichia coli O157:H7 EDL933
MMSKNYHIAVLPGDGIGPEVMTQALKVLDAVRNRFAMRITTSHYDVGGAAIDNHGQPLPPATVEGCEQADAVLFGSVGGPKWEHLPPDQQPERGALLPLRKHFKLFSNLRPAKLYQGLEAFCPLRADIAANGFDILCVRELTGGIYFGQPKGREGSGQYEKAFDTEVYHRFEIERIARIAFESARKRRHKVTSIDKANVLQSSILWREIVNEIATEYPDIELAHMYIDNATMQLIKDPSQFDVLLCSNLFGDILSDECAMITGSMGMLPSASLNEQGFGLYEPAGGSAPDIAGKNIANPIAQILSLALLLRYSLDADDAASAIERAINRALEEGIRTGDLARGAAAVSTDEMGDIIARYVAEGV

SEQ ID NO: 5838 - protein, 363 aa, Vibrio vulnificus CMCP6
MTDKTYKIAVLPGDGIGPEVMAQAHKVLDAIEKKHAIHFEREEHDVGGIAIDNHGCPLPQSTVTACEESDAVLFGSVGGPKWEHLPPNDQPERGALLPLRKHFQLFCNLRPAQIHSGLEAFSPLRADISGRGFDIVVVRELTGGIYFGQPKGREGEGANEKAYDTEIYHRFEIERIAKIAFESARLRRKKVCSIDKANVLQSSILWREVVEELAKDYPDVELSHMYIDNATMQLIKDPAQFDVMLCSNIFGDIISDECAMITGSMGMLPSASLNESKFGLYEPAGGSAPDIAGKNIANPVAQILSAALMLRYSLGEEAAAQDIENAVSQALAAGELTADLAGDKPALSTAEMGDKIAQYILNS

SEQ ID NO: 5839 - protein, 148 aa, Triticum aestivum
IFGPHGNYEAVNWFFLIGAAGPVIVYIFHRIFPSQRWILMINLPVLIGATANMPPATAVNYNSWLLIGTIFNFFVFRYRKKWWQRYNYILSAALDAGVAFMAVLLYFTLTMENRTVNWWGTAGEHCPLASCPTAKGVDLGPDSVCPVF

SEQ ID NO: 5840 - protein, 471 aa, Chloroflexus aurantiacus
MHAPPGLACRRGSRGPGVFLDSPNGVIIGRLKSCLKPWKPLRGWPAGGEAGAGRVPGWPPAGKSRLSLPISYLLSPISYLLSPISYLLSPISYLLSPISYLLSPISSFLSPPPKLRYNIAMNIFLSADHHHHNPPFEILDGRVVPYAETPQRVAIILAALAEAGFAPPIVASPATIADLAAIHTADYLEYLANGSARWQAAGLSAPVFPSAWPLPGLRLRSDCPQAAAGRYTFDLSAPITAGTFTAACSAAGAALAGAAALLAGNTSAYALCRPPGHHAAAAMAGGYCYLNNAALAADYLARSQTSGDATWALRSPTVAVLDIDYHHGNGTQSIFYERNDVLTVSLHADPAYEYPYYLGYADERGAGAGEGYNLNFPLPAGIDDAGYLKALDQALQAIADYGPRYLVVSAGFDTFAGDPLGGFALITEAYRTIGRSITQLGLPTLIVQEGGYALEALGANVVALLQGVSTA

SEQ ID NO: 5841 - protein, 350 aa, Zea mays
MAAGGNGAGGDTRAAFARIYKTLKEELLTDPAFEFTEESRQWIDRMVDYNVLGGKCNRGLSVVDSYKLLKGADALGEEETFLACTLGWCIEWLQAFFLVLDDIMDDSHTRRGQPCWFRVPQVGLIAANDGIILRNHISRILRCHFKGKPYYADLLDLFNEVEFKTASGQLLDLITTHEGEKDLTKYNITVHGRIVQYKTAYYSFYLPVACALLLSGENLDNYGDVENILVEMGTYFQVQDDYLDCYGDPEFIGKIGTDIEDYKCSWLVVQALERADESQKRILFENYGKKDPACVAKVKNLYKELDLEAVFQEYENESYKKLIADIEAQPSIAVQKVLKSFLHKIYKRQK

SEQ ID NO: 5842 - protein, 142 aa, Zea mays
  unsure (1)..(142): unsure at all Xaa locations
MAGIGPIRQDWEPVVVRKKAPTAAAKKDEKAVNAARRAGAEIDTMKKYNAGTNKAASSGTXLNTKRLDDDTENLAHERVPSDLKKNLMQARLDKKLTQAQLAQMINEKPQVIQEYESGKAIPNQQIISKLERALGTKLRGKK

SEQ ID NO: 5843 - protein, 454 aa, Lactobacillus plantarum WCFS1
MQRKLSTGQMQMIALGGTIGVGLFMGSSSTIKWTGPSVLIAYIVSGAFLYLIMRALGEMLYVDPNTGSFAKFASEYIHPVFGYLTAWSNIFQFVVVGMSEMIALGGYCRYWWPNLPDWIPGLIAIVFLCAANLISVKMFGTLETWFSLIKVVTIILMIIAGLGLIIFGIGNGGHPIGISNLWTHGGFFTGGVKGFVFALAIVLASYQGIELIGVTAGEAENPQSTIVKAIRSTVARILIFYVGAIFVIVSIYPWDKLSQIGSPFVQTFAKIGITAAASIINFVVITASLSGTNSGIYSASRMTYTLAESHQLPRKMTLLNRHGVPFYSVIAIATGILIGVVLNVVLPMFFKDASEIFVMVYSSSVLPGMVPWFVILVSQIAFRKQNAAKMANHPFKMPLSPYSNYLTLAFLALTLVFMFINPETRYSILVGVVFLVIMTLIYFRKYAGNKEETL

SEQ ID NO: 5844 - protein, 458 aa, Zea mays
  unsure (1)..(458): unsure at all Xaa locations
MAKPKPSSAGAKPTAAATAPAPPVTVHSALVTYTSMLALLSLCPPFVILLWYTMVHXDGSVVRTYEHLRDHGVLEGLKAIWPMPTLVAWKIIFGFGLFEAVLQLLLPGKRFEGPISPAGNVPVYKANGLQAYAVTLITYLGLWXWFGIFNPAIVYDHLGEIYSALVFGSFVFCIFLYIKGHVFPSSSDSGSSGNVIIDFYWGMELYPRIGKYFDIKVFTNCRFRYDGPGAVLAVTYCIKQYEMNGRVADSMLVNTALMLIYITKFFWWESGYWCTMDIAHDRAXGFYICWGCLVWVPSIYTSPGMYLVNHPLNLGPQLALSILLAGMLCIYINYDCDRQRQEFRRTNGXKCSVWGKAPSKIVASYQTTKGETKTSLLLTSGWWGLSRHFHYVPEILSAFFWTVPALFNHFLPYFYVIFLTILLFDRAKRDDDRCSSKYGKYWKIYCNKVPYRVIPGIY

SEQ ID NO: 5845 - protein, 523 aa, Oryza sativa
  unsure (1)..(523): unsure at all Xaa locations
MAISLITSLLFSLPQQWQPVVLTGLLPVIVSLVLLXXRKGRLKMPPGPEQVPLLGNLHQLAGPQPHRALRDLARVHGPVMRLRLGKASAVVLTSAEAAWEALRGHDLDCCTRPVSAGTRRVTYGMKNVAFAPYGAYWREVRKLLMVELLSARRVKAAWYARHEQVEKLLSTLRRAEGKXXVALDEHILSLSDGIIGTVAFGNIYGSDKFSQNKNFQHALDDVMEMLSGEGSSAEDLQLPAAVGRLVDRLTGFAARRERIFRQLDSFFEMVIEQHLDPNRAPPENGGDLVDVLIGHWKKNDGTFSFTKDNVKAIIFSTFVAGIDTNAATILWAMSELARKPRVLKKVQAEIRAAVGVNGRVQPDDITKLSYLRKVVKETLRLHPPTPLLLPRETMRHIQISGYDVPAKTRIYVNAWAIGRDPASWPDEPEEFNPERFEANEIDFKGEHPELMPFGTGRRICPGMAMAMANVEFTLANLLFAFQWSLPEGTTPDNVCLEEEGRLVCHRKTPLVLVPTVYRHGLEX

SEQ ID NO: 5846 - protein, 383 aa, Zea mays
MAEDRSPKPIHCKAAVCRAAGEPLTIEEIVVDPPKAYEIRIRVVCTSLCHTDITFWKAKVAPVFPRILGHEAYGVVESVGEHVEGFAAGDTVVPTFLGQCERCASCASEHSNVCDAVPFVIGPGMRRDGTTRFRDARGSPLHDLLAVSSFSEYTVVDVNQVVKVDPAVPPKLACLLSCGAGTGVGAAWRSAKVEPGSTVAIFGLGSVGLAVVQGAKMCGASKIIGVDLNPDKEEVGRSFGVTDFVNPSQLDKRSVVEVIVEMTGGGVDYSFECIGVPSVMTDAFRCTKMGKGKTIVLGLGRDSDEVCLPSLELLFGRCVMGSLFGGLKPKTHIPVLAKKCMDNELQLDALVTHELGLQDINKAFDLLLQGKSLRCILWMDKDK

SEQ ID NO: 5847 - protein, 301 aa, Zea mays
  unsure (1)..(301): unsure at all Xaa locations
MAIVIVVLIAAFFFLGFFSIYVRHCYGDGSSGYSANRPPAPGGAAARSRRQRGLDEAVLESFPTMAYADVKAHKAGKGALECAVCLLEFADGDELRTLPLCAHAFHADCIDVWLRAHASCPLCRAAVLDXAVTADSGGGGESSSSPPPADPDASPNGGPDHVGAASDAAPDHEGEESDGLDASPAREDQQERPSSAQPPPPPELLCALPRNVRRAASMDAVAVSTAASVAELDRLPEVAAPEEEQIGGRRKRWTGPCPSRPKASGSGHRSNLSTDWLLAPSGVPRSFFSRHSRARSSVLPL

SEQ ID NO: 5848 - protein, 418 aa, Lycopersicon esculentum
IGLERPPGQVSMATLASSSSLLHSSSSSFNSSSTPSISPVSRISLKFPSSSLSSSLSISPYFVAFSLNSRRVSPKSYSSTSVVQASGAVEKKKVLIVNTNSGGHAVIGFYFAKELLGSGHDVTVLTVGEESSDKMKKTPFTRFSEITGAGGRTVWGNPADVGKILEGEVFDAVLDNNGKDLDSVSPVADWAKSSGVKQFLFISSAGIYKPTDEPPHVEGDAVKADAGHVLVEKYISEIFGSWASFRPQYMIGSGNNKDCEEWFFDRIVRGRPVLIPGSGMQLTNISHVRDLSSMLTLAVQNPAAASGRIFNCVSDRAVTLDGMARLCAKAAGSSVEIVHYDPKAVGVDAKKAFPFRNMHFYAEPRAPNEILGWSATTNLPEDLKERYEEYVKIGRDKKEMKFELDDKILESLKVPVAA

SEQ ID NO: 5849 - protein, 168 aa, Zea mays
MAAASSATSVHDFTVKDASGKDVDLSTYKGKVLLIVNVASQCGLTNSNYTELSQLYEKYKDQGFEILAFPCNQFGGQEPGTNEEIVQFACTRFKAEYPIFDKVDVNGDNTAPIYKFLKSSKGSLFGDNIKWNFSKFLVDKEGHVVERYAPTTSPLSIEKDIKKLLGSY

SEQ ID NO: 5850 - protein, 148 aa, Methanothermobacter thermautotrophicus str. Delta H
MNLTTQKRLAADILKVGVNRIWIDPERIDEVSRAITRDGVKQLIKDGAIKAKPKKGISSYRSKKIAQQKKKGRRRGPGSIKGAKGARRPKKDEWMTTIRALRKDLKEMRDNREINKSTYRKLYKMAKGGAFKSKSYMKTYARDHDMLR

SEQ ID NO: 5851 - protein, 248 aa, Triticum aestivum
MAAAARPATLLAALHDFPNRRLGQPGSRRSEQMAAAAGAATRPALVLGALVAALMMLGAEAVWLDLPPTGTKCVSEEIQPNVVVVADYMLMYEAHATAHPTVAVKVTSPYGNTVHHKENATVGQFAFTTSEAGNYLACFWLDSAEKGSGVSLNLDWKIGIATKDWDSVAKKEKIEGVELELAKLEAAVESIHHNLLYLKAREAEMREVSEKTNSRVAWFSILSLGVCVVVSALQLWHLQGFFQKKKLI

SEQ ID NO: 5852 - protein, 383 aa, Zea mays
DEKETTRLAAVSLTTRCPRPIGRTALWCTGVSRPSSLTPSPATPSSILPDGAPGSRNKMSNRATHWCYACRRPIRLRGQDIACPNCNDGFIQEISEMGGILNTYGLIEPDFEERRARRFGMMDAMSSLMRQRMEEMGRDGLFDIRGRQGTGTEYGRRPTAVPTLVFGGIPSPGVDSGDVNVVLRGGRRVGAAQPNFSSLVVGPSLEALFEQLLLQNNRQGPAPAPQSAIDSMPVVKINRRHLDDDPQCAVCKDKFEVGAEAREMPCKHLYHTDCIIPWLVQHNSCPVCRHPLPSQRSGSTSSARPSAYYNEAADPPGVTRADLEPAPRDGGRESQERRRSFSFLWPFGPSSSRSSSYQYEQNVDEPAVYDPNQIAYSEWHYDH

SEQ ID NO: 5853 - protein, 59 aa, Oryza sativa; identical to SEQ ID NO: 4836

SEQ ID NO: 5854 - protein, 533 aa, Oryza sativa
  unsure (1)..(533): unsure at all Xaa locations
MSSDDEECFYDYEEEEEDGDTMLVEEEAALPERPVDCWAITEESLPAAQQQDLSMVMNLLYIKQHQARALLIHHRWKMESILDHFDRKGRDRMLRETGVVIQQQAEEKNGGGMASSVTCYVCFEDVSSDAVSTMDCGHCFCNDCWTEHFFACVNGGQKQIRCMAVGCAAVCDEDVAQRLLGGRYPGAARRLRGALLASYVEDNAAARWCPSAPHCGRAVRVDGGGGRWCCEVSCPCGASFCFGCAAPAHSPCPCAMWERWEAKCRGESMNVDWILANTKSCPKCSKPIEKNGGCNHVRCKCGQCLCWLCGAATGLAHNWTSIDGHSCNRYDDAAEKRMDGARRKVLRYAHYYERYKAHGDSRRAEAEKLGPAIEARARRLREDPDPATAPASGDAADALLASRDVLSRSYAFAYHMFGGEERTLKAAAPESEVAKALFEDHQEMAERHVEKLSGLLAADAPPAPATAGDAVRRAKQDAVALTAVVEKHCGEMHKCIQDELLPMLVEPXXSIAAYRRDGPIKAKDFPTCGGASX

SEQ ID NO: 5855 - protein, 149 aa, Triticum aestivum
  unsure (1)..(149): unsure at all Xaa locations
MVKGVAVLAGPDVKGTIFFSQEGDGPTTVTGSISGLKPGLHGFHVHALGDTTNGCMSTGPHFNPAGKEHGAPEDENRHAGDLGNVTAGEDXVVNVNITDSQIPLTGPHSIIGRAVVVHADPDDLGKGGHELSKSTGNAGGRVACGIIGL

SEQ ID NO: 5856 - protein, 440 aa, Clostridium perfringens str. 13
MGKPKLKKEIGLFTATALVVGNMMGSGIFMLPASLASVSGPGSTIMAWLLTGLGSLVLALTFANLGSKIPKTGGTYEYSRLAYGNFMGFMTAWLYWNGSWIGNATIFIVITTYLGEVITSLTNSPIIGFLFCSSILWICTYINIRGTKLAGRVASVITVFKVLLFIFFIVVGLIYFDPSNLTPMFPDGKGVSTIPVAASLTLWAFMGLETASVAGGEIKDPEKNVKRSTILGMLISTVLYILISVVAMGAMSQSELASSTAPISDIIVKVLNLKSLNFLNIAIAISILGTAMGWLLSTARVGYAAGEDGIFPSVFAKVHPKYNTPHVALIIGSIFINIIFLMNFTKGLAGAYSFIVVLATLSYLPIYAISTIAEIILMVKEEKKPTFKKHLGLIIRCLIGFAFAIWAIYASGAEIVMYGFILILLGVPIYGYMSIKKHFR

SEQ ID NO: 5857 - protein, 261 aa, Triticum aestivum
RPRKYPLEKGTPPPWWPAGNEEWWAALGLPRGQIAPYKKPHDLKKVWKVGVLTCVIKHMSPNFDKIRNHVRKSKILQDKMTAKESLIWLGVLQREERHVHGIDNGVSEITHRSAPEDRNGTRNAHSSSNEYDVDGFEEAPLSISSKDDEQGLSPAAQSSEEHVSRRDRERANTKHLYQAVVLKEGTKKQPPKRKRARHSSVAVEQEVQRTDDAPENPGNLIPDMNRLDQVEIPGMANHQITSFNQMAVTSEALQHRGNAQG

SEQ ID NO: 5858 - protein, 246 aa, Sulfolobus tokodaii
MRVKVIDADAFSYIFRTLEEFIDEITLDFTSDGLKIRGIDPSRVTFIDILIPAGYFEEYNVEKEEKVGVKLEDFTDVLKTVTKNDSLYLETDENQNIKVTLDGVYERTFTFPSIVASEIETPNLNLEFPFKAKALTVTFTDIIDEIEDIGGDSITFKAEGGKLYLSANSDMGSSTIELSTENGGLLESEGGDAESVYGLEYVVNTSKMRKPSDTVEIAFGSQIPLKLRYNLPQGGYADFYIAPRAE

SEQ ID NO: 5859 - protein, 254 aa, Zea mays
  unsure (1)..(254): unsure at all Xaa locations
RQQAWLKAYPTVNEDYLKAVDKAKRKLRGLIAEKNCAPLMLRLAWHSAGTLXVATKTGGPFGTMKNPAEQAHGANAGLEIAIRLLEPIKEQFPILSYADFYQLAGVVAVEVTGGPDVPFHPGRQXKPEAPPEGRLPDATQGSDHLRQVFSTQMGLSDQDIVALSGGHTLGRCHKDRSGFEGAWTSNPLIFDNSYFKELLSGEKEGLLQLPSDKALLSDPSFRPLVDKYAADEDAFFADYAEAHLKLSELGFAEA

SEQ ID NO: 5860 - protein, 394 aa, Zea mays subsp. mays
  unsure (1)..(394): unsure at all Xaa locations
XGXARRARLPPXEMGWPLVGGMWDFLRAYKSGMPDTFIASFVRRFGRTGVYRSFMFSSPTVLVTTAEGCKQVLMDDDAFVTGWPKATVALVGPRSFVAMPYDEHRRIRKLTAAPINGFDALTGYLPFIDRTVTSSLRAWADHGGSVEFLTELRRMTFKIIVQIFLGGADQATTRALERSYTELNYGMRAMAINLPGFAYRGALRARRRLVAVLQGVLDERRAARAKGVSGGGVDMMDRLIEAQDERGRRLDDDEIIDVLVMYLNAGHESSGHITMWATVFLQENPDMFARAKAEQEAIMRSIPSSQRGLTLRDFRKMEYLSQVIDETLRLVNISFVSFRQATRDVFVNGYLIPKGWKVQLWYRSVHMDPQVYPDPTKFDPSRWEGHSPRAGTFL

SEQ ID NO: 5861 - protein, 443 aa, Shewanella oneidensis MR-1
MSQQKPGLKQSLNLWQVVVMGLAYLTPMAVFDTFGIVSEITSGHVATSYLLALAGILFTAFSYGHLVRKYPYAGSAYTYAQKNFSPNVGFMVGWSSLLDYMFMPMINMLLAKIYLTAMFPNVEPWIFIFGLVTVMTVLNLRGIDLVANFNGVIVFAQIAIILVFIGLMAHSLSLGEGEGVIASVRPFYSEQVTLAPLFTGATILCFSFLGFDGLSSLSEETKDAKRVIPRAILLTALIGGVIFVSVSYFLQLYFPDISRFEQLDAVLPEIALYVGGNLFQSIVLVATTIAVLASGMAAHAGVARILYVMGRDNMLPNKGFGYVHPKWRTPAFNVVLVGLLALSAVSFDLEMALALVNFGALVAFTFVNLSVIVQFYIKEKRNQSLKEHLQYFVLPLCGAATIGVLWINLEPQSLELGLIWGAVGMLYLALRSLRLRKAVELQS

SEQ ID NO: 5862 - protein, 351 aa, Clostridium beijerinckii
MKGFAMLGINKLGWIEKERPVAGSYDAIVRPLAVSPCTSDIHTVFEGALGDRKNMILGHEAVGEVVEVGSEVKDFKPGDRVIVPCTTPDWRSLEVQAGFQQHSNGMLAGWKFSNFKDGVFGEYFHVNDADMNLAILPKDMPLENAVMITDMMTTGFHGAELADIEMGSSVVVIGIGAVGLMGIAGAKLRGAGRIIGVGSRPICVEAAKFYGATDILNYKNGHIEDQVMKLTNGKGVDRVIMAGGGSETLSQAVKMVKPGGIISNINYHGSGDALLIPRVEWGCGMAHKTIKGGLCPGGRLRAERLRDMVVYNRVDLSKLVTHVYHGFDHIEEALLLMKDKPKDLIKAVVIL

SEQ ID NO: 5863 - protein, 452 aa, Oenococcus oeni MCW
MKNRDVSVSSAQGMHLSKTLNIVETVSLAASDISPTSGVFLNMPVAIAMVGTGSFLVSLMAGIIAICVALTMAEIGSAFPKSGGIYSVIHRVMGKKVGFLALVAYLVEGVFIPAVTSMGSATYLAAVFPALKVNLLAPALMLIAMLISIANISSTGKFTTFLLALELLVVLTITIACLLNLKQPVSVLFSTQVIHGNSFSNVSWPTIFSTIAVMLFSFNGFDSALNFSEEMSGNQKSIGRSVFGAASIGIIAQLIPLAVILLAAPSLKGFLKSSNPILYVSNDVLGPTMHDFLSLGISLAMFACTISVLLQFSRVLYTSGRDNMWPKTINHFLQSIHPKFKTPWKATLFLGVVDIFLNFVSNLGDLISFTSVLVVLLYALIGICDIIARGKKVSFPYKNTFGIMAPIITIVASVYVLSRQTFINLLISLVILAVSFIYVSLFKKADTIDLNL

SEQ ID NO: 5864 - protein, 160 aa, Zea mays
MAGMGDMPMRPARPGPPMQHRGPPPMARLRPEPIDREKTCPLLLRVFTRVAGHHQNEEFAVRGKEPKDEVQIYTWKDATLRELTDLVKEVALPARKRNARLSFAFVYPDKNGRFVVRQHVLVGRQKVGSTFAYGHGRGDDAKTLAELGFQIGDYLSVAIM

SEQ ID NO: 5865 - protein, 444 aa, Brassica oleracea var. alboglabra
MRGVIPNYHHSYTLFFFVILVLFPHVFSTNTLSPNEALTISSNKTLVSPGDVFELGFFKTTTRNSPDGTDRWYLGIWYKTTSGHRTYVWVANRDNALHNSMGTLKISHASLVLLDHSNTPVWSTNFTGVAHLPVTAELLANGNFVLRDSKTNDLDRFMWQSFDYPVDTLLPEMKLGRNLIGSENEKILTSWKSPTDPSSGDFSFILETEGFLHEFYLLKNEFKVYRTGPWNGVRFNGIPKMQNWSYIDNSFIDNNEEVAYSFQVNNNHNIHTRFRMSSTGYLQVITWTKTVPQRNMFWSFPEDTCDLYKVCGPYAYCDMHTSPTCNCIKGFVPKNAGRWDLRDMSGGCVRSSKLSCGEGDGFLRMSQMKLPETSEAVVDKRIGLKECREKCVRDCNCTGYANMDIMNGGSGCVMWTGELDDMRKYNAGGQDLYVKVAAASLVPS

SEQ ID NO: 5866 - protein, 257 aa, Streptomyces collinus
MRTDLRNKVVLVTGASSGIGRATAVAYGEEGAKVAITYHSNEDGARETARLVTEAGGTALVVRYDLADERCIRDAVGRVAEEWGGIDVLVANAVVWSEAIPRPGQPVPRFEDVPAKQWQEVLRTSVDAVFHTLQAVLPWMRGRPWGRIVLLGAGLADTGKAGAGAYGAGKSALFGLMRSLAWELGPDGILVNMVVPGQTSTETVRAHVPPGFLEEKGKTLPSGRMSAPEDVARAITFLGSAANGNTNGETLRVTGGA

SEQ ID NO: 5867 - protein, 314 aa, Oryza sativa
  unsure (1)..(314): unsure at all Xaa locations
SPNPKPKLSSSEAQTLLSSGDKAKLVETLKNKLQALAEQHVDMLESLAPAVRKRVDVLMEIQSQHDELEAKFFEXKAALEAKYQXLYGPLFSKRSKIVSGVLEVEGETEEAEEKGVPDFWLNAMKKNEILAEEIHESDEXALKYLKDIKWCGIDDPKGFKFEFFFDTNPFLKNQVLTKTYHMIDEDDXPILEKAIGTEIEWHLGYCLTQQVLTKESSESTKPITKTEECESFFNFFSPPQVPDDDAKNDEYMAEELHNQMERDYDIASTLRDKIIPHAVSWFTREAVQDEDYGASWVDDEEEDDDDDEYSDEEA

SEQ ID NO: 5868 - protein, 341 aa, Annona sp. SM-1999
EPVNPADVPVTAGGALKSYKLAAKAISRLQSLPSGNIPLLCDVLVREVSELTGYDRVKAYKFHEDEHGEVIAECRRSDLEPYLGLHYPATDIPQASRFLFMKNKVRMISDCLSPPVKVIQGKGLAQPLSLCGSTLRAPHGCHAQYMANMGSISSLVMSVTIDEDNDDTCSEQQQKGRRLWGLVVCHHTSPRFVPFPLRYACEFLMQVFGIQLNKEVELAAQSREKHILQMQTMLCDMLLRDAPVGILSQSPNVMDLVNCNGAALYYQNQFWLLGTTPTEAQIRDIVGWLLEYHNSTTGLSTDSLVEAGYPGAAELGDDVCGMAAVRITSKDFLFWFRSHTA

SEQ ID NO: 5869 - protein, 217 aa, Magnetospirillum magnetotacticum
MAVVNRRIVLAARPHGEPKPEHFRLEEARTSAPKQGEVLLRTRWLSLDPYMRGRMSAAKSYAKPVEIGEVMVGQTVSEVVASENPAFAEGDLVLGYSGWQEFALSDGKGLRRLDPADGPPSQFLGVLGMPGMTAYAGLLEIGRPQPQETVVVAAAAGPVGSLVGQIARLRARGRWHRRGRGEMRLPDRDAGLDAAIDTGPATSPMPGPRLPEGSTCI

SEQ ID NO: 5870 - protein, 238 aa, Pseudomonas fluorescens PfO-1
MLFDWQGAWASVIHHPLFGIGITLGAYQLVLAAFEKTRWIFLQPVLVSMLLVIGVLVGCGLTYAEYRKSTEILSILLGPATVALAVPLYLNLRRIRQLFWPIFTTLVIGGVVATGMGVALGWWFGADHMILMTMAPKSVTSPIAMLVAEQIGGVAALAAVFVLITGVIGAIFGPALLTRLGVHSPEARGMALGMTAHAVGTSVALQESDECGAFAALAMSLMGVATAVFLPLAVSMVV

SEQ ID NO: 5871 - protein, 275 aa, Triticum aestivum
WIPRAAGITPHPRSCTPSISLIRTHPSVNKKEKGEPASHGAQDVRQDGDAARCRGRRDRARARSRGGGNGGGVGTHYRGVRKRPWGRYAAEIRDPAKKSRVWLGTYDTAEEAARAYDAAAREYRGNKAKTNFPFASASAPPAAAAALTGDGSRSSNSSTVESFGGDVQAPMQAMPLPPSLELDLFHRAATSTAGAGMRFPFSGYPVSHPYYFFGQAAAAAAAGCHMYSQAPKVTVASVSPSDSDSSSVVDLAPSPPARKPVPFELDLNCPPPAEL

SEQ ID NO: 5872 - protein, 584 aa, Vicia faba
MGSVEDDSSRLEEALIQDEESKLYTGDGSVDFKGRPVLKKNTGNWKACPFILGNECCERLAYYGIATNLVKPILLAKLHEGNVSAARNVTTWQGTCYLAPLIGAVLADSYWGRYWTIAIFSMIYFIGMGTLTLSASIPALKPAECLGAVCPPATPAQYAVFFIGLYLIALGTGGIKPCVSSFGADQFDDTDSRERVKKGSFFNWFYFSINIGALISSSFIVWIQENAGWGLGFGIPALFMGLAIGSFFLGTPLYRFQKPGGSPLTRMCQVVAASFRKRNLTVPEDSSLLYETPDKSSAIEGSRKLQHSDELRCLDRAAVISDDERKRGDYSNLWRLCTVTQVEELKILIRMFPVWATGIVFSAVYAQMSTMFVEQGTMMDTSVGSFKIPAASLSTFDVISVIFWVPVYDRFIVPIARKFTGKERGFSELQRMGIGLFISVLCMSAAAIVEIKRLQLAKELDLVDKAVPVPLTIFLQIPQYFLLGAAEVFTFVGQLEFFYDQSPDAMRSLCSALSLLTTSLGNYLSSFILTVVLYFTTRGGNPGWIPDNLNKGHLDYFSGLAGLSFLNMFLYIVAAKRYKSKKAS

SEQ ID NO: 5873 - protein, 437 aa, Brassica oleracea var. acephala
MKGVRKTYDSSCTLSFLLVFFVMIIFHPVFSINTLSATESLTISSNRTLVSPGNVFELGFFRTTSSSRWYLGIWYKKLSNRTYVWVANRDHPLSNSTGTLKITSNNLVILGHSNKSIWSTNRTKGNERSPVVAELLANGNFVMRDSNNNRSSRFLWQSFDYPTDTLLPEMKLGYDLKTGLNRFLTSWRSSDDPSSGDFSYKLRARRLPELYLSSGIFRVHRIGPWNGIRFSGIPDDRKLSYLVYNFTENNEEVAYTFRMTNNTIYSRLTVSFSGYIERQTWNPSLGMWNVFWSFPLDSQCDAYRACGPYSYCDVNTSPICNCIQGFNPSNVEQWDQRVWANGCIRRTRLSCSGDRFTMMKNMKLPETTMAIVDRSIGVKECEKRCLSDCNCTAFANADIRNGGAGCVIWTGRLDDMRNYAADHGQDLYVRLAAANLV

SEQ ID NO: 5874 - protein, 68 aa, Zea mays
DLVKKVALPARKRNARLSFAFEYPNKNGRFVVRQVGSPFAYGHGRGDDAKTLAELGFQIGDYLSVAIM

SEQ ID NO: 5875 - protein, 352 aa, Frankia alni
MSYQAEYIWIDGTEPEPLMRSKTRIIKDGKEPEIWGFDGSSTNQAPGSNSDCVLRPVFETPDPIRGGDNRLVLCEVQLTDFTPPTNTRAAALGVAERYADMSPMFGIEQEYTFFKDGRPYGWPEVGYPAPQGPYYCGVGGSKMPGRQIVERHTQACLDAGLAIEGTNAEVMMGQWEFQIGVLPAPAIGDQIWLGRWLLHRIAEDYGVEVSFAAKPIPGDWNGAGAHTNFSTKQTMEGWDAIVTCCEALGTRVTEHVTHYGKGIEDRLTGKHETAPWNKYSWGASDRGASVRIPWAVEKAKKGWLEDRRPNANMDPYLVTALMIDTCCSALAGDKPTLFVPSQTTPAPAEASV

SEQ ID NO: 5876 - protein, 202 aa, Nostoc punctiforme
MARILYYAQRSPYARKVRIVLAEKQLPYEPKETDINNKSPEFLSLSPIGKVPVLVDENDLVFWDSTLIVEYLDETYPQPSFYPGDRIERLCCRQGEELADSLIDNIVALWYETRKGNQADFATQAKYQSSINRLLGVFEQKLTNSAYLFNETVSAVDVAAISGLGYYSLRFGHNWQQEYPKLRQWFELLHQRQSVYSTMPKA

SEQ ID NO: 5877 - protein, 611 aa, Triticum aestivum
  unsure (1)..(611): unsure at all Xaa locations
MQLVDNHHSKLDMPSPSQTAASENATTVPCGGGDQRRTEEEVSRLGACTGSTLIQANVPPLFCFSWFRFESKGLQGDPDRRTSTRDRRSSWGYVFILVNNCLQYSAYYGVSTNLVNFLKVQLHSGSKAAANSVTNWQGTASITPLAAGFLADSFLGRYWTITLFLFISVAGYGVVAASAVFYAGLYLVALGGALQPVLSSFGADQFDAESDEEERRRQSSFFNWFYLSIVVGSLVGGTVLVXWVQSAHGWRLGYGIPALLSVLAVALFLAGTGAYRRHQPPGGSPLTRIAQVVVAAARKCDVEIPTDATLLHECDGDDGMSVIQGSRRLAHTDEFRFLDKAAVETAGDKARPASPWRLCTVTQVEELKCVLRLLPVWACGIIFAAAYTQMTTTFILQGDTLDPRVGSFRVPPAVLTVFDTLSVMLWVPLYDRAVVPLARRLTGHRRGFTQLARMGVGFVILTIAMLAAGTLEVARRRVVARHGTYTGEDGAGYVPMSIFWQVPQYVVVGAAEVFTFIGQMEFFYDQAPDAMRNVCSGLSSAAFALGNYASSALVAVVVRAMTRGGRPGWIPDDINDGHLDYFFWLLAMLCIGNFSVYLLVARWYTYKKTAD

SEQ ID NO: 5878 - protein, 423 aa, Kluyveromyces lactis
MRVIRQLHTSKRLLQSLVDKQKYQATTYARPNHLVLTRGKNAILYDDVNNKEYIDFTAGIAVTALGHANPEVAEIMYKQSKKLIHSSNLYYNEECLKLSENLVEATKSFGGQYDASRVFLCNSGTEANEAALKFAKRYGILKSPSKQGIIAFQNSFHGRTMGALSVTSNPKYREPFGSLIPGVEFLNINDELTKLDQQVSSLKEKTAGLIVEPIQGEGGVFPIPLDSLVGLKKICEDHDIIVIYDEIQCGLGRSGKLWAHSYLPKEAHPDIFTTAKALGNGFPIAATVTNDKVNDILKVGDHGTTYGGNPLGSAVGNYVVNVIAEQKFLDEVNKKGEIITNRLRKLQERFPEHIKDIRGKGLMIGCDFDEAPAKIVDAARDSGLLIITAGKTTVRFVPALTIEDNLLEKGLNIFEKAVEKVYS

SEQ ID NO: 5879 - protein, 450 aa, Pyrobaculum aerophilum str. IM2
MSIKIEEVKTQFERFAAHSHIKGLGVRDGKVEFIGDGFVGQVEAREAAYIVVKMIKEGKFAGKGVLIVGPPGTGKTALALGIARELGSETPFVALSGGEIYSLEVKKSEFLMRALRRAIGIKVREWRKVYEGEVRSIELRYGKHPYNPYLQRVMGATIKLRTRDEEKVLRIPAEIAQQIIELGVEEGDIIMIDEETGAVSVLGRGEGGEQYDVAIKRRAELPKGPVYKEKEIVRFFTLHDIDVSLARQRGLISAMIFGFAEEVKEIPDEVRRQSDEIVKKTVEEGKAELVPGVLFIDDAHLLDIESFSFLMRAMETEFAPIIIMATNRGIAKIRGTDVEAPHGIPQDMLDRLVIIKTRPYTAEEIREIITIKAKEQNISLSKDALELLTKIGVEHSLRYALQLLTPAYIIAKERGKASVTKDEVEYVKSHFISVKESVEYVKSLEEKFLR

SEQ ID NO: 5880 - protein, 483 aa, Rickettsia sibirica
MAEFTPITIAYGDGIGPEIMEAVLYILRKAEARIRLETIEVGEKLYKKHYTSGISEESWESIQRTGIILKAPITTPQGGGYKSLNVTIRKTLQLFANIRPAVSFHPFTRTLHPNLNLTIIRENEEDLYAGIEYRQTHNMYESMKLISHTGCEKIIRYAFEYAVKNNRKKVMCLSKDNIMKFSDGILHKVFNEIAKEYPQINNAHYIIDIGTARLATKPEIFDVIVTSNLYGDIISDLAAEISGSVGLAGSANIGQHYAMFEAVHGSAPDIAGKDIANPSGLLNAAIMMLVHIGQGDIATLIENAWKKTIEDGVHTADIYNEQSSSKKVGTKEFAAEVTKRLGQLPTKLPKADYPLIAEKQESNIDYKIDTKEVKKLVGTDIFVNMNVSAAHDIADKINKLDLGNFELKTISSKGLKLWPRDTRFETVSDHWCCRFMNKDGTEIKHLDITRLLEALSTANIDFIKVENLFEFDGVAGYSLAQGE

SEQ ID NO: 5881 - protein, 274 aa, Chlorobium tepidum TLS
MVTDHGYKCRITNIVPLSEHEKLFQLRIVDPRERELFTFRPGQFLMLEVPGYGEAPISISSATSNREFIELCIRKAGHVTSALFEAKQGAFVAVRGPFGTSFPMEAMQDHDVLLIAGGLGIAPLRAPLFWINDHRDHYRNVSFLYGAKEPSQMLFTYQFEEWKTVSHIDLHTIVEKPDDQWTGRTGMITLLFDEITIDPKNTWAIVCGPPVMFKFVCTHLDKLGIPMNRMFVSLERHMNCGMGKCCRCMVGSTFTCLDGPVFDYWSVMNLKEAI

SEQ ID NO: 5882 - protein, 289 aa, Mesorhizobium loti
MTPGHEFSGIVEAIGKAVSGFAVGDRVTGDPNIACGRCPHCHAGRVNLCRNLNAIGIHRDGGFAEYVVLPQKQAFILPADLPPTHGAFCEPLGCCLHGVDLAQIKPGSSVVVLGGGVIGLLTVQLAKLAGATTIILSTRQASRRVLAEELGATATVDPTAGDVIDAIAGSEGLMPGGADVVFECAGVRDTVEQSMRLARAGGTVVIVGVTPQGMKAEFEPFDLLFRELKVVGSFLNPYTHRRAAELIASGAIEIDRLISRQVPLEEAADVIANPPAPGEVKVLVVPRQG

SEQ ID NO: 5883 - protein, 473 aa, Thermoanaerobacter tengcongensis
MDEKVKIKEEIPEYITLEEALTLNKNQVKENYKEYINSVFVSMLSMLQFDKLFVRAKGVSVWDSEGNEYYDFLGGYGALNLGHNPDEVIEAVEKVKDMPNLLQASIGNLPGVLAHNLARVTPGNLKRSFFCNSGAEAVEGALKLAKIASGKKKIVYCENSFHGKSMGALSVTGRRKYQKYFEPLVPETVAVPFGDEKALEEALKEKDVAAFIVEPIQGEGGVIVPPEGYLRKARELCTKYEAYLIVDEIQTGFGRTGKMFACEHEEVVPDIMTLAKSLGGGVMPIGAYITTDEIWQKAYGTMEKALLHTSTFGGNTYACAAAIASIQAIIEKKLSEAAKEKGEYFLGRLKELKEKHPKLIKDVRGKGLLIGIEFNQPEGGLLDKLSGGAISKLSSEYIGSLIAAELQNKHRIITAYTLNNPNVIRLEPPLIVTKEQIDKVVDALDEILTRNSSFLGITVSGAKTVLGSLFKRQ

SEQ ID NO: 5884 - protein, 497 aa, Yarrowia lipolytica
MTVTEQEFLASYPQKVAPGGPTGYPGNLTAEQEQKLGELKMILLTKGYEDRTDDATLLRFLRARKFDVPLAQEMWENCEKWRKEFGTNTILEDFWYKEKKEVAKLYPQYYHKTDKDGRPVYVENVGKVNIHEMYKITTQERMLRNLVWEYESFVRHRLPACSRVVGHLIETSCTILDLKGVSLSSASQVYGFLKDASNIGQNYYPERMGKFYLINAPFGFSTVFSVIKRFLDPVTVSKIHVYGSNYKEKLLAQVPAYNLPIKFGGQSSSKIGVELSDDGPWRDPQFVGPEAWPPWLVSDPPVPPPSSPTPPPTPSPLLPPRSVLTTRPLTQRPTVTELLLPLPELELLLLAVLLLLLELLLPSRLLLPRLLLPRRQGSRSRCCQDRHCPCPHRQDCCTSDQLFPPEMLAMMEQNEKKAEKAAEAKTKGGAAPQANAFTDEQLAQLNSLPQQVATGGVSQPLPDSHVTQGVPTVAKIAELPPVPMRMPIFPIKTKKHT

SEQ ID NO: 5885 - protein, 366 aa, Triticum aestivum
  unsure (1)..(366): unsure at all Xaa locations
MGKGGKGEAAAAVAGEGENMAAWLVAKNTLKIMPFKLPPLGPYDVRVRMKAVGICGSDVHYLKEMRIAHFVVKEPMVIGHECAGIIEEVGDGVKHLAVGDRVALEPGISCWRCRHCXKGGRYNLCDDMKFFATPPYHGSLADQIVHPGDLCFKLPDNVSLEEGAMCEPLSVGVHACRRADVGAEKSVLIMGAGPIGLVTMLSARAFGAPRIVIADVDDHRLSLAKSLGADAVVKVSGNAEDLAGEIERIQAAMGGDIDVSLDCAGFSKTMSTALEATRPGGRVCLVGMGHNEMTVPLTSAAIREVDVVGIFRYKDTWPLCLEFLRSGKIDVKPLITHRFGFSQGEVEEAFEVSARGRDAIKVMFNL

SEQ ID NO: 5886 - protein, 370 aa, Rhodococcus rhodochrous
MMKTQAAILWERGGPWSVEEIDLDPPRHGEVLVEMGGSGLCHSDEHVLTGDLPWPLPMVGGHEGAGTVVEVGPGVEGLAAGDRVIFGFLPACGRCAACSAGMQNLCELGQYLGDGTQISDHTSRHHARGQDLGLMCLLGTFAQHTVVSEANCIKIDDDIALDKACLLGCGVVTGWGSAVFTGGVKPGDTSVVVGVGGIGINAVQGAAMNGSQYVVAVDPVEFKRTKALELGATHAVATSEEAQALVADLTYGRGANVVVNTTGVGEGDQIGASLAMTAKRGTVVVTNLHRATEETVKMSALDLVLMEKRVVGSLFGSANPRLHIPKMLGLYRSGHLKLDELATRSYKLDEVNTGYQDMREGRNLRGVITF

SEQ ID NO: 5887 - protein, 369 aa, Methanosarcina barkeri
MQTYGRQPLVLSEGKGAIVRDINGKEYIDCVAGIAVNNVGHCHPAVVRAIQAQAEKLLHVSNLYYTEIQAELAEALVSVTGMERVFFCNSGTEAVEAAMKLARMASGKSAFIAAEHSFHGRTIGALSVTHKSMYRDPFMPPVSSETTFVPYSDADAIRQAISENTAAVILEPIQGEGGVNIPNPEYLKEVREICDETGTFLIFDEVQTGFGRTGTWFCKDQFGVEPDIMSMAKAIGGGFPMGAIAARDGLSFGRGQHASTFGGGPLACAAALASIEAIREEELLKRSKENGAYFMGKLRNMEREDVVEVRGKGLMIGVEINHPCSDFVDFAREHGVLVNCTSESVLRLVPPLVITKEQIDKVVDVLEQA

SEQ ID NO: 5888 - protein, 95 aa, Oxalis lucumayensis subsp. lucumayensis
  unsure (1)..(95): unsure at all Xaa locations
LYAGINISGTNGEVMPGQWEYQVGPSVGIEAGDHIWASRYILERITEQAGVVLTLDPKPIDGDWNGAGCHTNYSTKSMRDEGGFEVIKKAILXLS

SEQ ID NO: 5889 - protein, 488 aa, Eschscholzia californica
  unsure (1)..(488): unsure at all Xaa locations
MEVVTVALIAVIISSILYLLFGSSGHKNLPPGPKPWPIVGNLLQLGEKPHAQFAELAQTYGDIFTLKMGTETVVVASTSSAASEILKTHDRILSARYVFQSFRVKGHVENSIVWSDCTETWKNLRKVCRTELFTQKMIESQAHVREKKCEEMVEYLMKKQGEEVKIVEVIFGTLVNIFGNLIFSQNIFELGXPNSGSSEFKEYLWRMLELGNSTNPADYFPMLGKFDLFGQRKEVAECLKGIYAIWGAMLQERKLAKKVDGYQSKNDFVDVCLDSGLNDYQINALLMELFGAGTETSASTIEWAMTELTKNPKITAKLRSELQTVVGERSVKESDFPNLPYLEATVKETLRLHPPTPLLLPRRALETCTILNYTIPKDCQIMVNAWGIGRDPKTWIDPLTFSPERFLNSSVDFRGNDFSLIPFGAGRRICPGLPIANQFIALLVATFVQNLDWCLPNGMSVDHLIVEEKFGLTLQKEPPLFIVPKSRV

SEQ ID NO: 5890 - protein, 149 aa, Thermoplasma volcanium
MRAETVKRIVSDLKGVGTSRVYIDTNKLDKIDEAATRSDILALIEQDVVKIKQKKGISNGRLKKRIKQLSKDRRRGPGSLRGTRNARYKRKERWIDTIRALRDELRKLKKDGKIDPAVYRKYYRIIKSGSIKSRAQLVSHIKSAGLLKE

SEQ ID NO: 5891 - protein, 392 aa, Tetrapterys discolor
DLEPVNPADVPVTAAGALKSYKLAAKAISRLQSLPSGNISLLCDVLVKEVRDLTGYDRVMVYKFHEDEHGEVVSECRRSDLESYLGLHYPATDIPQASRFLFMKNKVRMICDCLAPPVKVIQDERLPQPLSLCGSTLRSPHGCHAQYMTNMGTIASLVMSVTVNDDDDMMDGDQQQMTRKLWGLVVCHHTSPRFVPFPLRYACEFLIQVFGVQINKEVELTAQVREKHILQIQTMLCDMLLRDAPVAIITQSPNVMDLVKCDGAALYFKKKTWLLGVTPMEEQVRDIAEWLLEYHSGNTGLSTDSLMEAGYPGASDLGDAVCGMAAVSITSRDFLFWFRSHTAKEIKWGGAKHDPDDKDDGRKMHPRSSFKAFLEVVKWRSVPWEDVEMDAI

SEQ ID NO: 5892 - protein, 364 aa, Escherichia coli K12
MMSKNYHIAVLPGDGIGPEVMTQALKVLDAVRNRFAMRITTSHYDVGGAAIDNHGQPLPPATVEGCEQADAVLFGSVGGPKWEHLPPDQQPERGALLPLRKHFKLFSNLRPAKLYQGLEAFCPLRADIAANGFDILCVRELTGGIYFGQPKGREGSGQYEKAFDTEVYHRFEIERIARIAFESARKRRHKVTSIDKANVLQSSILWREIVNEIATEYPDVELAHMYIDNATMQLIKDPSQFDVLLCSNLFGDILSDECAMITGSMGMLPSASLNEQGFGLYEPAGGSAPDIAGKNIANPIAQILSLALLLRYSLDADDAACAIERAINRALEEGIRTGDLARGAAAVSTDEMGDIIARYVAEGV

SEQ ID NO: 5893 - protein, 251 aa, Zea mays
MANAGGGAAGEGEWLKVAQLRALVQEDHRAKEVDNLTLRRFLRARGHNVDKAAAMLLKFLRWRAEAAPGGGTVREEQVRGELEQDKIYMGGVDRTGRPIIVGLLAKHYSANRDMAEFKSFVVYFFDKICARIPRGQEKFLAIMDLKGWGYANCDVRAYIAAIEIMQNYYPERLGKALMINVPYIFLKVWKTMIYPFIDANTRDKFVFVDDKSLRETLRREIDESQLPEFLGGKMPLVSLKDYAQQPQPVCE

SEQ ID NO: 5894 - protein, 276 aa, Sinorhizobium terangae
WGFDGSSTMQAEGRSSDCVLKPVAVYPDPVRTNGVLVMCEVMMPDGKTPHPSNSRATILDDEGAWFGFEQEYFFYKNGRPLGFPEQGYPAPQGPYYTGVGYKNVGDIARQIVEDHLDICLAAGINHEGINAEVAKGQWEFQIFGKGSKKAADEVWLARYLLQRLTEKYGIDIEWHCKPLGDTDWNGSGMHCNFSTAYMREVGGKEYFEALMAAFEKNLHEHIAVYGPDNHMRLTGKHETAPWNKFSYGVADRGASIRVPHSFVNNGYRGYLEDRRP

SEQ ID NO: 5895 - protein, 156 aa, Zea mays
LSLFLPLATACHLAAPLGLAPLPRGCASAGVVAVVRCARSSGSKIPRGVAVRATSGGEGATEEVPEIVKAAQDAWAWARPRYAVATIGVAAIVALWTVVGAIKAIDKLPLLPGVLEIVGIGYTGWFTYRNLVFQPDREALIGKIKSTYKEIPGRSN

SEQ ID NO: 5896 - protein, 158 aa, Zea mays
  unsure (1)..(158): unsure at all Xaa locations
MEGVMTTRSKHRCHEEDQEMTMVELRRGPWTLEEDNLLMNYTACHGEGRWNLLARCSGLKRTGKSCRLRWLNYLKPDIKRGNLAPEEQLLILELHSKWGNRWSRIAQHLPGRTDNEIKNYWRTRVQKQARQLRVDANSAVFRDAVRXYWMPRLLEKTM

SEQ ID NO: 5897 - protein, 422 aa, Brassica tournefortii
FYHSCTIFFVVLLQFHHVFSTNTLSSNEALTISSNRTLVSPGDVFELGFFKTTTRNSQDGADRWYLGIWYKTTSDQIQRTYVWVANRDNPLHNSTGTLKISHANLVLLDQSDTPVWSTNLTGVAHLPVTAELLANGNFVLRDSKTKDLNRFMWQSFDFPVDTLLPEMKLGRKFNSSEKEKILTSWKSPTDPSSGDYSFILETKGFLHEFYLFKNEFKVYRTGLWNGVRFNGIPKKMQNWSYIVNDFIDNKEEVAYSFQVNNKNHNIHSRFRMSSTGYLQVITWTKTVPQRNMFWTFPEDTCDLYQVCGPYAYCDMHTTPRCNCIKGFVPKNAGRWDLRDMSGGCVRSSRLTCGEGDGFLRLGQMKMPETSEAVVDKMIGLKECREKCVRDCNCTGYANMDIMNGGGCVMWTGELVDMRKYDA

SEQ ID NO: 5898 - protein, 266 aa, Streptomyces coelicolor A3(2)
MTSPSVLQAPHASSLDLHGRTALVTGAAGGIGRACALRLAAAGAEVRAVDRDAAGLEALAGSCGDLAGSVEPQVLDLTDLDAAERAAAGTDVLVNNAGLQLVRPLEEFPPDVFHTVLTVMLEAPFRLIRGALPHMYGQGWGRIVNISSVHGLRASAYKAAYVSAKHGLEGLSKTAALEGAAHGVTSNCVNPAYVRTPLVERQIADQARAHGLPEEQVLSDVLLRDSALRRLIEPDEVAEAVAYLCGPYTVGLTGTSLVLDGGWTAH

SEQ ID NO: 5899 - protein, 426 aa, Ralstonia solanacearum
MNARDPQHNAQWNARRLAATPRGVGVMTDRYAEHAENAQFWDVEGKRYIDFAAGIAVVNTGHRHPRLVQAVREQLERFTHTAFQIVPYASYVELAERLNTLTPGAHAKKTAFFSTGAEAVENAIKIARAHTGRPGVIALTGAFHGRTFMGMSLTGKVVPYKTGFGPFPGSIYHVPAPIALHGVSTQDSLDAIGRLFKADIDPRQVAAIIFEPVQGEGGFYQMPADFVRALRALCDEHGIVMIADEVQTGFARTGKLFAMEHTGVLPDLVTMAKGLAGGLPLSAVTGRAEIMDAPAPGGLGGTYAGNPLAVAAAHAVLDIIDEEKLCERSAALGRRLVDALDAAKAGQPRIAEVRGVGAMVAIEFNTPDGKPDADFTRTVQQRALEAGLLLLSCGVYGNVIRFLFPLTIEDAVFEEGLAILKHALEG

SEQ ID NO: 5900 - protein, 487 aa, Escherichia coli
MITEFVFIPIFAIAAGVAQSLQYLNRYHVIREPPEHILNRLPSSASALACSAHALNLIEKRTLDHEEMKALNREVIEYFKEHVNPGFLEYRKSVTAGGDYGAVEWQAGSLNTLVDTQGQEFIDCLGGFGIFNVGHRNPVVVSAVQNQLAKQPLHSQELLDPLRAMLAKTLAALTPGKLKYSFFCNSGTESVEAALKLAKAYQSPRGKFTFIATSGAFHGKSLGALSATAKSTFRKPFMPLLPGFRHVPFGNIEAMRTALNECKKTGDDVAAVILEPIQGEGGVILPPPGYLTAVRKLCDEFGALMILDEVQTGMGRTGKMFACEHENVQPDILCLAKALGGGVMPIGATIATEEVFSVLFDNPFLHTTTFGGNPLACAAALATINVLLEQNLPAQAEQKGDMLLDGFRQLAREYPDLVQEARGKGMLMAIEFVDNEIGYNFASEMFRQRVLVAGTLNNAKTIRIEPPLTLTIEQCELVIKAARKALA

SEQ ID NO: 5901 - protein, 478 aa, Xanthomonas campestris pv. campestris str. ATCC 33913
MGPAAAGVCDLLEYTMSASSHSTDHQPDAWSPQSWRQRTALQMPTYPDAAALEHTLDELRQLPPLVTSWEIFALKRQLAEAQEGKRFLLQGGDCAENFSDCESGTISNRLKVLLQMSLVLVHGLRLPVVRVGRFAGQYAKPRSADTETRDGVTLPSYRGDVINAPAFTEAARVPDPRRMITAHSRSAMTMNFVRALIDGGFADLHHPEYWNLQWVGYSPLAADYQKMVSSIGDAVRFMETLSGAEVYNLNRIDFYTSHEALLLPYEEGLTRQVPRQWGWFNLSTHYPWIGMRTAALDGAHVEYLRGVRNPIAIKVGPSVQPDQLLRLMDVLNPEDEPGRLSFIHRMGAAQIAEKLPPLLDAVKRDGRRVLWVCDAMHGNTESTGNGYKTRRFDNIRSEVELSFDLHAAAGTRLGGVHLELTGEDVTECTGGARELTERDLERAYRSSVDPRLNYEQSLEIAMAIVRKQQQVAAQPLGG

SEQ ID NO: 5902 - protein, 219 aa, Malva pusilla
MTGEVVLLDFWPSPFGMRSRIALAEKGINYEYKEEDLRNKSPLLLQMNPVHKKIPVLIHNGKPICESLIQVQYIDEVWHDKSPLLPSDPHQRAVARFWADFVDKKMYEQGSRVWKTKGEEQATAKKEFIESLKLLEGELGASLTFGGENLGYVDGVLVPFYSWVYAYEKCGNFNIEPECPKLIAWAKRCMEKESVAKSLPDQEKVYDFVLQLKKIYGIE

SEQ ID NO: 5903 - protein, 167 aa, Synechococcus sp.
MKIRNVSMAPQVTDIAVTTIDGAAKSLSDYAGQVLLIVNVASYCGYTSQYSGLEALYRQYRDRGLQVLAFPCNDFGAQEPGSNEEIKTFCSTRFDVSFELFDKVHAKGADQHPLYAALTQTDPAGDVAWNFEKFLVGKDGTVLARFKSGVAPNDASLIQAIEAALAA

SEQ ID NO: 5904 - protein, 343 aa, Xylella fastidiosa 9a5c
MKINSNLFDCLLPIVAAPMAGGPTTVALAQAVSGVGGFPFLAAGYKSVEALATEIAVLRASGGDFGVNLFVPSPDMVDAEAFSIYAAKLQSEALPYGLCLDPLPVMGDDDGWPDKLALLLNDPVPVVSFTFGLPAVRDIAALRCAGSRVLASVTLPAEAQAAMEAGVDGLVVQGPDAGGHSATYDPGRPFTPLKTVSLVRRVCAVSRLPVIAAGGVDGPVMVRALLQAGAVAVAIGTLLLRTKESGATQVHKDALANPAYTETAITHAFTGRPARTLRNGFVNRYHASAPLGYPAIHHLTRPLRQAAASAGDADVLHLWAGTGYRQAMDGSAVDVIRYLAAGL

SEQ ID NO: 5905 - protein, 159 aa, Prochlorococcus marinus subsp. marinus str. CCMP1375
MLINVKETVVETADGEKKNLGDYLGNVLLIVNVASLCGNTPQYKGLEKLFEKYKKNGFCVLAFPCNDFAGQEPGTIEEIKEFCSVKYGTTFEIFNKVHAKGLTTEPYTTLNKVEPKGDVSWNFEKFLVGKDGNVIARFEPSVEPSSEELITAIEVALSS

SEQ ID NO: 5906 - protein, 318 aa, Fusobacterium nucleatum subsp. nucleatum ATCC 25586
MKNNKICEILGIKYPIFQGAMAWVSGGELAGAVSKDGGLGIIAGGGMEPELLRENIRKAKAITTNPFGVNLMLLRPDVEDQMNVCIEEGVKVITTGAGNPGAFMEKLKAANIKVIPVIPTVKLAERMEKIGADAVIVEGMESGGHVGTLTTMALLPQVVNAVNIPVIAAGGIASGKQFLAALAMGAEGIQCGTIFLTAKECLIHQNYKNIILKAKDRSTTVTGTSTGHPVRVIENKLAKEMIELERSGAPKEEIEKLGTGSLRLAVIDGDVERGSFMSGQVAAMVNDERTTKEILEFLMNDLKLETEVLKRRLENWDI

SEQ ID NO: 5907 - protein, 352 aa, Acinetobacter sp. SE19
MHCYCVTHHGQPLEDVEKEIPQPKGTEVLLHVKAAGLCHTDLHLWEGYYDLGGGKRLSLADRGLKPPLTLSHEITGQVVAVGPDAESVKVGMVSLVHPWIGCGECNYCKRGEENLCAKPQQLGIAKPGGFAEYIIVPHPRYLVDIAGLDLAEAAPLACAGVTTYSALKKFGDLIQSEPVVIIGAGGLGLMALELLKAMQAKGAIVVDIDDSKLEAARAAGALSVINSRSEDAAQQLIQATDGGARLILDLVGSNPTLSLALASAARGGHIVICGLMGGEIKLSIPVIPMRPLTIQGSYVGTVEELRELVELVKETHMSAIPVKKLPISQINSAFGDLKDGNVIGRIVLMHEN

SEQ ID NO: 5908 - protein, 254 aa, Enterococcus faecalis V583
MPKEFETKRVLVTGAASGIGQAQAIAFAEQGAEVIGIDLDETGLKQTAALVDPDSAKSFTYFVGDVSSPSFVQATMKQIVKNNGQIDILLNTAGILDDYRPSLETSEALWDQILATNLKSVFLVTNAILPYFLQQKKGVIVNMASIAGLVAGGGGAAYTASKHAIIGYTKQLSYDYAKLGIRANAIAPGAIQTPMNAADFAGEGEMAAWVARETPAGRWAQPQEVAKLSLFLASDDADYIHGTVMTIDGGWTMK

SEQ ID NO: 5909 - protein, 78 aa, Zea mays
MDSSSGSQDKKFKDNDRPEAKEANSTAQHLVDFTEAEEDLVSRMHRLVGNRWEIIAGRIPGRTAEEVEMFWSKKYQER

SEQ ID NO: 5910 - protein, 272 aa, Zea mays
  unsure (1)..(272): unsure at all Xaa locations
MGIVEEAHNLRVVGEGKRGVIVLAHGFGTDQSVWKHLVPHLVADYRVVLFDTMGAGXTNPDYFDFSRYATLEGYALDLLAILQELGVRSCIYVGHXSSPRVIGARASISRPDLFTKLVLLSASPRYLNDVDYYGGFEQXELDELFEAMRSNYKAWXSGFAPLCVGGDMESVAVQEFSRTLFNIRPDIALSVAQTIFQSDVRSLLPHVTVPCHIVQSTKDLAVPVVVSEYLHRHLGGDSIVEVMPSEGHLPQLSSPDIVIPVLLRHIQHDIAV

SEQ ID NO: 5911 - protein, 124 aa, Triticum aestivum
MAGVGRNMVAPLLVLNLIMYLIVIGFASWNLNHFINGLTNRPGVGGNGATFYFLVFAILAGVVGAASKLAGVHHVRTWRGDSLATSASSALVAWAITALAFGLACKEIHIGGYRGWRLRVLEAF

SEQ ID NO: 5912 - protein, 185 aa, Betula pendula
KECRHCKSEESNLCELLRINTDRGVMLSDGKSRFSIKGKPIFHFVGTSTFSEYTVVHRGCAVKINPLAPLDKVCILSCGISTGLGATLNVAKPKKGSSVAVFGLGAVGLAAAEGARIAGASRIIGVDLHPDRIKEARKFGVTELVNPKDHKKPIQEVIADMTDGGVDRSVECTGNVDCMISAFEC

SEQ ID NO: 5913 - protein, 314 aa, Zea mays
REPRFYTKVFKEGHSFDQDGGSFELSLVTCKCIGAYVKNKKNQNQICWLWEKVKSTEDRDFQRFLDNVQYKTSGILRYERVFGEGFVSTGGIETTKEFVGMLDLKPGQKVLDVGCGIGGGDFYMAANYDVHVLGIDLSVNMVSFAIERAIGRKCSVEFEVADCTTKDYPENSFDVIYSRDTILHIQDKPALFRSFFKWLKPGGKVLISDYCKNPGKPSEEFAAYIKQRGYDLHDVKAYGQMLKDAGFHNVIAEDRTEQFLNVLQREIGEVEKNKDAFLADFTQEDYDDIVNGWNAKLKRSSAGEQRWGLFIATK

SEQ ID NO: 5914 - protein, 106 aa, Zea mays
MDTSSPAALVNAQMLNMFVGRRVRTVVQVQHNEGGVLVGQSTDGHQLCVKSAMDVPISHFMEVYGIAENSQTIRAEVCTDFGPNFDPKVFDELCKLASGRFKHLFL

SEQ ID NO: 5915 - protein, 477 aa, Oryza sativa
MAVVAVAVVIALLAAFLTPLAVYLARRASPPPPPRRNLPPGSLGLPLIGQSLSLLRAMRRNTADRWLQDRIDRYGPVSKLSLFGAPTVLVAGPAANKVVFHHEALAPKQPRSLAAIIGRSILELVGDDHRRVRGAILQFLRPDMVRRYVGKIDSEVRRHLAARWAGRRTVAVFPLMKTLAFDVIATLLFGLDRGAIREQLADAFDGMHEGLWTVPVDLPFTPFRRGLMASARARRLVEATVREKAAKLEHGESSPSDDLISCLLSLRDGGRQLLTEEEIVDNSVLALVAGHDTSAVLLTFMLRHLANDPATLAAMAQGKGKRDGEALTCEDVAKMKLSWRVAQETLRMVPPVLGSFRRAPVDVEFEGYTIPRGWQIFWSPSVTHMDPAIFHEPTKFEPSRFDGAGRRPYSFVPFGGGPRICPGMELARVETLVTAHYLVRHFRWKLCLGEEKKFLRDPMPTPHDGLPVELDHIAPLC

SEQ ID NO: 5916 - protein, 139 aa, Triticum aestivum
  unsure (1)..(139): unsure at all Xaa locations
EMGEFFXIQDDSLALFGAPSVTGKIGAAIQDHKCRGGVVXCLERAIPKQSQFFKENYGQKEVKKVARVKGLYEEMDLPTVFFXIXEDSCTPIMVFIEQYEAPLPPPVFLGVGGKIYKRRKCPKNCKGGERRFSINICVP

SEQ ID NO: 5917 - protein, 614 aa, Oryza sativa
MAPAAVAAAEAGSKAAAVAGKAVAACERDAEKLEFIEEMTRGFDAVQERVLAAILARNNGAEYLRRHGMEGRTDREAFKARVPVVTYEDLRPEIERIANGDRSNIISSHPITEFLTSSGTSAGERKLMPTIEDELDRRQMLYSLLMPVMNLYVPGLDKGKGLYFLFIKSETKTPGGLPARPVLTSYYKSDHFKHRPFDPYNVYTSPTAAILCTDAFQSMYAQMLCGLVARAEVLRVGAVFASGLLRAIRFLQLHWRELAHDIRTGTLSAKVTEPSIRDAVAEVLAAPDAELAAFVEAECGKDKWEGIITRMWPNTKYLDVIVTGAMAQYIPTLKFYSGGLPMACTMYASSECYFGLNLRPMCDPSEVSYTIMPNMGYFELMPHDPDAPPLPRDAPPPRLVDLADAEVGREYELVITTYAGLCRYRVGDILQVTGFHNAAPQFRFVRRKNVLLSIDSDKTDEAELQAAVERASALLSPYGASIVEYTSQADATTIPGHYVVYWELMVREGGAWPPPAEEEGRGVFERCCLEMEEALNAVYRQGRNGEAIGPLEIRVVRAGTFEEVMDYAISRGASINQYKAPRCVSFGPIIELLNSRVISKHFSPACPKYSPHKK

SEQ ID NO: 5918 - protein, 436 aa, Phaeodactylum tricornutum
MGKGGQRAVAPKSATSSTGSATLSQSKEQVWTSSYNPLAKDSPELPTKGQIKAVIPKECFQRSAFWSTFYLMRDLAMAAAFCYGTSQVLSTDLPQDATLILPWALGWGVYAFWMGTILTGPWVVAHECGHGAYSDSQTFNDVVGFIVHQALLVPYFAWQYTHAKHHRRTNHLVDGESHVPSTAKDNGLGPHNERNSFYAAWHEAMGDGAFAVFQVWSHLFVGWPLYLAGLASTGKLAHEGWWLEERNAIADHFRPSSPMFPAKIRAKIALSSATELAVLAGLLYVGTQVGHLPVLLWYWGPYTFVNAWLVLYTWLQHTDPSIPHYGEGEWTWVKGALSTIDRDYGIFDFFHHTIGSTHVVHHLFHEMPWYNAGIATQKVKEFLEPQGLYNYDPTPWYKAMWRIARTCHYVESNEGVQYFKSMENVPLTKDVRNKAA

SEQ ID NO: 5919 - protein, 390 aa, Methanothermobacter thermautotrophicus str. Delta H
MDSEEIIELERKFIMQTYTRQPIVLSHGKGATVWDIEGNSYIDCFAGVAVNSIGHAHPKVALAICHQAQRLIHSSNIYYTREQVELAKLLTAISPHDRVFFANSGAEANEGAIKLARKFTGKSEIIAAENSFHGRTLATVTATGQKKYSEPFRPLPEGFKHVPYGDIGAMADAVGDETAAIILEPVQGEGGVIIPPEGYLKDVQELARQNDVLLILDEVQTGFGRTGAMFASQLFGVEPDITTVAKAMGGGYPIGAVLANERVAMAFEPGDHGSTFGGNPWGCAAAIATIEVLMDEKLPERAAKMGSYFLGRLRQVLHGCDAVRDIRGVGLMIGIEIDGECAGVVDAAREMGVLINCTAGKVIRIVPPLVIKKEEIDAAVDVLGHVISDL

SEQ ID NO: 5920 - protein, 244 aa, Daucus carota
MGRFSVFSVFLVSILVAHCTSQVSAAAADTCKFPAIFNFGDANSDTGAFAAWFFGNPPFFGQSFFGGSAGRVSDGRLLIDFMATKLGLPFLHPYMDSLGADFAHGANFAEILSTIALPPANNIIPGVRPPRGLNPINLDIQVAQFAQFINRSQTIRQRGGVFKKFMPKAKYFSQALYTIDMGQIDITQLFLNNKTDEEIKAAVPALIASLSSNIKIIYSLGARSFWIHNLGPNGCLPILLTLAP

SEQ ID NO: 5921 - protein, 183 aa, Escherichia coli CFT073
MQDSILTTVVKDIDGEVTTLEKYAGNVLLIVNVASKCGLTPQYEQLENIQKAWADRGFVVLGFPCNQFLEQEPGSDEEIKTYCTTTWGVTFPMFSKIEVNGEGRHPLYQKLIAAAPTAVAPEESGFYARMVSKGRAPLYPDDILWNFEKFLVGRDGKVIQRFSPDMTPEDPIVMESIKLALAK

SEQ ID NO: 5922 - protein, 499 aa, Trifolium repens
SHLRPTPSAISKALRHLPNPPSPRPRLPFIGHLHLLKDKLLHYAPIDLSKKHGPLFSLSFGSMPTVVASTPELFKLFLQTHEATSFNTRFQTSAIRHLTYDNSVAMVPFGPYWKFVRKLIMNDLLNATTVNKLRPLRTQQIRKFLRVMAQSAEAQKPLDVTEELLKWTNSTISMMMLGEAEEIRDIAREVLKIFGEYSLTDFIWPLKYLKVGKYEKRIDDILNKFDPVVERVIKKRREIVRRRKNGEVVEGEASGVFLDTLLEFAEDETMEIKITKEQIKGLVVDFFSAGTDSTAVVTEWALAELINNPRVLQKAREEVYSVVGKDRLVDEVDTQNLPYIRAIVKETFRMHPPLPVVKRKCTEECEINGYVIPEGALVLFNVWQVGRDPKYWDRPSESRPERFLETGAEGEAGPLDLRGQHFQLLPFGSGRRMCPGVSLATSGMATLLASLIQCFDLQVLGPQGQILKGDDAKVSMEERAGLTVPRAHSLVCVPLARIG

SEQ ID NO: 5923 - protein, 323 aa, Burkholderia fungorum
MNYRRLGRSGLQVSELSIGSWVTYGNQVDNRAARESLAAARDAGVNFFDNAEVYAGGKSEEIMGQALKELAWPRVSYVVSTKFFWGLAEAPNQYHTLNRKYLLNAIDASLKRLQLDYVDLVFCHRPDPNTPVEETVWAMSDMITRGKALYWGTSEWSADEIRAAYDIAQRHHLHKPVMEQPQYNLFHRNRVEQEYKRLYEDIGLGLTTWSPLASGLLTGKYRNGVPADSRAQLQGYDWLRKQLTDAGRNDVVGKLGEVADELGCTVGQLAIGWILKNPNVSTVITGASRVEQIGENMKSAEVAGRITPELKERIEEIIGDAHD

SEQ ID NO: 5924 - protein, 368 aa, Zea mays
MEAIRKQASKFREQVARQQQAVMKQFGGGYGADGVFANEAEAQQHSKLEKLYISTRAAKHFQRDIVRGVEGYIVTGSKQVEIGNKLCEDGKKYGTENTCSSGSTLSKAALSFAKARSMMEKERGNLLKALGTQVAEPLRAMVMGAPLEDARHLAQRYDRMRQEAEAQAIEVSKRQMKLREASGNSDMVSRLEAAESKLQELKSNMGVLGKEAVAAMTAVEAQQQRLTLQRLIALVESERNYHQKVLQILDQLEREMVSERQRIEGAPPVVESSMPPPPAYEEVNGIFMRNTVAELVETVEYFLAEAIQSYQAESDTELNLSTGDYIVVRKVSNNGWAEGECRGKAGWFPYDYIEKRERVLASKVAQVF

SEQ ID NO: 5925 - protein, 326 aa, Glycine max; identical to SEQ ID NO: 4436

SEQ ID NO: 5926 - protein, 63 aa, Pleurochrysis carterae
MRGILVDWLVEVHLKFKLMIETLYLTVNLIDRYLEKEKITRNKLQLVGVTAMFLASKYEEIYP

SEQ ID NO: 5927 - protein, 168 aa, Rumex obtusifolius
MDAEVEYRCFVGGLAWATDDQSLERAFSNYGQVLESKIINDRETGRSRGFGFVTFSSEQAMRDAIEGMNGQDLDGRNITVNEAQSRGSGGGGGGYRGGGGGGYGGRREGGYNRGGGGGYGGGGGGYGGGGGGYGGGGGGYGGGRREGGYGGGGGDRYARGNSDSDWRN

SEQ ID NO: 5928 - protein, 511 aa, Neurospora crassa
MADPFAPRSMKRKNVKGLALAPAAPKPPPTAETFYKDKDDDNNAQLEIGIEFNLDLRPEDLDLIKELGAGNGGTVSKVRHIPTNTVMARKVIHVEAKKEMRKRIVRELQIMHGCHSEYIVTFYGAFLNEHNDVIMCMEYMDVGSLDRISRVFGPVRVDVLGKIAEATLGGLTYLYSKHHIMHRDIKPSNILVNSKGHIKLCDFGVSGELVNSVADTFVGTSTYMAPERIQGDKYTVKSDVWSFGLTVMELAIGKFPFASDQLGDDAENAPAGILDLLQQIVHEPAPKLPKSDAFPQILEDMIQKCLYKEPERRPTPQELFDRDPFVQAAKRTPVDLREWACSLMDRDNRKSHLQPQLSPSSHDFLRSSDEPTPTSGEIPILGTMVSPRDQHGSVPTRPPPSSRTGSAGRTGGPSVHPGLGSRAATTGSQPRYPQQAPPPPHPPFEKRPSMSTGHSYTSSSSSSRSGFALPIRPGPPGQPMPPPPPRRQLTAEELQRESRRQAAMQPPTGRF

SEQ ID NO: 5929 - protein, 499 aa, Listeria monocytogenes
MKRNKTALRILVTLAVVLAITFWVGMSSKEVQAAVIEHPTPINGNFTDPVLTDNVKTLLGKADVTDEVTQTDLDSVTHLSAKSAGITTIEGLQYLTNLSELELIDNQVTDLNPLTNLTKITELRLSGNPLKDVSALAGLKNLKTMDLIYTDITDVTPLAGLSNLQVLNLDINQITDITPLAGLSNLQFLSFGSTQVSDLTPLANLSKLTALNAMNSKVSDVSPLTGLSNLTEVYLEENQISDVSPLAKLPNLSIVTLTNQTITNQPVFYQNKPIVPNVVTGLSGELIAPDTISDNGTYTSPNLTWDLNSFINSVSYTFNQSVTFKNTTVPFSGTVTQPLTEVYAVVFDVDGEQTSAMVGVNELINEPTAPAKEGYIFDGWYDAKTDGNKWDFGIDKMPASDITLYAKFTENEEPNASSPINVEPNDNNSDNAEPNASSSNNVQENGTNEGINNLNSSGEDKVNIKLPITGDKLNVLPIFVGAVLIGIGLVLFRKKRQTK

SEQ ID NO: 5930 - protein, 298 aa, Triticum aestivum
GLIRGASAGEGLGNAFLSHIRAVDGIFHVLRAFEDTEITHIDDTVDPVRDLETITQELRLKDIEFVQAKIDDLEKAMKRSNDKQLKIDHELCQRIMTHLQDGKDLRLGEWKAAEIEILNTFQLLTAKPVVYLVNMSEKDYLRKKNKFLPKIHAWVKEHGGETIIPFSCAFEQKLVDMPEDEAAKYCTENQTTSLIPKIIKTGFAAIHLIYFFTAGHGEVKCWQIRRQSKAPQAAGAIHTDFERGFICAEVMKFEDLKELGSESAVKAAGKYRQEGKTYVVQDGDIIFFKFNVSGGGKK

SEQ ID NO: 5931 - protein, 443 aa, Zea mays
RWQRGEVVDPAPLLHDHPFLHPEHVPRLASPRGTCRGRPTGAEGDIAQQAGRGAVREHKRSQVQEPSDSGPTTPLPNKKLLLFILDRLQKKDTYGVFSEPVDPEELPDYHDIIKHPMDFSTIRKKLDKEAYFNLEQFEDDVFLITSNAMCYNSPDTIYYRQARGIQEIAKKDFENLRQDSDASEPEPEPEREPKPEPEPEEPKPQPRRGRPPNKNNAKQKVGKPPAERATADFSGATLATAANIGRHAQADVDLSRRVMDKAMIADVLRASFANLRNEHNWSGERKFERLEAYSGYGGTWSAKTGKRPILMEDSRRSTYYETQPSSSIYELPVSSSYNGTEKLLVPVGVQLPQSYSHSLARFAAQLGPVGWEIASRRLERSLAPGTKFGRGWVGDGETPPNPFQTPVLAAFSETMAPPSSIAASGEQPSMNAPPRHRGPVLAA

SEQ ID NO: 5932 - protein, 383 aa, Mycobacterium tuberculosis H37Rv
MPAVQPWLYSNMPAIRGAVLDQIGVPRPYWRSKPISVVELHLDPPDRGEVLVRIEAAGVCHSDLSVVDGTRVRPVPILLGHEAAGIVEQVGDGVDGVAVGQRVVLVFLPRCGQCAACATDGRTPCEPGSAANKAGTLLGGGIRLSRGGRPVYHHLGVSGFATHVVVNRASVVPVPHEVPPTVAALLGCAVLTGGGAVLNVGDPQPGQSVAVVGLGGVGMAAVLTALTYTDVRVVAVDQLPEKLSAAKALGAHEIYTPQQATAGGVKAAVVVEAVGHPAALHTAIGLTAPGGRTITVGLPPPDVRISLSPLDFVTEGRSLIGSYLGSAVPSHDIPRFVSLWQSGRLPVESLVTSTIRLDDINEAMDHLADGIAVRQLISFTGDL

SEQ ID NO: 5933 - protein, 365 aa, Novosphingobium aromaticivorans
MDAYAAIIERQGGEFVLDNVSIEDPRDGEVLVKVAAAGMCHTDLTVRDQYYPTPLPAVLGHEGSGVVEKVGRGVTTVKPGDKVVLSFSYCGTCPSCLKGHQAYCPSLFPLNFMGRRLDGSTPITRNGQEVNACFFGQSSFATYSIASENNCVKVADDAQIELLGPLGCGIQTGAGSILNALCPEPGSSIAIFGVGSVGLSAVMAAKASGCLKIIAVDRNAGRLELARELGATDVIDANTVNAQEAIVAMTGGGADYAMDTTAIPAVLRSAVDSTHNMGETAVVGGAKLGTEFSLDMNNMLFGRKLRGVVEGSSTPQVFIPQLIAMQKAGLFPFEKLCTFYDLDQINQAVEDTEKTGKAIKAILKM

SEQ ID NO: 5934 - protein, 515 aa, Candida albicans
MLEEISFESWYLYLIICGVLYFCTNYLYIQYLNKKLGAKSPGSCKSDGCFGFRSGFEMLKAKKIGRQVDLLHERFNDLSNPEVNDTFTSYNFGFPMIITKDPENIKALLATQFNDFSLGRRYDFFKPLLGKGIFTLDGEGWKHSRSMLRPQFAREQIAHVKALEPHFQLLKKHITKNKGQFFDIQELFFRFTVDSATEFLFGESVSSLKDESIGYNQDEFDFAGRKDFPEAFNKSQIYLSTRSLLQNLYWLVNPKDFQNCNAIVHKFSDYYVNKALNATPEELEKNSGYVFLYELVKQTRDPQVLRDQALNILLAGRDTTAGLLSFAVFELARNPQVWKKLREEIIERYADGVTEISFETLKQCEYLKAVINETLRLYPSVPRNGRFANKNTTLPRGGGPDGMSTILIKQGQAVMYSIYSTQRDPKYYGKDADVFRPERWFEPETRKLGWAFLPFNGGPRICLGQQFALTEASYVLVRLAQCCENLQLTEGIEYPPAKLTHLTMCMFDGVPIKVD

SEQ ID NO: 5935 - protein, 362 aa, Pseudomonas putida
MNDLSHTHMRAAVWHGRNDIRVEQVPLPADPAPGWVQIKVDWCGICGSDLHEYVAGPVFIPVEAPHPLTGIQGQCILGHEFCGQIAKLGEGVEGFAVGDPVAADACQHCGTCYYCTHGLYNICERLAFTGLMNNGAFAELVNVPANLLYRLPQGFPPEAGALIEPLAVGMHAVKKAGSLLGQTVVVVGAGTIGLCTIMCAKAAGAAQVIALEMSSARKAKAKEVGATVVLDPSQCDALAQIRALTFGLGADVSFECIGNKHTAKLAIDTIRKAGKCVLVGIFEEPSEFNFFELVSTEKQVLGALAYNGEFADVIAFIADGRLDIRPLVTGRIGLEQIVELGFEELVNNKEENVKIIVSPGVR

SEQ ID NO: 5936 - protein, 599 aa, Ferroplasma acidarmanus
MNNTIANICLAVTGKILYYVFPYFQMRDTDSLHSGSISNDKKLKKVLTSWDLYFLSLGAIIGSGWLFAESAAAGTAGPAAILSWIIGGAIVLVLVLVYAEIGAMIPRSGFITRYGHYSHGGIAGLFFGWGYFAARVAAPALEAEAAITYAGSYITKPALIYYAKNPLDPSSSVTLLSGYGILIAAALIAGFYFLNYFGVKLMGKTNQGITWWKLIIPSITIILMVFLLFHAGNFNNPALGGFLPHNNISLVFEAISTDGIVFSYLGFRHTLNFAGEAKNPQRDIPRALIYAMLTSIVVYVLLQFAFISAINPSLLTASGGWLGLSSASAGTYAKSIDSAPFAFLAKSSSLAILAVLTYLLYADAYISPAGTLNIAAGTATRSLYGLAEIGYFPRTFGKVSKRTGVPVFSLLISLVLGLIFLVPLPSWYVVVGLVSGVAGFTYILGGSTLMVLRREASDLKRPFKLPYARILSPVAFIGASLIVYWTGWPTVAYIAIILFAGFAVYLVFLAFHHVDNIFTKENIQGGYWVPLLIIALTILSYLGESNFGGINLFPFPYDFLVVMVVSLIFYFLSVKSGFRTSEITDMIESGEQYIDEYAE

SEQ ID NO: 5937 - protein, 179 aa, Thermoplasma acidophilum
MESFYHSVPVGPKPPEEVYVIVEIPRGSRVKYEIAKDFPGMLVDRVLYSSVVYPVDYGLIPRTLYYDGDPMDVMVLISQPTFPGAIMKVRPIGMMKMVDQGETDNKILAVFDKDPNVSYIKDLKDVNAHLLDEIANFFSTYKILEKKETKVLGWEGKEAALKEIEVSIKMYEEKYGKKN

SEQ ID NO: 5938 - protein, 813 aa, Streptomyces rochei
MKRRIWVPSVFLTVLALLNLGSAPASSGTGESRVDRLVDQMTLDEKLSFVHWDYSTTDPTALVYLPGVPRLDIPEVRASDGPAGVTIHRPSLAMPAPVSLASSFDDGLAEKYGQVLGREGRAFGMDVLFAPMVNDIRVPQAGRNFETFSEDPLLTGRTAAAEVTGIQSQGLMATVKHYAANTQENNRMGVDVEVDDRTLHETELPGFEAAVGAGAAAVMCAYPRVDGEPACGSDTLLTGILREQLHFQGFVTSDWLATHSTDAITKGLDQELGIDSTTAIPPGGQVPGGKYFGDTLKKAITDGTIPVSVLDRSVRRILGQMDRFGLLAENKPPRPQRDLAGGTRVARQVAESGAVLLRNQDRMLPLDAAATDHLAVIGPTAKTPKVTGLGSSYIVPDTATAPLDAITAKLGRGAQVSYAEGEDVEGEPIPAAAFEPPFSGGTVLQPARSGVVYDGRLTVDKAGLYRIAARVTGGNGSLQIDGGDPVSFGEVFGKLTSVPLRLSAGTHTVKISGGALVDQPMRLDLSWVTPARAQEAIDQAVETARKATTAVVFAYDDGAEGSDRTSLSLPGYQDELIKAVTAANPRTVVVLNTGSSVTMPWLDKTRAVLDMWYPGQAGAEATADLLFGDAEPGGRLSQTFPASDQATPVAGDHARYPGVDGVVHYSEGIYSGYRWYDHEGVKPLFPFGFGLSYTSFAYEDESVTRTADGLDVDVTVRNTGDRPGSDVVQVYLGPSPRLALDQADKALAGYRKVALDPGESRRVRIHVAERALQYWDTSGGAWKLAGGERRVLVGSSSDRIRLTATAQTDRPGR

SEQ ID NO: 5939 - protein, 1122 aa, Armoracia rusticana
MSGSRPSQSSEGSRRSRHSARIIAQTTVDAKLHADFEESGSSFDYSTSVRVTGPVVENQPPRSDKVTTTYLHHIQKGKLIQPFGCLLALDEKTFKVIAYSENAPELLTMASHAVPSVGEHPVLGIGTDIRSLFTAPSASALQKALGFGDVSLLNPILVHCKTSAKPFYAIVHRVTGSIIVDFEPVKPYEVPMTAAGALQSYKLAAKAITRLQSLPSGSMERLCDTMVQEVFELTGYDRVMAYKFHEDDHGEVVSEVTKPGMEPYLGLHYPATDIPQAARFLFMKNKVRMIVDCNAKHARVLQDEKLSFDLTLCGSTLRAPHSCHLQYMANMDSIASLVMAVVVNEEDGEGDAPDSTTQPQKRKRLWGLVVCHNTTPRFVPFPLRYACEFLAQVFAIHVNKEVELENQIVEKNILRTQTLLCDMLMRDAPLGIVSQSPNIMDLVKCDGAALLYKDKIWKLGTTPSEFHLQEIASWLYEYHTDSTGLSTDSLYDAGFPKALSLGDAVCGMAAVRISSKDMIFWFRSHTAGEVRWGGAKHDPDDRDDARRMHPRSSFKAFLEVVKTRSLPWKDYEMDAIHSLQLILRNAFKDGESTDVNTKFIHSKLNDLKIDGIQELEAVTSEMVRLIETATVPILAVDSDGLVNGWNTKIAELTGLPVDEAIGKHLLTLVEDSSVEIVKRMLENALEGTEEQNVQFEIKTHLSRADAGPISLVVNACASRDLHENVVGVCFVAHDLTGQKTVMDKFTRIEGDYKAIIQNPNPLIPPIFGTDEFGWCTEWNPAMSKLTGLKREEVIDKMLLGEVFGTQTACCRLKNQEAFVNLGIVLNSAVTSQESEKVSFAFFTRGGKYIECLLCVSKKLDREGVVTGVFCFLQLASHELQQALHVQRLAERTALKRLKTLAYIKRQIRNPLSGIMFTRKMMEGTELGPEQRQILQTSSLCQKQLSKVLDDSDLERIIEGCLDLEMKEFSLNEVLTASTSQVMMKSNGKSVRITNETGEEVMSDTLYGDSIRLQQVLADFMLMSVNFTPSGGQLTVTASLRKDQLGRSVHLAYLEIRLTHTGAGIPELLLNQMFGTEKDVSEEGLSLMVSRKLVKLMNGDVQYLRQAGKSSFIISAELAAANK

SEQ ID NO: 5940 - protein, 381 aa, Rhodopseudomonas palustris
MCKTVRGGQRGCAAFPYNRESLIMWPDRRLLDLFAIECPILLAPMAGAMDAELAIAAARGGALASLPCAMLSPDKAREQVGIFRQQISAPINLNFFCHQAVTPDAAREQIWRKRLTPYFTELGLDPAMPAPAASRAPFDAAMCALVEELKPEVVSFHFGLPEAALLDRVKATGAKVIASATIVREAIWLEEHGVDAVIVQGAEAGGHRGMFMTDDIAQQPGLFALLPQVVDAVRVPVIAAGGIADGRGIAAAFALGAAGVQIGTAYLRCPESRTSALVRVQLAQGTDEATVITNVMTGRPARGVANRLMREVGPVSPDAPAFPHAASALGPLKAAAEQHGKTDFTNLWAGQAVRLGRDMPAAELTRALAGAAVARLSQLAG

SEQ ID NO: 5941 - protein, 499 aa, Lactobacillus plantarum WCFS1
MQRLLKRLTLKEDPSIYEDKDSHLARVLTVKDFLALGVGTIVSTSIFTLPGVVAANHAGPAVVFSFIVAAVVAGLVAFAYAEMAAAMPFAGSAYSWINVMFGEFFGWIAGWALLAEYFIALAFVGSGLSANLRGLLSPLGLTLPKALSNTFGTDGGVVDLIAVLVIALVSLLLSRGISKASRVENVLVVLKVLAVLTFIVVGATAIHVQNYVPFIPKYHLNADGSAFGGWQGIYAGVSMIFLAYIGFDSIAANSAEAKNPGKTMPRGILGSLVIAVVLFVAVALVLVGMFKYSSYANNAEPVGWALRQAGHPIVASVIQAIAVLGMFTALIGMTLAGSRLIYSFGRDGMLPKWLGKLHRNQPNNALLVLTIVAIIIGAFCPFAFLAQLISAGTLIAFMFVSLGIYALRRREGVDIAVPAFKMPFYPVLPAIAFLGALFVFMGLDIQAKLYAGVWFIVGLVIYFSYGMRHSYLAEKRLSETDTAAKSASKVADSTVEERD

SEQ ID NO: 5942 - protein, 367 aa, Bacillus megaterium
MTKKVAVLPGDGGQSNQRRCCRLKAIGERLRHQFEFTYGLIGGAAIDEAGSSSSRSTIETCNEADAVLLGSVGGPKWDRFPSHLRPEKGLLAIRKELDLYANLRPVTFYDSLADASPLKKEYIEGVDFIIVRELTGGLYFGKPSDRRTEGNKETVVDTLFYKRTEIERIIASIDTAVNRRKKVTSVDKANVLESSRVWREVAEEVAKDYPDVELEHMLVDSAAMQLIRNPKYFDVVVTENMFGDILSDEASMLTGSLGMLPSASLTADGPSLYEPVHGSAPDIAGQNKANPIAAAILSAAMLLRHSFGLEKEAAVIEQAVESVLHAGHRTADLADGNHYLGTDKMVEVITAVIANDSAISSIMTASR

SEQ ID NO: 5943 - protein, 402 aa, Chlorobium tepidum TLS
MEQNIYKQCPVCGFPLTRQNAICPRCGNDILEDINTLDEQNHEKHYRIIEEKKADWYIRCLAENLDTGKSPLVNFPNDYTGPMHSGFHSRLTAAEQEALATSRAVLLRDPQKRHNWFKALGNDWKEVVKNTLKIQRDPSDEELLDFLNATSLRCNNMRIHNLAPVSLLENLEQLRCDETPVESLEPLRNLRNLRRLYAFDCDFTSLDPLRDILSLKLLWVSSTEISDLEPLSALVNLEELYCSETMVSDLTPVSGLFRLEKLSCYKTEITSIEALRNLTNLSELGINSTGVSSLEPLARLENLEYLRCSRTAITSLEPLRNLVALKELSIEQTAIHTLEPLSGLVELEELFITGTLVDSIAPLMNLMSLEKLELSAGRIPQSEIDHFMQLNPACEVILKSNG

SEQ ID NO: 5944 - protein, 461 aa, Brucella suis 1330
MPIEILMPALSPTMEEGKLSKWLKKEGDKVTSGDVIAEIETDKATMEVEAVDEGTIGKLLVDEGTEGVKVNTPIAVLLGDGESAADIGSAPAAKAEAAKEEPKAEENKADAVPAAPKAPAVEVASDPDIPAGTEMVSMTVREALRDAMAEEMRRDPDVFIMGEEVAQYQGAYKITQGLLDEFGPKRVVDTPITEHGFAGVGVGAAFAGLKPIVEFMTFNFAMQAIDQIVNSAAKTLYMSGGQMGAPMVFRGPSGAAARVAAQHSQCYAAWYSHIPGLKVVMPYTAADAKGLLKAAIRDPNPVIFLENEILYGHHFDVPKLDDFVLPIGKARIHKQGNDATIVSFGIGMTYAVKAAEELAGQGIDVEIIDLRTIRPMDIPTVVESVKKTGRLVTVEEGFPQSSVGTEIATRVMQQAFDYLDAPILTIAGKDVPMPYAANLEKLALPSVAEVVEAVKAVTYTA

SEQ ID NO: 5945 - protein, 337 aa, Thermobifida fusca
MPTTAREFHLIARPQGEPAVTDFALVTRTLPDPGPGELLVRNLVLSVDPYMRGKMSGVRTYTDPYELNAPMEGGAVGVVEASTDPAVPTGTLVVHNAGWRSHALLPASRVRPLPADSPVDPSVYLGALGMPGLTAYVGLRHKAGIREGDTVFVSGAAGAVGSMVGQLAALYGARRVIGSAGSPEKVAYLRDELGFDAAFDYRAAPVREQLADAAPDGIDVYFDNVGGDHLEAAIACANDFARFAICGAISGYNATSAPRAPRNLFQIVTKRLTLRGFIVSDEPHLAEEFQREVAPAVADGRIKVRETVVEGLERTPEAFISMLRGGNIGKMVVRVAE

SEQ ID NO: 5946 - protein, 305 aa, Miscanthus transmorrisonensis
IESVGEGVTDVAPGDHVLPVFTGECKECPHCKSAESNMCDLLRINTDRGVMIGDGKSRFSINGKPIYHFVGTSTFSEYTVMHVGCVAKINPQAPLDKVCVLSCGISTGLGASINVAKPPKGSTVAIFGLGAVGLAAAEGARIAGASGIIGVDLNPSRFEEARKFGCTEFVNPKDHKKPVQEVLAEMTNGGVDRSVECTGNINAMIRAFECVHDGWGVAVLVGVPHKDAEFKTHPMNFLNERTLKGTFFGNFKPRTDLPNVVELYMKKELEVEKFITHSIPFAEINKAFDLMAKGDGIRCIIRMEN

SEQ ID NO: 5947 - protein, 343 aa, Xanthomonas axonopodis pv. citri str. 306
METRLLGRSGFKVPVLGLGAGTFGGKGPLFSAWGDTDVAQARRMIDLCLDAGLNLFDTADVYSDGASEDILGQALQGRRDQVILSTKTGLRLGDGPNDAGASRFRLLRAVEACLRRLRTDYIDLLQLHAFDAMTPMEETLSTLDGLVRAGKVRYLGASNYSGWQLMKSQAVADAHGWNRFVANQTYYSLAGRDYEWELMPLGIDQGIGAVVWSPLGWGRLTGKLRRGQPLPQHSRLHATAAAGPAIDDARLFDIVEALDAIAAETGRSVPQIAINWLLQRPTVSTVLIGARDEVQLRENLGAVGWSLTGDQRARLDQVSAVEPPYPYYPYWRGQFAERSPLPL

SEQ ID NO: 5948 - protein, 297 aa, Solanum tuberosum
MGEKPVSGGVWPTVKPFINGGVSGMLATCVIQPIDMIKVRIQLGQGSAADVTKTMLKNEGFGAFYKGLSAGLLRQATYTTARLGSFRILTNKAIEANEGKPLPLYQKALCGLTAGAIGATVGSPADLALIRMQADATLPLAQRRNYTNAFHALSRIAVDEGVLALWKGAGPTVVRAMALNMGMLASYDQSVEFFRDNLGMGEAATVVGASSVSGFFAAACSLPFDYVKTQIQKMQPDAEGKLPYTGSFDCAMKTLKAGGPFKFYTGFPVYCIRIAPHVMMTWIFLNQIQKVEKKIGL

SEQ ID NO: 5949 - protein, 333 aa, Oryza sativa
MARWAIAIHGGAGVDPNLPEHRQEEAKRVLARCLQVGVDALRSGAAALDVVEAVVRELESDPFFNSGRGSALTRLGTVEMEASIMDGRGRRCGAVSGVSTVKNPVSLARLVMDKSPHSYLAFDGAEQFARDQGLEVVDNSYFITEDNVGMLKLAKEANSILFDYRIPLSGSETCGAQAVSSDNSHGNGMVMNGLPISIYAPETVGCAVVDSSGHTAAATSTGGLMNKMTGRIGDSPLIGSGTYACGACAVSCTGEGEAIIRSTLARDVAAVMEYRGAGLQEAVDYCVKKRLDEGFAGLIAVSSTGEVAYGFNCTGMFRGCATEDGFMEVGIWE

SEQ ID NO: 5950 - protein, 156 aa, Enterococcus faecium
MSIYNFETTLEDGTVYSLKKYAGKPIIIVNTATKCGLAPQFKQLEELYQAYQTQGLVILGFPSNQFKQELDSATEAAEACKTTYGVTFPMHQLIDVNGENTDPLFTYLKNEAPGTVTKAIKWNFTKFLIDRNGKVIERFAPQTSPLKMTAAIESVL

SEQ ID NO: 5951 - protein, 265 aa, Nostoc sp. PCC 7120
MFSFISSANPWLVGLGLNTILLSLVWFAPKKLLTPAGVFHAWLLGILIWGTLGWQGYLVVTFYFLVGSGVTRIGMAQKEALGIAEKRSGARGPENVWGSALTAALCAVGIGIINAGLFSPSPQSLVPSPQSLLLLGYVASFSTKLSDTCASEVGKAYGKSTFLITTLQPVPRGTEGAVSLEGTLAGVVGSVAIAIIGWGVGLISPLGIVWCVLAALIATNLESVIGATLQSKYTWLTNEIVNILNTLIGAIAAMLVAFVWASSFG

SEQ ID NO: 5952 - protein, 379 aa, Arabis gemmifera
MSTTGQIIRCKAAVAWEAGKPLVMEEVEVAPPQKHEVRIKILFTSLCHTDVYFWEAKGQTPLFPRIFGHEAGGIVESVGEGVTDLHPGDHVLPIFTGECGDCPHCHSEESNMCDLLRINTERGGMIHDGESRFSINGKPIHHFLGTSTFSEYTVVHSGQVAKINPDAPLDKVCIVSCGLSTGLGATLNVAKPKKGQSVAIFGLGAVGLAAAEGARIAGASRIIGVDLNSQRFDQAKEFGVTEFVNPRDHDKPVQQVIAEMTNGGVDRSVECTGSVQAMIQAFECVHDGWGVAVLVGVPSKDDAFKTHPMNFLNERTLKGTFFGNYKPKTDIPGVVEKYMNKELELEKFITHTVPFSEINKGFDYMLKGESIRCIITMGA

SEQ ID NO: 5953 - protein, 155 aa, Zea mays
MAASDVEYRCFVGGLAWATDDHSLHNAFSTYGEVLESKIILDRETQRSRGFGFVTFSTEEAMRNAIEGMNGKELDGRNITVNEAQSRGGRGGGGGGYGGGRGGGGYGGGGRRDGGGGYGGGGGYGGGGGYGGGGGGYGGGNRGGGYGNSDGNWRN

SEQ ID NO: 5954 - protein, 115 aa, Zea mays
  unsure (1)..(115): unsure at all Xaa locations
GLDVEEGALKETTPDGEGDHEKGVPAFWLTAMKNIEVLAEEISERDEGALKYLKDIKWSRIENPKGFKLELFFDTNPYFINSDLTXTYHMIDEDEPILEKAIGTEIQWAPGKCLT

SEQ ID NO: 5955 - protein, 130 aa, Zea mays
MEQEAPARPGSVPAVTLRRFELGDVDAMLEWASDPEVTAFMAWDACTSRDALLAFLRDAVLPHPWFRAVCLGGGGHCRPVGAVSVTPTDDACRAELRVVLARAHRGKGVATAAARRAVSAAFGDLPGVER

SEQ ID NO: 5956 - protein, 321 aa, Zea mays
MMESQPLQAPTATAPAPGSAEPAGAPPAVTPGKEFTRTCKGLVVVLIGGYVLLQLLPSSLNYLAIIPSKTIPYVWTVFTAGYIEQVLPGAIGSSLGLLFCGKDIEPAWGRKEFLKFIILINSICGILAFCFAIGLYYVTGKESFLVTPLSGFHGCLAGFLVALKQLLPNLELPMCFFWKIKAKWMPFFVVCFSSIMAFIVPDSINFLPTLVSGMYVSWLYLRYFQRNPLTGLKGDPSDDFSFPSLFPAAMRPVTDPVANLFDRMLCARSRPLEVALPISDPTKASRRRERGERVLEERLAADNAGDTEASPRGHGHGTAED

SEQ ID NO: 5957 - protein, 154 aa, Aspergillus oryzae
MVKAVAVLRGDSKISGTVTFEQADANAPTTVSWNITGHDANAERAFHVHQFGDNTNGCTSAGPHFNPFGKEHGAPEDENRHVGDLGNFKTDAEGNAVGSKQDKLIKLIGAESVLGRTLVIHAGTDDLGRSEHPESKKTGNAGARPACGVIGIAA

SEQ ID NO: 5958 - protein, 233 aa, Cicer arietinum
NNDGSDYGSWEGGSYLHDDGDDFDDLHDGTDVDEDDDEDDDNEDEYENEDAFDVHAHASAGEHDNPIIEFDPELFSSDEAYARALQEAEEREMAARLLALAGINDLSFSITEETEDMEEHGANSQDAWEDVDPDELSYEELLALGEVVGTESRGLSTDTIACLPSVNYKTGSDQHGSNDSCVICRVDYEDDESLTVLSCKHLYHPECINNWLKINKVCPVCSTEVSASSGSNL

SEQ ID NO: 5959 - protein, 121 aa, Oryza sativa
  unsure (1)..(121): unsure at all Xaa locations
MDAAAATAVNGVLEVEERKAQKSYXWEEHSKDLTVEAMMLDSRAADLDKEERPEILSLLPPYEGKSVLELGAGIGRFTGELVKTAGHVLAMDFIESVIKKNESINGHHKNASFMCADVTCX

SEQ ID NO: 5960 - protein, 371 aa, Yersinia pestis CO92
MSHENLKGAQMAEGIPETMRAVVAYGPRDYRFERVPVPTIDAKEILVKVEGCGICAGDTKAFEGAPSFWGDDKQPAYIKAPMIPGHEFIGHVVGLGADVEGFELGDRVTSEQIVPCWGCRFCNHGQYWMCEKHDLYGFQSNVNGAMAEYLKFTKEAINYHVPDHLPLEKAILIEPYACAFHAVQRAKIKLGDVVVLAGSGTLGLGMIGAIKKSGAAKLIVLDLSDDRLALAKKFGADLVLNPSRDDVNTLIKEMTGGYGCDIYIDATGAQKAVEQGLTLLRKLGTFVEFSVFKDPVTVDWSIISDRKELDVLGSHLGPYCFPLVIEGISNGDLPTEGVVTHILPLEKYAEGIELVKRGVDSLKVVLNPNLT

SEQ ID NO: 5961 - protein, 249 aa, Pyrococcus furiosus
MPFEIVFEGAKEFAQLIDTASKLIDEAAFKVTEDGISMRAMDPSRVVLIDLNLPSSIFSKYEVVEPETIGVNLDHLKKILKRGKAKDTLILKKGEENFLEITIQGTATRTFRVPLIDVEEMEVDLPELPFTAKVVVLGEVLKAAVKDASLVSDSIKFIARENEFIMKAEGETQEVEIKLTLEDEGLLDIEVQEETKSAYGVSYLSDMVKGLGKADEVTIKFGNEMPMQMEYYIRDEGRLTFLLAPRVEE

SEQ ID NO: 5962 - protein, 424 aa, Zea mays
  unsure (1)..(424): unsure at all Xaa locations
MAVEKTLPGASAGRTVLVTGGAGYIGSHAVLQLLLAGFRAVVIDNLNNSSELAVRRVAALAGDHSRNLSFHKIDLRDKGALEMVFASTRFEAVIHFAGLKAVGESVQKPLLYYDNNVIGTINLLEVMSVHGCKKLVFSSSAAVYGSPKNSPCTENFPLTPNNPYGKTKLVVEDICRDIYRSDPEWKIILLRYFNPVGAHPSGYLGEDPRGIPNNLMPYVQQVAVGRRPALTVLGNDYATRDGTGVRDYIHVVDLADGHIAALQKLFENSSIGCEAYNLGTGRGTSVLEIVKAFEKASGKKIPLIFGERRPGDAEILFSETTKAERELNWKAKYGIEEMCRDQWNWASKXNPYGYGSPDSIKQNGHQTNGSADSSKQNGHRTNGSTDSPKRNGHHAYGSADSPKRNGHCVFGSSDLKPNGNGHLR

SEQ ID NO: 5963 - protein, 134 aa, Glycine max
MGKGGKLTKLKSAIKRLPSLTKLSRNSSSVSSNKRVSGGTSSSSKEHEQEQQLHAVYVGKSKRRYLVNSEVIDHPVFQELVDKSCSTSSHDDEHGVVVVSCDVVLFEHLLWMLESEETQLGSMDELVEFYSCAC

SEQ ID NO: 5964 - protein, 167 aa, Glycine max
  unsure (1)..(167): unsure at all Xaa locations
PASEEIARKDFENLRQDSDDDSEPQPKIVQRGRPPGKHSRKSLGLGMPPPERVGPESSSDATLASGGDIASGSNGYNLRKVPSKFQPTDSSARAYNSTFNSGGYAGWSDWENEFPASVVKAVLRYGKKQXXAVDETRRDTYKNPVTLGNEXRVLSTVEDEFKQLLAV

SEQ ID NO: 5965 - protein, 243 aa, Rhodobacter sphaeroides
MAALARLFKADLDPGRVAAIIFEPVQGEGGFYPAPPDLVRAIRQLCDAHGIVMIADEVQTGFARTGTLFAMHGYDVAPDLVTMAKGLGGGLPIAAVTGRAEIMDAAHPGGLGGTYGGNPLGIAAAHAVLDVIEEENLCARATELGSRLKQKLAEIRATAPEIADIRGPGFMVGAEFADPGSKAPDAGFTNRVREEALKRGLILLTCGVHGNVIRFLAPITIPEPHFAEALEILEASVAAARQG

SEQ ID NO: 5966 - protein, 308 aa, Glycine max
MSTIAKRDLSSNEEESELRRGPWTLEEDSLLIHYIARHGEGRWNMLAKSAGLKRTGKSCRLRWLNYLKPDIKRGNLTPQEQLLILELHSKWGNRWSKIAQHLPGRTDNEIKNYWRTRIQKQARQLNIESGSKRFIDAVKCFWMPRLLQKMEQSNSPSPHHSSMTNMMNLGNSGEASMSSMSSSFNINPSMSSSSSPPQREFIMDDANHFNTMSNPINPSPDSFQFSQLLEISEHPKSPSNVFENNVCSYPIQDNCYVDTNNYGMEGINMDPLSAMDTYDFPQFDFQTAGNGWMLDSMGDSTLWNMEAM

SEQ ID NO: 5967 - protein, 101 aa, Zea mays
  unsure (1)..(101): unsure at all Xaa locations
GLLYHCSAQGLGVGXHTHQLYRAHVECLPGVATPLGIKVSYKMXPRHLAKLIETMNPSNKPGWITIITKMGAENMKMKLHHLIRADRKAELNDTWINDPMH

SEQ ID NO: 5968 - protein, 616 aa, Zea mays
MAVMAEVVSTTGAALRSPATQQPAAAGAAKGTDAEKLQFIEDMTSNVDAVQERVLGEILARNADTEYLSSRCGLAGATDRATFRAKVPMATYEDLQPYIRRIADGDRSPILSGHPVSEFLTSSGTSGGERKLMPTIEDELNRRQLLYSLQMPVMNLYVPGMDKGKALHFLFVKSETKTPGGLAARPVLTSYYKSNHFRNRPFDAYNNYTSPTAAILCADAFQSMYAQMLCGLCQRQDVLRVGAVFASGLLRAIRFLQLNWEQLAEDIEAGSLTPRVTDPSVREAVAGILRADPELAALVRSECSKGDWAGIITRIWPSTKYLDVIVTGAMAQYIPTLKYYSGGLPMACTMYASSECYFGLNLRPMCDPSEVSYTLMPNMCYFEFLPMDSAAASGGDASQLVDLARVEVGREYELVITTYAGLNRYRVGDVLQVTGFHNSAPQFRFVRRKNVLLSIESDKTDEAELQRAVERASALLRPHGAAVVEYTSQAYTKSIPGHYVIYWELLAKGPAAGGAVGEGTLERCCLEMEEALNTVYRQSRVADGSIGPLEIRVVRPGTFEELMDYAISRGASINQYKVPRCVTFPPIIELLDSRVVSSHFSPALPHWTPGQRSDSD

SEQ ID NO: 5969 - protein, 78 aa, Glycine max
MDLSDLNSAELQKFYSEEQQRAMVNEMVAKLTSECWDKCITGTPGNKFSSSESNCLSNCAQRYLEMSMLIMKRFQGMQ

SEQ ID NO: 5970 - protein, 238 aa, Tropheryma whipplei str. Twist
MSSKRTVFITGGNRGIGRAIAEKFKSFNYNVAIGVRQPEAFKDAGCLAVECDVTVSSSLTKAFKEVEERFGFVDVAIANAGIIRDTLVLRMKEDDFQHILDTNLTGAWRLAKLASRSMMRNKFGRIVFISSVSAGMGGIGQTNYSASKAGMIGLARALTRELASFGITVNVVAPGIVQTDMVSSIPDNLREELIQRVPIRRIGLPEEVANAVFWLSSDEASYVSGVVLPVDGGLSMGF

SEQ ID NO: 5971 - protein, 345 aa, Carica papaya
MAMIPSISKLLFVAICLFVYMGLSFGDFSIVGYSQNDLTSTERLIQLFESWMLKHNKIYKNIDEKIYRFEIFKDNLKYIDETNKKNNSYWLGLNVFADMSNDEFKEKYTGSIAGNYTTTELSYEEVLNDGDVNIPEYVDWRQKGAVTPVKNQGSCGSCWAFSAVVTIEGIIKIRTGNLNEYSEQELLDCDRRSYGCNGGYPWSALQLVAQYGIHYRNTYPYEGVQRYCRSREKGPYAAKTDGVRQVQPYNEGALLYSIANQPVSVVLEAAGKDFQLYRGGIFVGPCGNKVDHAVAAVGYGPNYILIKNSWGTGWGENGYIRIKRGTGNSYGVCGLYTSSFYPVKN

SEQ ID NO: 5972 - protein, 256 aa, Arabidopsis thaliana
MSQEQPRRPREPVKYGDVFEVSGELADKPIAPEDAKMMQSAETHVFGHTQKGGPAAVMQSAATTNIRGGFVHPDDKTELVAERGATVEQTVPAATVTTEFVGGQVVGQHVEPRRVVAAARTDEEALQSTITIGEALEATVKTAGNKPVDQSDAAAIQAAEMRASGTNVIALAGVAASAQSAADHNATVDRNERKIKLRDVLTGAAGKLSADRAVTREDAEGVVSAEMRNNPKLCTHPGGVAASLTVAARLNERFDI

SEQ ID NO: 5973 - protein, 264 aa, Daucus carota
MLELRLVQGSLLKKVMDSIKDLVNDANFDCSATGFSLQAMDSSHVALVAVLLRSEGFEHYRCDRNISMGMNLGNMAKMLKCAGNDDIITIKADDGSDTVTFMFESPTQDKIADFEMKLMDIDSEHLGIPEAEYHAIVRMPSAEFARICKDLSSIGDTVVISVTKEGVKFSTRGDIGTANIVCRQNTTVDKPEEATVIEMNEPVSLTFALRYMNSFTKASPLSSTVTISLSSELPVVVEYKIAEMGYIRFYLAPKIEEEEDESKP

SEQ ID NO: 5974 - protein, 357 aa, Pinus sylvestris
MSSVLTDLLNLDLSDVTEKVIAEYIWIGGSGMDMRSKARSLSGPVSSVKELPKWNYDGSSTGQAQGHDSEVILYPQAIFRDPFRRGKHILVICDAYSPNGTAIPSNKRAAAAKIFNEKAVSDEETWYGLEQEYTLLQKDVKWPLGWPIGGYPGPQGPYYCGVGADKAWGRDIVDAHYKACLYAGINISGINGEVMPGQWEFQVGPSVGISAADELWCARFIMERITEKAGVVLSFDPKPIEGDWNGAGCHTNYSTKSMRKEGGFEVIKKAIEKLKLRHKEHISAYGEGNERRLTGRHETADMNTFSRGVANRGASVRVGRDTEKEGKGYFEDRRPASNMDPYIVTSMIAETTILWKP

SEQ ID NO: 5975 - protein, 429 aa, Oryza sativa
  unsure (1)..(429): unsure at all Xaa locations
AHPLQRYTIHLQRSDLHSSLVLLLLLLNSSRRYMIDTYRRRRCXAAVCRAASEPLIVEEIVVDPPKAYEIRIKIICTSLCHTDVTLWHKVYVRYPAFPRILGHEAYGVVESVGENVEGLAAGDTVVPTFMGQCDSCASCAAEWTNQCTAVPFTMGPGMRRDGTTRFWDGEGKPLSDTVAVTSFSQYTVVDVNQVVKVDPAVPPKIACLLGCCGGTGVGAAWRLAKVQPGSSVVVFGLGSVGLAVVQGAKMCGATKIIGVDLNPNKEEVGKEFGVTDFVNPSQLGDKSVSEVINAMTDGGADYSFECIGISSVMTEAVRSTKSGRGKTIILGVEKDSQPLCLPSFEFLFGKCVMGSLFGGAKPKTDIPILAEKCMNKELELEKLVTHEVGLTEINTAFDLLLQGKSLRCIIWMDKXWPQLGVGMLFLFRF

SEQ ID NO: 5976 - protein, 484 aa, Oryza sativa
  unsure (1)..(484): unsure at all Xaa locations
MTTPHGLLQYSSGAFSDQVPADDSAEEHGVKDHAMLAPFTAAWQTAISPPLVIERSEGCYVYDVNGTKYLDALAGLLSTALGGSEPRLVKAATEQLNKLPFYHSFWNHTTRPSLDLAKELISMFTAREMGKVFFTNSGSEANDSQVKIVWYYNNALGRPKKKNIISRTQSYHGTTFISASLSGLPTLHQDFDLPGRFVLHTDCPHYWRFHLPGETEEEFATRLADNLENLILKQGPETIAAFIAEPVIGAGGVILPPKTYFEKIQAVVKKYDNLFIVDEVITGFERLGTMFGSDLYNIKPDLVSLAKALSSAYAPIGAILVSPEISDVIHSHSNKLGTFAHGXFTYSGHPVSCAVALEALKIYRERDIPGHVTHVAQRFQEGIKAFAAGSPIVGETRGVGLLIATEFTDNKSPYELFPFEWGVGEIFGQECKKRGMMVKVLGNLIAMSPPLIITREEIDKLVSIYGEALKATEERVAELKSKKN

SEQ ID NO: 5977 - protein, 248 aa, Pseudomonas sp.
MESRSRIAVVTGGMGGIGTSISQRLYKEGFKVIVGCSANSSRKDDWMATQLAAGYQFECVETDITDWESTRKAFEMVREHFGPIDVLVNNAGITRDASFRKLTPEDWNTVIGTNLNSLFNTSKQVIEGMLSKGWGRIINISSINGQRGQFGQTNYSAAKAGIHGFTMALAREVSGKGVTVNTVSPGYIQTDMTAAIRKDILDGMIAGIPVGRLGQPEEIASIVAWLASDESAYSTGADFSVNGGMNMQ

SEQ ID NO: 5978 - protein, 371 aa, Magnetospirillum magnetotacticum
MIVSLTLILFAQLLGEVVARAAGLPVPGPVIGMALLLGFLVLRDRTAPASTRWLPPPLVDGGMEGVAKGLLAHLSIMFVPAGVGIVGKLDVLASHGLALAVVLCLSVTLTLAATVLTFVAVSRLLERSRRGPDMSGEFALWVYLTRTPLLWLTVTLLAYAVADRLFQAAGRHPIVNPVIHAIWMIGLVLTLTGTPYPTYFQGAQFVHFLLGPATVALAVPLYERRATVMRALLPMLAALVVGCITAMTSALVFAKLAGIPADVRLAMAPKSVTTGVAMGIVEALGGDPTLAAVLVMLTGMAGAVIVTPLMRTLRIEDMRARGFAAGLAAHGLGTARAFQVSEVAGTFAGIAMGLNAFLTAILVPVAVSFLR

SEQ ID NO: 5979 - protein, 113 aa, Arabidopsis lyrata subsp. petraea
STGKRSEREEDTDPQGSRGISDDEDGDNSRKKLRLSKDQSVILEETFKDHSTLNPKQKQALAKQLGLRARQVEVWFQNRRARTKLKQTEVDCEFLRRCCENLTEENRRLQKEV

SEQ ID NO: 5980 - protein, 415 aa, Schizosaccharomyces pombe
MDVSTQTRHATYFQDENQLQKDHIYVKKKSHIKLNTGVPAPFKAVDNINQQDEPTLIEGNNESSISSSTGDTFEEDFAYQDKVEIEERSIRSTPKSIGDDDLENREGSFDAPEGILTHGKHRLPTIPEWTKEDLAALSEAAARLQANPSPEDIETDPSMVPDYDPEIFHYMQSLERKLAPPPNYMSVQQEIDWVTRHMLVDWIVQVQIHFRLLPETLFLAVNLIDRFLSIKVVSLQKVQLVGLSALLIACKYEEIHPPSIYNFAHVVQGIFTVDEIIRAERYMLMLLDFDISWPGPMSFLRRISRAHSYDHDIRMLAKYLQEVTLMDEIFIGAHISFIAATAYYLSMQMLGHLDWTPCHVYYSGYTARQLKPCANIIWECLVDAPNHHNAIYRKYSENRMKRVSAFAHNWVLSVI

SEQ ID NO: 5981 - protein, 475 aa, Thermoanaerobacter tengcongensis
MANSTSSYLWRKKTLEMVLSETEAEQFKLKKTLTAIDLIALGIGAIIGTGIFVITGVAAAEKAGPAIVLSFILAGLACAFAAISYAELASMFPIAGSTYNYAYIAMGEFLAWIIGWDLILEYVFALPAISLGWSGYFTNLLGSIGINIPAWAANSAWQAPGTGGLINLPAIGILLAIAILNYIGVRETATVNNIGVAFKVFVVLFFIFTAVWYVKPANWSPFLPYGWAGVFHGAAIIFFAYIGFDAVSTAAEETKNPAKDMPIGILGSLGISTLLYIAVSAILTGVVSYTELNDPAPVAKALNLIGLNWARGLVSLGAIVGITTVLLVMFYGSTRIIFAMSRDGLLPPIFSKVHPKYRTPTLAIYLITIATTLVAGFFPIGVIAELVNIGTMLAFVLTSIATIVLRYTQPDLPRKFRAPGMPWTGILAIAFVLSLMVSLPWETWVRLIVWFVIGLFIYFGYGRHNSILAKQQTQH

SEQ ID NO: 5982 - protein, 398 aa, Methanocaldococcus jannaschii
MSQENWIDLEKKYHLQIYGRLPVVLVEGKGMEVYDIDGKKYLDFLAGIGVNNVGHCHPKVVEAIKKQAETLIHTSNIYYTIPQIKLAKKLVELSGLDRAFFCNSGAEANEGAIKFARKYVSKVLGREGGEIISMYNAFHGRTLTTLAATPKPKYQDGFYPLPPGFKYVPFNDIEALKEAITDKTAAIMIEPVQGEGGIHVADKDYLKAVRDLCDDKNIVLIFDEVQCGMGRTGRMFAFEHYGVEPDILTLAKALGGGVPIGAVVLKEEIAKALSYGDHGTTFGGNPLACSAALASVEVIEELIKDDKVIEKGKYFIRKLENLIEKYNFIKEVRGLGLMIGAELEFNGADIVKKMLEKGFLINCTSDTVLRFLPPLIVEKEHIDALINALDEVFTEIKK

SEQ ID NO: 5983 - protein, 305 aa, Miscanthus sinensis var. formosanus
IESVGEGVTDVAPGDHVLPVFTGECKECPHCKSAESNMYDLLRINTDRGVMIGDGKSRFSINGKPIYHFVGTSTFSEYTVMHVGCVAKINPQAPLDKVCVLSCGISTGLGASINVAKPPKGSTVAIFGLGAAGLAAAEGARIAGASRIIGVDLNPSRFEEARKFGCTEFVNPKDHKKPVQEVLAEMTNGGVDRNVECTGNINAMIQAFECVHDGWGVAVLVGVPHKDAEFKTHPMNFLNERTLKGTFFGNFKPRTDLPNVVELYMKKELEVEKFITHSVPFAEINKAFDLMAKGEGIRCIIRMEN

SEQ ID NO: 5984 - protein, 471 aa, Oryza sativa
  unsure (1)..(471): unsure at all Xaa locations
XARASVLELQRVSKAVKLAGFXPFSSAVDALNQCNAISEGIMTDELRSFLELNLPKVKEGKKAKYSVGVMEPKVGSHISEATGIPCQCNEFVQELLRGVRLHFDHFIDQLKPTDLEKAQLGLGHSYSRAKVKFNVNRVDNMVIQAIFLLDTLDKDINSFSMRVREWYSWHFPELVKIVNDNYVYSKIAKFVVNKSDLAEKDIPALADIIGDEDKAKEIVEAAKASMGQDLSPVDLINVQQFAQRVMNLSEYRKNLYEYLVTKMNDIAPNLTSLIGEMLGARLISHAGSLSNLAKCAASTLQILGAEKALFRALKTRGNTPKYGLIFHSSFIGRASTRNKGRIARYLANKCSIASRIDCYSELNTSVFGQKLREQVEERLDFYDKGIAPRKNLDVMKAAINDMTNASEKEKNDTSAKKNKKKKSKAEADEQDETPKKKKKKKPEASEDVEPRTATEGKKRKKKKSKTLXDNE

SEQ ID NO: 5985 - protein, 376 aa, Tristachya superba
ALSIAGAVQSQKLAVRAISRLQALPGGDVKLLCDTVVEHVRELTGYDRVMVYRFHEDEHGEVVAECRRDNLEPYLGLHYPATDIPQASRFLSRQNRVRMIADCHATPVRVIQDPGLSQPLCLVGSTLRAPHGCHAQYMANMGSIASLVMAVIISSGGDDEQTARGGISSSMKLWGLVVCHHTSPRFIPFPLRYACEFLMQAFGLQLNMELQLAHQLSEKHILRTQTLLCDMLLRDSPTGIVTQSPSIMDLVKCDGAALYYHGKYYPLGVTPTESQIKDIIEWLTVCHGDSTGLSTDSLADAGYHGATALGDAVCGMAVTYITPSDYLFWFRSHTAKEIKWGGAKHHPEDKDDGQRMHPRSSFKAFLEVVKSRSLPW

SEQ ID NO: 5986 - protein, 536 aa, Neurospora crassa
MASLGGFFDPSRLTTASPKAILITTFSLLIVYYITSSIIAWYRLRHFDGPWLGKFSYLWIFKIIHSGQMGEAAHAAQDKYGGVEPGYPSTVRIGPSDLITTELDLIRRMSGARSRYTRSDWYKLNRLDPYDDNMFSTTSTTYHDKLKSKMAPGYAGRDNTGVEKDIAHVISKLVDKIRTKYAAPKGSTSPAGREMLEFGQMAQYFTLDVICKTAFQVEFDHITKEEDVFGYIYMVHNLVYGNAMGATIPIIGKVLSNPLFLKMFGPTTKDPRGMGLIMKVAREIVAKRFAPDAKDQQDMLGSFIRRGLTQRQCETESIFQILAGSDTTATGIRSGLLYLCSNPRAYTRLQREIDERIASGLISSPCITNAESLAFPYLQAVIYESLRMRPPFDGLPFKIVPPEGDYTRDGKFIPGGTKITATFGAMQRNKEVFGVDSDIWRPERWLEEEGCDAERRREMKSVVEMVFGYGRWQCAGKMVAMLELNKIFCQLMRNFDFQLANPTQPWKSRNYHIFFHDDFYLTVTDRHSKTEDEKSS

SEQ ID NO: 5987 - protein, 344 aa, Mesorhizobium loti
MSNMMKALVKAKAEPGIWMEEVPVPEIGPNDVLIKIRKTAICGTDVHIYNWDQWAQKTVPVPMVTGHEFVGTVADFGAAVTEYKVGQRVSGEGHIVCGHCRNCRAGRGHLCRNTLGVGVNRPGAFGEYLAIPQHNVVPIPDDVPDEIAAIFDPLGNAVHTALSFDLVGEDVLVTGAGPIGIMGALVAQCVGARKVVITDINPVRLALAKKLGVQHVVDASKEKLRDVMPVLGMTEGFDVGLEMSGAAPAFRDMIDTMNNGGKIAILGIAPTGFEIDWNKVIFKMLHLKGIYGREMFETWYKMIALVQGPLDVSGLITHRIGIDDFQEGFDAMRSGSSGKVVMDW

SEQ ID NO: 5988 - protein, 589 aa, Candida albicans
MTRTTRIDTQEATKHKDLPPVPSPLSLSSNPNPECLMESKSLGRKNFKKLSLDASPVKSTSGSLRSSDMMSIKEPTSLRQKRTRPPPILHLPTASSSATSTPTSNITGSSSASSIQFAQKSPGSGVIVSQTLSRPSSAGGIPSSGYSSLNVNQSNRNVDPDNVVSTDMILNQISNLDLTSMNHHRQHYQNSHHHLPTTNRKRQTVISSISPTKSSAASSPLEPQIQSLPASSQSPIATTSSLKLNNKDLLTLKQLGSGNSGSVSKILHIPTQKTMAKKIIHIDSKSVIQTQIIRELRILHECHSPYIIEFYGACLNNNNTIVICMEYCNCGSLDKILPLCENKQFPTFVLKKLSFAILSGLTYLYTTHKIIHRDIKPNNVLMTHKGEFKLCDFGVSRELTNSLAMADTFVGTSMYMSPERIQGLDYGVKSDVWSTGLMLIELASGVPVWSEDDNNNDDDEDDEDDAYVRQGSIAAERNGQNSPSRSRKNKQKGNGYNSYNGPEGILDLLQRIVNEDAPTLTNKINPVTKLPYDKYLCQFIDLCLIKDDSVRKTPWQLLEDKEHFFKGVEEGVYDKEHKSWAKKIRKCKV

SEQ ID NO: 5989 - protein, 145 aa, Triticum aestivum
  unsure (1)..(145): unsure at all Xaa locations
RSLRLLEXEPXFVDKEAXXXLDPHTLEEYDSCSAGRGRVGSAITLDQLIEPALLPPQPIAWYVRGITTRTTEMLVNDLIAETARLRGLASNGDANEHTEENRDVNGDVLTEDCNDVKERWRQRRKAGRHGSSLRLTQDNRGRISY

SEQ ID NO: 5990 - protein, 176 aa, Zea mays; identical to SEQ ID NO: 1461

SEQ ID NO: 5991 - protein, 398 aa, Pneumocystis carinii
MQSEAYQTNLQCSGETSHKLGIKEAKSTSKTSLIDQIPILTLSIPSRRSIPHIFDATRITDNSDNSHNENQDFKGILEENGSPDPFSYNRSYFTKIMLDEVWQRSAHSDEIIELEKLGEGISGSVSKCILKNTGTLFALKTILVDTNPEIQQQILRELSINRTCSSEYIVQYYGTFVDEASSNISMAMEYCAGGSLDRLYKKVRANGARIGEYPILKIAENALKGLNYLHTRKIIHRDIKPSNILMTLEGQAKLCDFGVSGELVSSMAKTFTGTSYYMAPERIKGETYSITSDIWSLGLTLMEISQNRFPFPPEGPPLVPIELLNYIVNISNFELVDEPDNKIKWSEDFKHFLKTCLERDGAKRPNSQRMLEHPWVMKHSIIKIDMAKWIKQILELPL

SEQ ID NO: 5992 - protein, 365 aa, Hordeum vulgare
MWRCILLSAVVVALALAPAPALGVPLTEKDLASEESLRGLYERWRSHYTVSRRGLGADAGERRFNVFKQNARYVHEGNKRDMPFRLALNKFADMTTDEFRRTYAGSRVRHHLSLSGGRRGDGGFRYGDADNLPPAVDWRQKGAVTAIKDQGQCGSCWAFSTIVAVEGINKIRTGKLVSLSEQELMDCDNVNNQGCDGGLMDYAFQFIQKNGITTESNYPYQGEQGSCDQAKENAQAVTIDGYEDVPANDESALQKAVAGQPVSVAIDASGQDFQFYSEGVFTGECSTDLDHGVAAVGYGATRDGTKYWIVKNSWGEDWGEKGYIRMQRGVSQTEGLCGIAMQASYPTKSAPHASTVREESHTDEL

SEQ ID NO: 5993 - protein, 147 aa, Zea mays
  unsure (1)..(147): unsure at all Xaa locations
MAGTSSWSSSSSCASSFGSPDHDVVCVTEPDSVGAAGAVADAEGSVKFLCSYGGRILPRRTDGTLRYVGGDNRVLSVDRPIRFYXCRLFLSAVLQRKLRELCGGWEAHLRCQLPTEDLDALISVTCDDDLAKLLEEYDQASKDRLQS

SEQ ID NO: 5994 - protein, 166 aa, Methanosarcina barkeri
MKALVFGADDFEDLELFYPYHRLKEEGITTHVASMKKGPIKGKQGYEINVDIAFKDINPENYQILVISGGKGPEKMRLDEHALEITRHFFTENKPVAAICHGPQVIVSAGVIKGRKATCWPGIRDDIIAAGALYEDKEVVIDGNFVSSRSPADLHAFGREMIKLLK

SEQ ID NO: 5995 - protein, 400 aa, Methanosarcina acetivorans C2A
MLYRKMPENGDELSILGFGCMRLPLKEDGTIDEQRARSLVRYAIDQGINYVDTAWPYHMGESEPFLGRTLADGYREKVKLATKLPSWLVESREDMDKFLNAQLERLKTDHIDYYLIHGLAGKLWDKLEALDATDFLNKAKADGRIVNAGFSFHGPVEDFKRIVDAYPWTFCQIQYNFMDEKHQAGTEGLKYAASKGLGIIVMEPLLGGNLAGQVPDEVKEIWAESPVKRTPPEWALRWVWNHPEVTVALSGMNEESQVEENLKIAGEAYPNSLTEDELQLISRVEKKYHELMKVGCTGCEYCMPCPSGVYIPECFRIYNDLHMFGNVEGARFKYAVNMSGVFTNSDPGGFASQCTECGQCMEKCPQGLKIPELLKAVAEELEGPDLEQRIAMAKKLFKRD

SEQ ID NO: 5996 - protein, 131 aa, Zea mays
MAKGGLAKLRCMIKRWHSSSRIARAPPSPGPGEDDRCAARGASFHGADEVPEGLHPVYVGKSRRRYLVAEELVGHPLFQTLVDRIGGGTGAAAASTVVGCEVVLFEHLLWMLENADPPPESLDELVEYYAC

SEQ ID NO: 5997 - protein, 501 aa, Zea mays
MDTVGVPVVAVANGIGEVERKVQKSYWEEHSKCLTVESMMLDSRAADLDKEERPEILSLLPSYKGKSVLELGAGIGRFTGDLAKEAGHVLALDFIESVIKKNQSINGHHKNITFRCADVTSNDLKIEDNSVDLIFSNWLLMYLSDEEVQKLVGKMVKWLKVGGHIFFRESCFHQSGDSKRKVNPTHYREPRFYTKVFKEGHSFDQDGGSFELSLVTCKCIGAYVKNKKNQNQICWLWEKVKSTEDRDFQRFLDNVQYKTSGILRYERVFGEGFVSTGGIETTKEFVGMLDLKPGQKVLDVGCGIGGGDFYMAANYDVHVLGIDLSVNMVSFAIERAIGRKCSVEFEVADCTTKDYPENSFDVIYSRDTILHIQDKPALFRSFFKWLKPGGKVLISDYCKNPGKPSEEFAAYIKQRGYDLHDVKAYGQMLKDAGFHNVIAEDRTEQFLNVLQRELGEVEKNKDAFLADFTQEDYDDIVNGWNAKLKRSSAGEQRWGLFIATK

SEQ ID NO: 5998 - protein, 338 aa, Salmonella typhi
MRVLVTGGSGYIGSHTCVQLLQNGHDVVILDNLCNSKRSVLPVIERLGGKHPTFVEGDIRNEALITEILHDHAIDTVIHFAGLKAVGESVAKPLEYYDNNVNGTLRLVSAMRAANVKNLIFSSSATVYGDQPKIPYVESFPTGTPQSPYGKSKLMVEQILTDLQKAQPEWSIALLRYFNPVGAHPSGDMGEDPQGIPNNLMPYIAQVAVGRRESLAVFGNDYPTEDGTGVRDYIHVMDLADGHVVAMEKLADKSGVHIYNLGAGVGSSVLDVVNAFSKACGKPINYHFAPRRDGDLPAYWADASKADRELNWRVTRTLDEMAQDTWHWQSRHPQAYSD

SEQ ID NO: 5999 - protein, 646 aa, Listeria monocytogenes EGD-e
MKKLCTVILFLTLLLNGFVPNAHAKTESPSADNNLQVAPPAAIKDLFPDPAMANEVLKSLNLKKLNKKSTSDTVTQTELNSLTGSFQAINKGIKSIEGVEYLQNITELDVEKNQITDIAPVANLKKLTTLLINTNQITDISPVADLANLTTFYCGNNPISDISAVQNLTKLSIFNCYTANVEDISPVKNLVNLKTLSLGSNNIHDISDIEKLTALEYLSFSNNPVENPEVIGNLTNLNTLWLYNAQIRNIDFTANLPKLKSVYLYNNQISNISEVSNWANIEYLELNNNQITDITPVANLTTLKTLKLNDQIITNREIPFQKNISIENKVMDNFGNIVTPNNISDNGTYNSPTLSWNLNETKDNLSYDFTTKITILNINATYSGTVIQPLTKDSTRPIITADGKVSYPEGTTKTTTEFLTDIHATTDDGSPIEVDLNALDFGTAGSYTVTLTAVDTAGNEATPVDVTIIITSVDTSKPVITADEKVSYPEGTTKTAAEFLTDIHATTDDGSPIEVDLNAVDFGTAGSYTVTLNAVDTAGNEATPIQVTIIITNSKKIDPIIPVEPGGNDVKPEKPNEIIILPKDSEIPLSIIPKDNIEKTNSINVIKMIETNEIKNKMLPKTGDKLPLTVFLGMLITLAGISYLRK

SEQ ID NO: 6000 - protein, 783 aa, Candida albicans
MDKIRAVISGGEKPPVDTDNDHNTDFEADRKMPDLDIVVSKSQEFDPVTSHLVNDIMEDEYAAVHVEDDSPYPEVRAAVPSTDDPTLPQNTIRAWVIGLILTTVGCGMNMLFSFHSPSFAITTFVTSILAWPIGNFWAWIVPDWKIFGASLNPGPFNVKEHTIITIMANVSFGTGAAYATDILLAQNMFYKSNFGWGYNLLLIWSTQCIGFAFGGVMRRFVVDSPGAIWPSNLVTATFLTNMHINENHTANGWKISRLAFFVIVFVASFVWYWFPGYIFQALSYFSWITWIKPNNVIINQVFGSSSGLGMIPNNIALDWNQIAGYIGSPLIPPASVIATIFGSIVLIFWIVVPAIHYSNTWYSQYLPISSTGSFDRFQQTYNVSKIIDHKTLSFNEAEYKKYSPLFLSTTFAISYGLSFASILATITHTICFHGRDLIASLKAKEKPDVHNRLMKAYKPVPEWWYLVVFLVFFGMSIATVRAWPTEMPVWGLVFALIIAIIFLLPVAIIYAKTNIAVGLNVVTEFIVGYVLGGRPLCMMLFKTFGYITNNQAVTFVQDMKLGHYMKIDPRTLFWAQFAATIWGSLVQIAVLEWAYGAIDNLCAADQKNHYTCPNGKVFFNASIIWGVIGPQRQFSHGQIYYGLLFFFIIGAVTPVINWLILKKWPNSPVKYLHWPVFFSGTGYIPPATPYNYTSYCAVGLFFGWWIKKKWFHWWSKYNYSLSAGLDIGLAWCSLIIFLCLSLTNTDFPSWWGNDVINTTLDTQVVTNIRHILKEGEAFGPSSW

SEQ ID NO: 6001 - protein, 471 aa, Bacillus cereus ATCC 14579
MANLFKKKSVTQLLGESKSKTLTKTLGAFDLTMLGIGAIIGTGVLVLTGLVAARDAGPAVIFSFMIAAIVCGFAALCYAEVASTLPVSGSVYTYSYATIGEFVAHLMGWTLLSVYVVTTAAVAGGWTGYFHNLVSGLGLEIPKALLTIPSQGGMVNLPAVIVTLIITWLLSRGTKESKRVNNIMVLIKIGIVVLFIAVGVFYVKPENWIPFAPYGLSGVFAGGAAVFFAFLGFDALATSAEEVKNPQRDLPIGIIASLVICTIIYVVVCLVMTGMVSYKELDVPEAMAYVLEVVGQDKVAGVIAIGAVIGIMAVIFAYIYATTRVFFAMSRDGLLPESFAKINKKTEAPTFTVWLTGIGSALIAGFIDLKELSNLANIGALLTFAMVGVSVIILRKTHPKLQRGFMVPLVPILPIISIACCLFLMVNLPLKTWMYFGAWLAIGVVVYFVYSKKHSHLKDDGSSQDNLEQAN

SEQ ID NO: 6002 - protein, 751 aa, Geobacillus stearothermophilus
MENQNRQNAAQCPFHGSVTNQSSNRTTNKDWWPNQLNLSILHQHDRKTNPHDEEFNYAEEFQKLDYWALKEDLRKLMTESQDWWPADYGHYGPLFIRMAWHSAGTYRTGDGRGGASTGTQRFAPLNSWPNNANLDKARRLLWPIKKKYGNKISWADLFILAGNVAIESMGGKTIGFGGGRVDVWHPEEDVYWGSEKEWLASERYSGDRELENPLAAVQMGLTYVNPEGPDGKPDPKAAARDIRETFRRMGMNDEETVALIAGGHTFGKAHGAGPATHVGPEPEAAPIEAQGLGWISSYGKGKGSDTITSGIEGAWTPTPTQWDTSYFDMLFGYDWWLTKSPAGAWQWMAVDPDEKDLAPDAEDPSKKVPTMMMTTDLALRFDPEYEKIARRFHQNPEEFAEAFARAWFKLTHRDMGPKTRYLGPEVPKEDFIWQDPIPEVDYELTEAEIEEIKAKILNSGLTVSELVKTAWASASTFRNSDKRGGANGARIRLAPQKDWEVNEPERLAKVLSVYEDIQRELPKKVSIADLIVLGGSAAVEKAARDAGFDVKVPFFPGRGDATQEQTDVESFAVLEPFADGFRNYQKQEYSVPPEELLVDKAQLLGLTAPEMTVLVGGLRVLGANYRDLPHGVFTDRIGVLTNDFFVNLLDMNYEWVPTDSGIYEIRDRKTGEVRWTATRVDLIFGSNSILRSYAEFYAQDDNQEKFVRDFINAWVKVMNADRFDLVKKARESVTALQSSNRIRSVVGESLQ

SEQ ID NO: 6003 - protein, 78 aa, Glycine max
MLRFCVIVRYIRRGTPDAGFALFESESLKWPGFVEFDDVNGKVLTYSAQDSIYKVFDLKNYTMLYSISDKNVQEIKIR

SEQ ID NO: 6004 - protein, 509 aa, Ocimum basilicum
MAALLLLLLLLPAIFLLHHLYYRLRFRLPPGPRPLPVVGNLYDVKPVRFRCFADWAQSYGPIISVWFGSTLNVIVSNTELAKEVLKEKDQQLADRHRSRSAAKFSRDGQDLIWADYGPHYVKVRKVCMLELFSPKRLEALRPIREDEVTAMVESIYHDCTAPDNAGKSLLVKKYLGAVAFNNITRLAFGKRFVNSEGIIDKQGLEFKAIVSNGLKLGASLAMAEHIPWLRWMFPLDEDAFAKHGARRDQLTREIMEEHTRAREESGGAKQHFFDALLTLKDKYDLSEDTIIGLLWDMITAGMDTTAISVEWAMAELIKNPRVQQKAQEELDRVIGYERVMTELDFSNLPYLQCVAKEALRLHPPTPLMLPHRSNSNVKIGGYDIPKGSNVHVNVWAVARDPAVWKNPSEFRPERFLEEDVDMKGHDFRLLPFGAGRRVCPGAQLGINLVTSMIGHLLHHFNWAPPSGVSTDELDMGENPGLVTYMRTPLEAVPTPRLPSDLYKRIAVDL

SEQ ID NO: 6005 - protein, 491 aa, Ceratodon purpureus
KSVGQSAESVPAGAVTAYLQRMQREGLIQNFGCMVAVEEPNFCVIAYSENASEFLDLIPQAVPSMGEMDVLGIGTDIRTLFTPSSSAALEKAAATQDISLLNPITVHCRRSGKPLYAIAHRIDIGIVIDFEAVKMIDVPVSAAAGALQSHKLAARAITRLQALPGGDIELLCDTIVEEVRELTGYDRVMAFKFHEDEHGEVVAEIRRMDLEPYMGLHYPATDIPQASRFLLMKNRVRLIADCYASPVKLIQDPDIRQPVSLAGSTLRAPHGCHAQYMGNMGSIASLVMAVIINDNEEYSRGAIQRGRKLWGLVVCQHTSPRTVPFPLRSVCEFLMQVFGMQLNLHVELAAQLREKHILRTQTLLCDMLLRDAPIGIVSQTPNIMDLVKCDGAALYYGKRVWLLGTTPTENQIKEIADWLLEHHNDSTGLSTDSLADANYPGAHLLGDAVCGMAAAKITAKDFLFWFRSHTATEVKWGGAKHDPDEKDDGRK

SEQ ID NO: 6006 - protein, 198 aa, Oryza ridleyi
GQTPVFPRIFGHEAGGIVESVGEGVTDLAPGDHVLPVFTGECKECPHCKSAESNMCDLLRINTDRGVMIGDGKSRFSINGKPIYHFVGTSTFSEYTVMHVGCVAKINPKAPLDKVCVLSCGISTGLGATINVAKPPKGSTVAIFGLGAVGLAAAEGARIAGASRIIGVDLNPNRFEEARKFGCTEFVNPKDHDKPVQQ

SEQ ID NO: 6007 - protein, 294 aa, Rhizobium sp. USDA 3357
  unsure (1)..(294): unsure at all Xaa locations
RGKTQIKDYAEFPTLEQLPLWGFDGSSTQQAEGHSSDCVLKPVAVFPDPARTNGVLVMCEVMMPDGVTPHSSNKRATILDDXGAWFGFEHEYFFYKDGRPLGFPESGYPAPQGPYYTGVGYSNVGSVARQIVEEHLDQCLAAGINHEGINAEVAKGQWEFQIFGKGSKKAADQMWMARYLMQRLTEKYGIDIEYHCKPLGDTDWNGSGMHANFSTAYMREVGGKAYFEALMAAFDKNLMDHIAVYGPDNDKRLTGKHETAPWNKFSYGIADRGASIRVPHSFINNGYKGYMEDR

SEQ ID NO: 6008 - protein, 394 aa, Zea mays subsp. mays
LGAERRARLPPGEMGWPLVGGMWAFLRAFKSGKPDAFIASFVRRFGRTGVYRSFMFSSPTVLVTTAEGCKQVLMDDDAFVTGWPKATVALVGPRSFVAMPHDEHRRIRKLTAAPINGFDALTGYLPFIDSTVTSSLRAWADHGGSVEFLTELRRMTFKIIVQIFLGGADQATTRALERSYTELNYGMRAMAINLPGFAYRGALRARRRLVAVLQGVLDERRAARAKGISGGGVDMMDRLIEAQDERGRRLDDDEIIDVLVMYLNAGHESSGHITMWATVFLQENPDMFARAKAEQEAIMRSIPSSQQGLTLRDFRKMEYLSQVIDETLRLVNISFVSFRQATRDVFVNGYLIPKGWKVQLWYRSVHMDPQVYPDPTKFDPSRWEGHSPRAGTFL

SEQ ID NO: 6009 - protein, 268 aa, Zea mays
METRQLLLVFCLLGAGMAVVVDAQAQSAPAPPPRQTPSAPPQQTQFGRTMSTFITVAISVFFFLLFVCAYINQCRLADPGAAAAAAAAAAAAGGGGGGPSRRGKRGLDPAVVATFPIVSYREVVEHKIGKGVLECAVCLTAFEDDDDLRLLPHCSHAFHPECIDPWLQSRVTCPLCRANLEKPAPAPAVAPPSPSPRLAPRQPSPPPEAVAIPVSDDGSEGGSSSCEDDRKEEAVELETLRSARRAARMPRSHSTGHSLFAAAAPPSD

SEQ ID NO: 6010 - protein, 446 aa, Brassica rapa
MKGVIPNYHHSYTFFFVILVLFPHAFSTNTLSSNEALTISSNKTLVSPGDVFELGFFKTATKNSQDGSTDRWYLGIWYKTTSDKRTYVWVANRDNPLRNSMGTLKISHASLVLLDQSDTTVWSTNLTGVAHLPVTAELLANGNFVLRDSKTNDLDRFMWQSFDYPVDTLLPEMKLGRKHKSSEKEKILTSWKSPTDPSSGDYSLILETEGFLHEFYLFKNEFKVYRTGPWNGVRFNGIPKKMQNWSYIDNSFIDNNEEVAYTFKVHNNNNMIHSRFRMSSTGYLQVITWTKTVPQRNMFWSFPEDTCDPYKVCGPYAYCDMHTSPTCNCIKGFVPKNAGRWDLRDMSGGCVRSSKLSCGEGDGFLRMSQMKLPETSEALVEKRIGLKECREKCVRDCNCTGYANMDIMNGGSGCVTWTGELVDMRKYDAGGQDLYVKVAEASLVPS

SEQ ID NO: 6011 - protein, 368 aa, Neurospora crassa
MATHNIVVFGGDHCGPEVVLEAIKVLKAIETNSPSAGKFNLQNHLLGGASIDKHNDPLTDEALNAAKAADAVLLGAIGGPEWGTSSTVRPEQGLLKLRKELGTYGNLRPCNFASESLVDSSPLKAEVCRGTDFIVVRELTGGIYFGDRTEDDGSGYACDTEPYSRAEIVRIARLAGFLALAKNPPAKVWSLDKANVLATSRLWRKTVTDVISKEFPQLQLEHQLIDSAAMLLVKNPRALNGVVITSNLFGDIISDEASVIPGSIGLLPSASLGGIPDGKGKCNGIYEPIHGSAPDISGKGIVNPVGTILSVAMMLRYSLNLPKEADAVEAAVKAAIDNGTKTKDLGGNATTSDMGNAVVAELEKILKA

SEQ ID NO: 6012 - protein, 139 aa, Glycine max; identical to SEQ ID NO: 1310

SEQ ID NO: 6013 - protein, 339 aa, Novosphingobium aromaticivorans
MERTQATTRQITLARRPTGIPVPEDFALVEVPRPVPGPGEILVRMRVGSCDPAIRGFLDDRPSYLPPVALGAPINGMSLGEVIESNNPDWPVGTLLRTFAVWSEYYVVGADALGIEKVEQAPGVPLQHYMGALGPVGLTAWVGLFEIGKAKAGETVLVSAAAGATGSTVVQLAKAAGCRVIGLAGGPDKARLVRELGADVAIDYKAVADLGAAIEEAAPDGIDVYFDNVGGETLDAVLPLMRLHGRIAVCGMIAQYNDADNPHGNRNLWQLVVNRLTMRGFITYDHPEVLGEAQAMLDRLFAEGKLKPLENVREGLEKLPEAFIDLMSGRTTGKTLVLV

SEQ ID NO: 6014 - protein, 255 aa, Rhodopseudomonas palustris
MARLQNKTAVITGGGGGIGGATCRRFAQEGAKIAVFDLNLDAAEKVAGAIRDAGGTAEAVRCDIADRTSVDAAIATTTTTLGPVDILVNNAGWDIFKPFTKTEPGEWERLIAINLTGALHMHHAVLPGMVERRHGRIVNIASDAARVGSSGEAVYAACKGGLVAFSKTLAREHARHGITVNVVCPGPTDTALLADVTSGAANPEKLIEAFTKAIPLGRLGKPDDLAGAIAFFGSDDAGFITGQVLSVSGGLTMNG

SEQ ID NO: 6015 - protein, 294 aa, Schizosaccharomyces pombe
MDPIDPELNEILDFTEYGPLTPIPQDDGENPLAKICYTTGYEQGMAYFRAIMAKKEYSLRALNLTGFLIMNNPAHYTVWAYRFQILNHTPSYIDNELEWLDEIAEDFQKNYQVWHHRQKILSLTKNYERELEFTKKMFEIDSKNYHVWSYRVWILQNFNDYSQELKLTNELLEKDIYNNSAWNHRFYVLFETSKVVSWSLEEELNYLKDKILFAPDNQSAWNYLCGVLDKSGPSKLDNLIANLRKNLPALHKPLLEFLAMYEPSSSEEIYQKLANEVDVPHAALWTWMSQRSNP

SEQ ID NO: 6016 - protein, 128 aa, Glycine max
MASVSATLPPPLLLTQRKPNLTSVQKLPFSPIRDRRSHSMSLMVKASGKSSESSDLDVISSIQNVWDKSEDRLGLIGLSFAAIVALWASLNIITAIDKLPVISSGFELVGILFSTWFTYRYLLFNPTE

SEQ ID NO: 6017 - protein, 178 aa, Physcomitrella patens
MGEEFRCFVGGLAWATTDGSLEEAFRPFGEVVQCKVITDRETGRSRGFGFVTFADENSMNEAIKDMNGKELDGRNITVNQAQSRGGGSGGGGGGGYNNRQGGGGGYGGGGYGGGGGGGYGAGGGGAYGSRSSYDREGGGGGGYGGSRGGGGYGSGGGGGGGRGGSGSGNWRGGRENAY

SEQ ID NO: 6018 - protein, 499 aa, Hordeum vulgare subsp. vulgare
MGEGAWWAVAAVVAALAVVALDAAVRAAHAWYWTASLGAGRRGRLPPGDMGWPLVGGMWAFLRAFKSGRPDSFIDSFARRFGRAGLYRAFMFSSPTIMATTPEACKQVLMDDDAFVTGWPKATVALIGPKSFVNMGYDEHRRLRKLTAAPINGFDALTSYLGFIDDTVVTTLRGWSERGGDGHFEFLTELRRMTFRIIVQIFMGGADERTAAELERTYTELNYGMRAMAIDLPGFAYHKAIRARRRLVAALQRVLDERRARGGKTAAGAAAPVDMMDRLIAVEDEGGRRLQDDEIIDVLVMYLNAGHESSGHITMWATVFLQENPEILAKAKAEQEAIMRSIPPGQKGLTLRDFRKMAYLSQVVDETLRFVNISFVSFRQATRDVFVNGYLIPKGWKVQLWYRSVHMDPQVYPDPKKFDPSRWEGPPPRAGTFLPFGLGTRLCPGNDLAKLEISVFLHHFLLGYKLTRKNPNCRVRYLPHPRPVDNCLAKITRLSSSHG

SEQ ID NO: 6019 - protein, 73 aa, CODONANTHE SERRULATA
ISGTNGEVMPGQWEFQVGPSVGIEAGDHIWCARYLLERITEQAGVVLSLDPKPIEGDWNGAGCHTNYSTKSTR

SEQ ID NO: 6020 - protein, 247 aa, Oryza sativa
MAGNRGGDAGEGEWLKVAELRATVEAQDPHAKEVDNLTLRRFLRARDHNVEKASAMLLKALRWRREAVPGGSVPEEKVQSDLDDDKVYMGGADRTGRPILLGFPVKNFSAKRDMPKFKSYCVYLLDSICARIPRGQEKFVCIVDLKGWGYSNCDIRAYIAAIEIMQNYYPERLGKALMIHVPYMFMKAWKMIYPFIDNVTRDKFVFVDDKSLQEVLHQEIDDSQIPDTLGGKLAPVSLKNNARINLD

SEQ ID NO: 6021 - protein, 167 aa, Citrus unshiu
MASADVEFRCFVGGLAWATTDSSLHEAFSAYGDILESKIINDRETGRSRGFGFVTFRDEKSMRDAIEGMNGQNLDGRNITVNEAQSRGSGGGGGGGYGSRGGGGYGGGGRRESGGGGGYGGSRGYGGGGGGYGGRREGGYSRDGGYGGDGGSRYSRSGASDGGSWRN

SEQ ID NO: 6022 - protein, 76 aa, Glycine max
NIHDFCQVNDVTAEVVEGDPRNVLCDAVDKYRAAMLVVGSHGYGAIKRAVLGSVSDYCAHHAHCTVMIVKKPKIKH

SEQ ID NO: 6023 - protein, 751 aa, Geobacillus stearothermophilus
MENQNRQNAAQCPFHGSVTNQSSNRTTNKDWWPNQLNLSILHQHDRKTNPHDEEFNYAEEFQKLDYWALKEDLRKLMTESQDWWPADYGHYGPLFIRMAWHSAGTYRIGDGRGGASTGTQRFAPLNSWPDNANLDKARRLLWPIKKKYGNKISWADLFILAGNVAIESMGGKTIGFGGGRVDVWHPEEDVYWGSEKEWLASERYSGDRELENPLAAVQMGLIYVNPEGPDGKPDPKAAARDIRETFRRMGMNDEETVALIAGGHTFGKAHGAGPATHVGPEPEAAPIEAQGLGWISSYGKGKGSDTITSGIEGAWTPTPTQWDTSYFDMLFGYDWWLTKSPAGAWQWMAVDPDEKDLAPDAEDPSKKVPTMMMTTDLALRFDPEYEKIARRFHQNPEEFAEAFARAWFKLTHRDMGPKTRYLGPEVPKEDFIWQDPIPEVDYELTEAEIEEIKAKILNSGLTVSELVKTAWASASTFRNSDKRGGANGARIRLAPQKDWEVNEPERLAKVLSVYEDIQRELPKKVSIADLIVLGGSAAVEKAARDAGFDVKVPFFPGRGDATQEQTDVESFAVLEPFADGFRNYQKQEYSVPPEELLVDKAQLLGLTAPEMTVLVGGLRVLGANYRDLPHGVFTDRIGVLTNDFFVNLLDMNYEWVPTDSGIYEIRDRKTGEVRWTATRVDLIFGSNSILRSYAEFYAQDDNQEKFVRDFINAWVKVMNADRFDLVKKARESVTALQCPHARRSAVEAGLQ

SEQ ID NO: 6024 - protein, 476 aa, Xanthomonas axonopodis pv. citri str. 306
MFKQLWATKHPHASHEAADGLGLQRALGPWGLTALGIGAVIGGGIFVITGQAAADHAGPAIMLSFVLAAVCCAFCAMAYAEFAAMVPVSGSAYTYTYATFGELAAWFIGWMLVLEYGVSASAVAVSWTGYFLSLLEHFDIHLPAAFVSAPLDGKLQPTGAIANLPAAGIVLLLTWLCYVGIRKSSAMNMAMVILKTGLILLVIAVGWKYVDTSNWHPFIPANEGPGKYGMEGVLRGAAMVFFAYIGFEAVSVAAQESHRPQRDLPIGMILSLVICTVLYIAMAAVMTGLVPYTLLGTDEPVVTAVAAHPQLAWLRVVVEVGALIGLSSVVLVMIIGQPRIFMIIARDGLLPSIFTRIHPKYRTPHVNTVITGVGIALLAAVFPLDVLGELTSMGTLIAFAAVCAGVLILRRTHPELPRPFRMPAAWLICTAGVLSCLALLSAMTLHNWMLMGLWTLVGLVIYFGYGYRHSRLRDGR

SEQ ID NO: 6025 - protein, 246 aa, Burkholderia sp. DSMZ 9242
MSQRIAYVTGGMGGIGTSICQRLLKDGFTVVAGCGPNSPRRVKWLEDQKALGFDFIASEGNVGDWDSTKEAFDKVKAEVGEIDVLVNNAGITRDVVFRKMTHEDWTAVIDTNLTSLFNVTKQVIDGMVERGWGRIINISSVNGQKGQFGQTNYSTAKAGIHGFTMALAQEVATKGVTVNTVSPGYIGTDMVKAIRPDVLEKIVATIPVRRLGGPEEIDSIVAWLASNDSGFATGADFSLNGGLHMG

SEQ ID NO: 6026 - protein, 642 aa, Oryza sativa (japonica cultivar-group)
MATYYSSPGNERDSQAMYPADSGNSSYPVPSAIGNMLYPGNGSSGPYTEFSGIIQHQQNFMELPGHPTAISQDSSSREPNMVASYMDQRSFGPAKDMRNEMLMHLMDGAHNAGADLIHNDTHSSAQIEFGLLNNHNSMSVAPAPGQGLSLSLNTHILAPSYPYWSAKTELLTPHSYHGDDNRMKNMQSEASQAIRNSKYLKAAQELLDEVVSVWKSIKQKAQKDQAEAGKSDNKEAEGGSKGEGVSSNPQESTANAAPEISAAEKQELQNKMAKLMAMLDEVDRKYKHYYHQMQIVVSSFDMVAGSGAAKPYTAVALQTISKHFRCLKDAINDQINVIRKKLGEEESSSGKEGKLTRLRYIDQQLRQQRAFQQYGLLQQNAWRPQRGLPENSVSILRAWLFEHFLHPYPKDSEKLMLARQTGLTRSQISNWFINARVRLWKPMIEDMYKEEIGEADLDSNSSSDNVPRSKDKIATSEDKEDLKSSMSQTYQPSQLGESKANIGMMSLGGAPAGFHNEGNQDDSFMNLMLKDQRPGEAEGSLLHDAVAHHSDENARFMAYHLSGLGRYGNSNVSLTLGLQHPDNRLSVQNTHQPGFAGAGEEIYNSTASLGVAAASSSDYESTNQIDQRQRFEPSPLMHDFVA

SEQ ID NO: 6027 - protein, 149 aa, Methanococcus vannielii
MDVSTQRRIAAAVLDCGIDRVWVDPENLEKVKMAITKDDIRLLINDGIIVKKQEKGISSARKKEVQEQKRKGKRKGPGSRRGAKGARTPKKEKWMNTIRPLRTLLKELRENEKIERSSYRKLYRMAKGGAFRSRNHMKLYMKEHGILAE

SEQ ID NO: 6028 - protein, 380 aa, Trifolium repens
MSNTAGQVIKCRAAVAWEAGKPLVIEEVEVAPPQAGEVRLKILFTSLCHTDVYFWEAKGQTPLFPRIFGHEAGGIVESVGEGVTHLKPGDHALPVFTGECGECPHCKSEESNMCNLLRINTDRGVMINDNKSRFSIKGQPVHHFVGTSTFSEYTVVHAGCVAKINPDAPLDKVCILSCGICTGLGATVNVAKPKPGSSVAIFGLGAVGLAAAEGARMSGASRIIGVDLVSSRFELAKKFGVNEFVNPKDHDKPVQQVIAEMTDGGVDRAVECTGSIQAMISAFECVHDGWGVAVLVGVPKKDDAFKTHPMNFLNERTLKGTFYGNYKPRTDLPNVVEQYMKGELELEKFITHSIPFSEINKAFDYMLKGESIRCIIRMEE

SEQ ID NO: 6029 - protein, 334 aa, Escherichia coli O111:H-
MKYLVTGAAGFIGFHVSKRLLEAGHQVVGIDNLNDYYDVSLKQARLELLAQPGFQFHKIDLADREGMTDLFASGHFERVFISPHRLAVRYSLENPHAYADSNLTGFLNILEGCRHNKIQHLLYASSSSVYGLNRKMPFSTDDSVDHPVSLYAATKKANELMAHTYSHLYGLPATGLRFFTVYGPWGRPDMALFKFTKAMLEGKSIDVYNYGKMKRDFTYIDDIAEAIIRLQDVIPHADTQWTVETGTPAASIAPYRVYNIGNSSPVELMDYIQALEDALGIEAKKNMLPLQPGDVLETSADTKALYEVIGFTPETTVKDGVKNFVNWYRDFYKV

SEQ ID NO: 6030 - protein, 328 aa, Rhodobacter sphaeroides
MAQRVLVTGGAGYIGSHACKVLKRAGFEPVTFDNLSTGWEQAVKFGPLARGDLMDRASIDAALETWKPVAVMHFAALSLVGESMRDPGTYWRVNVTGALNLLEATVAAGVKNFVFSSTCATYGDQDGVVLDEDTPQRPINAYGASKRAIEEMVANFGAAFGLNHTIFRYFNVAGADPEGEVGEQHDPETHLIPLMLDAVAGRRPALTVFGTDYPTRDGTCIRDYVHVMDLAQAHVLGLNRLLDGGPNRVFCLGTGRGFSVREVIEQSRAVTNREVPILFGDRRSGDAAALVCGSERAVRELGWEPELSTLPHMIADAWRWHRAPKFHE

SEQ ID NO: 6031 - protein, 286 aa, Oryza sativa
MEDAAGRDRLSDLPDEILHRIMSFLNARQAVQTCVLSRRWRNLWHTVPCINADFVEFDSIGYQGPVVPFKRFVNRLLEFRDPASVIDTFLLKYAMPDRLDGYKASNEEANRWIGHALQKQARILEVAVFFFPLDLDHSVFTSFYLRRIEFSHVYLRKGFFEQIETGCPLLEDLLLHQCFIWDGEISSQTLKVLTVDATELYTVKEMSISTPNLTSLTLSGLEYPKAVLKDMPLLVTASVSVTFDALNFDGYYDANDLRQYLWGLSAVRNLEFHYEGAEVCLLLIIT

SEQ ID NO: 6032 - protein, 308 aa, Glycine max
MSSGTTYWCYTCRQPIWLEGREGFCPYCDGGFVQELNEMRGVARQHGFSTRMEDVHQMPDIMDAVRAVMEQRGSEPSIRVRDAVDNFMRQRMAGRYTNFDVRRRSDSGSGSGSILIPDETWGVFSSGPYLIFHGQAPGFTNSNGSSRGGPRGVDFGDYFLGPRLEGLIEQHISNDRLGPPPALRSSIDAMPTIKITHEHLESDSHCPVCKERFELGSKARKMPCNHIYHSDCIVPWLVLHNSCPVCRVELPPKEHTSSRGRRIWGGRNGNDSGSDNDISRGRENTQMNNGRRNLLSYLWPFRSSSSST

SEQ ID NO: 6033 - protein, 362 aa, Zea mays; identical to SEQ ID NO: 5211

SEQ ID NO: 6034 - protein, 580 aa, Zea mays
MGEVEDMYTQDGTVDMKGNPAVKKGTGNWRACPYILANECCERLAYYGMSTNLVNYMKTRLGQVNSVASNNVTNWQGTCYITPLIGAFFADAYMGRFWTIAIFMIIYIFGLALLTMASSVKGLVPTSCGDKDVCHPTDAQAAVVFVALYLIALGTGGIKPCVSSFGADQFDENDEREKKSKSSFFNWFYFSINIGALVASTVLVYVQTHVGWGWGFGIPAVVMAIAVGSFFVGTPLYRHQKPGGSPLTRIAQVLVACARKWNVAVPADKSRLHETVDGESGIEGSRKLEHSEQLACLDRAAVVTAEDGAEASPWRLCSVTQVEELKSVIRLLPIWASGIVFAAVYSQMSTMFVLQGNTLDQSMGPRFKIPSATLSMVDTISVIVWVPVYDRAIVPLVRSYTGRPRGFTQLQRMGIGLVVSSFSMVAAGVLDIVRLRAIARHGLYGENDIVPISIFWQIPQYFIIGCAEVFTFVGQLEFFYDQAPDAMRSMCSALSLTTVALGNYLSTVLVTIVTHITTRHGRIGWIPENLNRGHLDYFFWLLAVLSLLNFLAYLVIASWYKYKKTADDYPGAKGEHGTEH

SEQ ID NO: 6035 - protein, 751 aa, Geobacillus stearothermophilus
MENQNRQNAAQCPFHGSVTNQSSNRTTNKDWWPNQLNLSILHQHDRKTNPHDEEFNYAEEFQKLDYWALKEDLRKLMTESQDWWPADYGHYGPLFIRMAWHSAGTYRTGDGRGGASTGTQRFAPLNSWPNNANLDKARRLLWPIKKKYGNKISWADLFILAGNVAIESMGGKTIGFGGGRVDVWHPEEDVYWGSEKEWLASERYSGDRELENPLAAVQMGLTYVNPEGPDGKPDPKAAARDIRETFRRMGMNDEETVALIAGGHTFGKAHGAGPATHVGPEPEAAPIEAQGLGWISSYGKGKGSDTITSGIEGAWTPTPTQWDTSYFDMLFGYDWWLTKSPAGAWQWMAVDPDEKDLAPDAEDPSKKVPTMMMTTDLALRFDPEYEKIARRFHQNPEEFAEAFARAWFKLTHRDMGPKTRYLGPEVPKEDFIWQDPIPEVDYELTEAEIEEIKAKILNSGLTVSELVKTAWASASTFRNSDKRGGANGARIRLAPQKDWEVNEPERLAKVLSVYEDIQRELPKKVSIADLIVLGGSAAVEKAARDAGFDVKVPFFPGRGDATQEQTDVESFAVLEPFADGFRNYQKQEYSVPPEELLVDKAQLLGLTAPEMTVLVGGLRVLGANYRDLPHGVFTDRIGVLTNDFFVNLLDMNYEWVPTDSGIYEIRDRKTGEVRWTATRVDLIFGSNSILRSYAEFYAQDDNQEKFVRDFINAWVKVMNADRFDLVKKARESVTALQTPRYVRSRDGNELQ

SEQ ID NO: 6036 - protein, 375 aa, Sinorhizobium meliloti
MDVRAAVALEAGKPLEVMTVQLEGPRAGEVLVEVKATGICHTDDFTLSGADPEGLFPAILGHEGAGIVVDVGPGVTSVKKGDHVIPLYTPECRSCPSCLSRKTNLCTAIRATQGQGLMPDGSSRFSINGDKIHHYMGCSTFSNFTVLPEIALAKVNPDAPFDKICYIGCGVTTGIGAVINTAKVEIGATAIVFGLGGIGLNVIQGLRLAGADMIIGVDLNNDKKPWGEKFGMTHFVNPKEVGDDIVPYLVNLTKRGADQIGGADYTFDCTGNTKVMRQALEASHRGWGKSVIIGVAGAGQEISTRPFQLVTGRTWMGTAFGGARGRTDVPKIVDWYMEGKIEIDPMITHTMPLEDINKGFELMHSGESIRSVVLY

SEQ ID NO: 6037 - protein, 360 aa, Geobacter metallireducens
MWVSNRPLPSGKGYGGLLSGIGSITMSEVRKGEGMTVLVTGGAGYIGSHVVRQLSEAGYTVVVYDNLSTGFADALVHGERLVVGELADSDRLDALFAEHGFKTVLHFAASIVAPESVTDPLKYYSNNTRNTLNLLTACVKHGVERFIFSSTAAVYGMPENGIAAEESPTVPINPYGTSKLMSEWMLRDVCAAHGMRSVALRYFNVAGADPQARMGQRTPEATHLIKVSSQAALGMREKVSIFGTDYATPDGTGIRDYIHIEDLASAHLAALAYLERGGETTRINVGYGKGASVREVIEMVRRVSGVHFPAEEAPRRPGDPAMLVAKADRARTVLGWTPHYDDLETIVADAWRWEAKLNKR

SEQ ID NO: 6038 - protein, 275 aa, Musa acuminata
HEVDWLRGMRSRLERAYVKLDSIYQRLIDYHQDRFRLQGKEDEDILDALLRMQKDEEGVTEDHIKGVLMNIIIAGTDTSTATVLWTMAELIRQPELMKRAQDEVRGCVRSKGEVEESDLDQLHFLKCVIKETMRLHPPVPLLLPRETMQHFKLNGYDILPKTWMYVNAWAIGRDPNSWARPHVFDPERFMHDSTEASGQDFKLIPFGEGRRICPGKNLGMLMVELVLANLIYSFDWHLPPGMVKEDISMEEAAGFTMNREYALCLMATKYDSPTA

SEQ ID NO: 6039 - protein, 458 aa, Glycine max
MEKMKIEEVQSTTKKQRVATHTHIKGLGLEASGKALSFAAGFVGQVEAREASGLVVDMIRQKKMAGRALLLAGPPGTGKTALALGISQELGTKVPFCPMVGSEVYSSEVKKTEVLMENFRRAIGLRIKENKEVYEGEVTELSPEETESVTGGYGKSISHVIIGLKTVKGTKQLKLDPTIYDALIKEKIAVGDVIYIEANSGAVKRVGRSDAFATEFDLEAEEYVPLPKGEVHKKKEIVQDVTLHDLDAANARPQGGQDILSLMGQMMKPRKTEITDKLRQEINKVVNRYIDEGVAELVPGVLFIDEVHMLDMECFSYLNRALESSLSPIVIFATNRGICNVRGTDMTSPHGIPVDLLDRLVIIRTQTYGPAEMIQILAIRAQVEELVVDEESLAFLGEIGQQTSLRHAVQLLSPASIVAKMNGRDNICKADLEEVCTLYLDAKSSARLLQEQQEKYIS

SEQ ID NO: 6040 - protein, 172 aa, Oryza sativa
  unsure (1)..(172): unsure at all Xaa locations
PDFASADQTVTKSSQANTEKLHRRIVFDLVNEITAQKMNIHCSASQSAKSLQLRKYNGWRLFKDLCTEVDRLQSESSAIKCSEEDGDERMLLVEDPLNGIEDWSFDSESPSTVLEIERLIYKDLIDEVIWDEATGKSKVDSGTXRGSCHLVVQAEYAWQYMFPLGSLATTLH

SEQ ID NO: 6041 - protein, 188 aa, Pirellula sp.
MSDQTLNKKRIAFLATDGFEQVELTKPWEAIQAAGAEVVLISPKDGKIQGMNHDEKADQFTVDQNVANVSAEDFDGLVLPGGVANPDTLRTCETSVSFIRDFFKQHKPVAAICHGPWTLIEADVVRGRRVTSWPSLKTDLKNAGAEWVDEECVCDEGLVTSRNPDDLPAFCDKAIEEFAEGKHAAQTV

SEQ ID NO: 6042 - protein, 496 aa, Oryza sativa
  unsure (1)..(496): unsure at all Xaa locations
LYYYAXTHLEFAIHPFSLARSPMALQTLNPRHVLPPAASAARAAAPRAPPPAASATEARGGGAAAGRGGGCQRGEEAVAAGGGGRXEEGKETDLATLGNLCVDVVLSVPQLPPAPREEREAYMERLAASPPDQKFWEAGGNCNLAFAAARLGLRCSTLGHVGEEIYGKFLLDVLEEEGISVVGMLDNSDSGACRNAYETLLCWVLVDPFQRHGFCSRADFSDEPAFSWIRKLPAETKTAIHHSKILFCNGYAFDELFPDVISSAIDCAIDAGTAVFFDPGPRGKSLLHGTLDEQRALEHSLRLSDVLLLTSDEAESLTNIRNPIQAGQELLKRGIRTKWVVIKMGSKGSIMVTKSAVSSAPSFKIDVVDTVGCGDSFTAAIAFGFLHNLPAVSTLTLANAVGAATATGCGAGRNVAHLDKVLQLLRESNINEDDTPWSELIEASSFCSEVSVLSKTAVNSFSDRLVHVPTCNVVSNLLSMLXGSVGAKHSSGLIPS

SEQ ID NO: 6043 - protein, 792 aa, Streptococcus pyogenes MGAS8232
MKTKKVIILVGLLLSSQLTLIACQSRGNGTYPIKTKQSRKGMTSNKIKPIKKSKKINKTHKGVAGVDFPTDDGFILTKDSKILSKTDQGIVVDHDGHSHFIFYADLKGSPFEYLIPKGASLAKPAVAQQAASQGTSKVADPHHHYEFNPADIVAEDALGYTVRHDDHFHYILKSSLSGQTQAQAKQVATRLPQTSSPVSTVTANGIPGLHFPTSDGFQFNGQGIVGVTKASILVNHDGHLHPISFADLRQGGWAHVADQYDPAKKAEKPAETHHTPELSEREKEYQEKLAYLAEKLGIDPSTIKRVETQDGKLGLEYPHHDHAHVLMLSDIEIGKDIPDPHAIEHARELEKHKVGMDTLRALGFDEEVILDIVRTHDAPTPFPSNEKDLNKMKEWLATVIKLDLGSRKDPLQRKGLSLLPNLETLGIGFTPIKDISPVLQFKKLKQLLMTKTGVTDYRFLDNMPQLEGIDISQNNLKDISFLSKYKNLTLVAAADNGIEDIRPLGQLPNLKFLVLSNNKISDLSPLASLHQLQELHIDNNQITDLSPVSHKESLTVVDLSRNADVDLATLQAPKLETLMVNDTKVSHLDFLKNNPNLSSLSINRAQLQSLEGIEASSVIVRVEAEGNQIKSLVLKDKQGSLTFLNVTGNQLTSLEGVNNFTALDILSVSKNQLTNVNLSKPNKTVTNIDISHNNIPLADLKLNEQHIPEAIAKNFPAVYEGSMVGNGTAEEKAAMATKAKESAQEASESHDYNHNHTYEDEEGHAHEHRDKDDHDHEHEDENEAKDEQNHAD

SEQ ID NO: 6044 - protein, 470 aa, Oryza sativa (japonica cultivar-group)
MPAGARSWLADLRARFGGGAREEAGLGILAFEAAAAMSRLVSLHRSLSDVEVRRLRADALRAEGVARVTSTDQSLLLRLACGEFVADLDHAAGTAARLGARCCAGAPFLHDFDRVYAEAKRGNGLARLDATVGFYRGAAKRFRKMERHVAATAKLYAEMDALSELEASERRMEQWMRHSGPIPAQPGPSAKRQVPEPGEKLIRELNSQRQKVRRLMESSLWSVAAHKVSKLMAKSVLAVLARISITFGAYVPGLPLLTVGRAWALRRTSGPLQQAASPAAAIRHSAPIFRQKDTAFSASESIKPPASTVGGSGMELRYANMIVCAEMLLRQLWPTIHSNEVDAGMDLSKRDELYKMLPVTIRTAVKAKLRESWRGQPVDEAAAAASMDAVDRMLRWLGPMAHDTVRWHDEHSMERAQRFSMRPRVLMVQTLHFADRHKAENVIVEVLIGLSCVCWYDDERRRPADWDDDD

SEQ ID NO: 6045 - protein, 184 aa, Shigella flexneri
MSDVLRPYRDLFPQIGQRVMIDDSSVVIGDVRLADDVGIWPLVVIRGDVHYVQIGARTNIQDGSMLHVTHKSSYNPDGNPLTIGEDVTVGHKVMLHGCTIGNRVLVGMGSILLDGAIVEDDVMIGAGSLVPQNKRLESGYLYLGSPVKQIRPLSDEEKAGLRYSANNYVKWKDEYLDQGNQTQP

SEQ ID NO: 6046 - protein, 359 aa, Phalaenopsis sp. SM9108
MKLFSLILVASFLASVAATAIDIADKDLETEDSLWNLYERWRSHHTVSRDLDEKQKRFNVFKENPRYIHDFNKRKDIPYKLRLNKFADLTNHEFRSTYAGSRINHHRSLRGSRRGGATNSFMYQSLDSRSLPASIDWRQKGAVTAVKDQGQCGSCWAFSTVAAVEGINQIKTKKLLSLSEQELIDCDTDENNGCNGGLMDYAFDFIKKNGGISSEAEYPYAAEDSYCATEKKSHVVSIDGHEDVPANDEDSLLKAVANQPVSIAIEASGYDFQFYSEGVFTGRSGTELDHGVAIVGYGKTQQGTKYWIVRNSWGAEWGEKGYIRISAASDSKRLCGLAMEASYPIKTSPNPSHKSRDEL

SEQ ID NO: 6047 - protein, 387 aa, Nardus stricta
PALSIAGAVQSQKLAVRAISRLQALPGGDVKLLCDTVVEHVRELTGYDRVIVYKFHDDEHGEVLAESRRTDLEPYLGLHYPATDIPQASRFLFRQNFVRMIADCHAAPVRVIQDPAMPQPLCLVGSTLRSPHGCHAQYMANMGSIASLVMAVIISSGGDDEHNMARGVVPSAMKLWGLVVCHHTSPRCIPFPLRYACEFLMQAFGLQPNMELQLAHQMSEKHILRTQTLLCDMLLRDSPTGIVTQSPSIMDLVKCDGAALYYHGKYYPLGVTPTESQIKDIIEWLTVCHGDSTGLSTDSLADAGYPGAAALGDAVCGMAVAYITQSDYLFRFRSHTAKEIKWGGAKHHPEDKDDGQRMHPRSSFKAFLAVVKSRSLPWENAEMDAIH

SEQ ID NO: 6048 - protein, 469 aa, Pseudomonas syringae pv. syringae B728a
MSETTSPSGELKRGLKNRHIQLIALGGAIGTGLFLGSAGVLKSAGPSMILGYAICGFIAFMIMRQLGEMIVEEPVAGSFSHFAHNYWGGFAGFLSGWNCWLLYILVGMSELTAVGKYIHYWLPDIPGWVSAAAFFVLINAINLTNVKVFGETEFWFAIIKVVAIIGMIALGSYMLVSGSGGPQASVSNLWEHGGFFPNGVSGLVMALAIIMFSFGGLEMLGFTAAEAEQPKTVIPKAINQVIYRILIFYIGALVVLLSLTPWDSLLASLNASGDSYSGSPFVQVFSMLGSDTAAHILNFVVLTAALSVYNSGTYCNSRMLVGMAEQGDAPRALAQVDKRGVPVKAIFASAAVTLVAVLLNYFVPQQALELLMSLVVATLVINWAMISYSHLKFRQHMNRTAQVPLFKALWYPYGNYVCLAFVVFILGIMLMIPGIQISVYAIPVWLAVMWVCYRAKNRRSVVVPAESGK

SEQ ID NO: 6049 - protein, 330 aa, Pyrus communis
DVDFWDAKGQTPLFPRIFGHEASGIVESVGEGVEGLEVGDHVLPVFTGECGDCAHCKFEESNMCDLLRINTDRGVMLSDGKTRFSINGTPINHFLGTSTFSEYTVIHSGCLAKTNPLAPLDIVCILSCGISTGLGATLNVAKPKKGSSVAIFGLGAVGLAAAEGARICGASRIIGVDRNPKRFEEAKKFGVNEFVNPKDHDKPVQEVIAEMTNGGADRSIECTGYINAMISAFECVHDGWGVAVLVGVPNKDAVFMTKPINVLNERTLKGTFFGNYKPRTDLPLVVEMYMSKKLEVEKFITHRVPFSEINKAFDYMTKGEGLRCIVSMEE

SEQ ID NO: 6050 - protein, 365 aa, Zea mays
MSAAKEAGPSSRAVLVTGGAGYIGSHAVLQLLTAGFRVVVVDSLANSSELVIRRLRSLAVEHAKNLAFHKVDIRDKDGLEKVFASTRFDAVIHFAGLKAVGESVQKPLLYYDHNVVGTINLLEVMAAHGCKKLVFSSSAAVYGSPKNSPCTEDFPLTPHNPYGRTKLMAEEICRDIYHSDPEWNIILLRYFNPVGAHPSGYLGEDPCGTPNNLMPFVQQIAVGRRPSLTIFGNNYATKDGTGVRDYIHVVDLAEGHLFALKKLFESSSNIGCEAYNLGTGKGTSVLEIVNAFEKASGKKIPLVMGQRRPGDAEILFSSPAKAERELHWKAKYGITEMCGDLWNWASKSPYGYAASESPKLNGSSR

SEQ ID NO: 6051 - protein, 341 aa, Bradyrhizobium japonicum USDA 110
MKAVHTELHRSHDPQFFLVRGVVKRTTEQPERADRLLKGLKDGKHQLVEPTTFGQGPRARIHSPEYLSFLSEAWDAWTALGDSGPEMIGNIHPVRHAATYPTHIVGKLGWHTADTAAPIGPGTWAAACAATDVAVTAAQMVMDGEDATYALCRPPGHHAYRDMAGGFCFLNNSAIAAAHLRLKHERVVILDVDVHHGNGTQGIFYARPDVYTVSIHADPVAYYPYVWGYAHERGEGPGLGTNLNIPLAIGTGDDGYIQAMDVARKAIESFAPGALVIALGLDASEHDPLKGLAVTTPGFRRIGQAIARMGLPTVFVQEGGYLSEILGANLTSVLAGFEEAR

SEQ ID NO: 6052 - protein, 318 aa, Glycine max
LDTAPPRWVHFAHRLPLFLHQTFDSVDGKQARRTNSSSPLGELFDHGCDALACTFEALAFGSTAMCGRTTFWWWLISAITFYGATWEHYFTNTLILPVINGPTEGLMIIYICHFFTAIVGAEWWVQQFGKSLPFLNWLPYLGGIPTFKAILCLMIAFGVTPTVTCNVSNVYKVVKGKNGSMPLALAMLYPFVVLVGGVLVWDYLSPSDIMGKYPHLVVIGTGLTFGYLVGRMILAHLCDEPKGLKTGMCMSLMFLPLAIANVLASRLNDGVPLVDERLVLLGYCAFSVTLYLHFATSVIHEITNALGIYCFRITRKEA

SEQ ID NO: 6053 - protein, 871 aa, Clostridium tetani E88
MIKSKCEKRIAKILCGTFLVTTMILQPLTAVKAAKKDSDKEKKYVRKPAKVRIYGKDRYETSSKIAKEGWSSSYYAIIASGEDFPDSLSAVTLSKRHDAPILLTNSKSLNRNTREELTRMRVKKVFIIGGQVAISPKVEQDIKAMGITTERLGGKDRYETSIKVAERLGNPGTLFVVTSNHFADALSAGPIAAKKGAPIILTSKDRLADVTKKYLNKKVFNKVYIVGDRSQISDKVASEFEIHVRNHKNGLERIDSKASEYVKNSTVYERNINIINKFPNELNSYKEIFVASGVAFADALSVNALAAKREAPIVIGNTSDGNLLKSFISDNFSKIATMNIVGGQGVISENYVNNIVDYIEDEEIKFKDGNMERAVREKLGITNENERIYKSKVRDVKILDLSGFNISKIDGIQLFEGLKELNLSNNKIKNLEPLEDMFYLESLNLSENKVEDLEPLEELRSLNYLNLNNNNVRYVDSLKKLEYLKYLNLGKNDISYIEDFKDLTYLYYLDLSHNNNIGGLSDLSDLKNLTTLKLSNTGISSLGFLEDLKRLTELDLAKNSISNLDSLKKLDNLKTLYLNDNNISYIEDLKDLKDLEELNVWGNNIKDVEKFKKFKTLRKLTIQRSLLGDDDRKQLDLISNIPHVFDKKNTYVASKNDIDSNFKDIPGKTYKDKELDDISKESKDLKDTYKHEYNPYEVIYKSNSGYSNAFTARELLNREKDLKSMIEDSTYSMQVRKMMQEDLEKVINRYGMVNKTNRMNDKVMELEAKINMYFEEKEKRKARNRINYVYSDYKYDFYKNAAIECERDMSQLKSQIGQLEYSNSYSNNEKARLLKGELRNKEIEYYMINKNLKKYDKDRSFFAAMDSILDK

SEQ ID NO: 6054 - protein, 363 aa, Synechocystis sp. PCC 6803
MLRAGIVGLPNVGKSTLFNALVANAKAEAANFPFCTIEPNVGVVSVPDDRLGKLAEISQSVKVVPTRMEFVDIAGLVAGASKGEGLGNQFLANIREVDAIVHVVRCFDDDDIIHVSGSVDPVRDVEVIDLELVLADLAQVEKRLERSRKQARGNKDLLEEVAILERLVAALNEGIPARRVGLTAEEQELIKSLGLLTLKPIIYATNVTEDDLAGGNDWVEQVKAIAAKDEAKVVVISAQVESELVELPEEERQDFLASLGVTEGGLKSLIRATYELLGLRTYLTTGPQETRAWTIISGMKAPQAAGVIHTDFERGFIRAETVAYEDLISCGSMQGAKEKGLVRSEGKEYVVQEGDVLLFRFNV

SEQ ID NO: 6055 - protein, 420 aa, Triticum aestivum
  unsure (1)..(420): unsure at all Xaa locations
MPPNGIEEGRRAPQAHHPAAPEPSPMPPNASKKDCEPAERPILGRFSAHLKIEIVRLPNVGKSTFFNIVPNXYIPTDNISFCXIETSVARLHIPDERFDYMCRLFQPESEVAAFLEIYDXSGLFXNKCRGLDWTNTFYSDIRAVDGNHSCLXAFKETVXKQYWCRPVDLIWDXAMNSSNDKANEYRLCVMXIDKTDKAMKRSNDKQLKIDHELCQRIMTHLQDGKDLRIGEWKAAEIEILNTLQLLTAXQVVLLGKMSEKDYLRKKNKFLPKIHAWVXSRGGETIIPFSCAFEQKLVDMPEDEAAKYCTETQTTSWIPKIIKTGFAAIHLIYFFTAGHGEVKCWQIRRQSKAPQAAGAIHTDFERGFICAEVMKFEDLKELGSESAVKAAGKYRQEGKTYVVQDGDIIFFKFNVSGGGKK

SEQ ID NO: 6056 - protein, 160 aa, Zea mays
MYRVGRCLSFNIHDGFPGGHSWGATGSGLLTAADYNNLCQCETLDDIKMHLTATEYGPYLQNEPSPLHTTTIVEKCTLKLVDEYKHMLCQATEPLSTFLQYITYGHMIDNVVLIVTGTLHERDVNELLEKCHPLGMFDSIASLAVAQNMRELYRLVLVDT

SEQ ID NO: 6057 - protein, 313 aa, Bradyrhizobium japonicum USDA 110
MEIRNLGASGLRVSAVGLGCNNFGQRTDLETSRKVIHRALDLGITLFDTADIYSNMGGSENVLGTVLGDRRKDIVLATKYSKPMAEDGTKQGASRRYIMAAVEASLKRLKTDYIDLYQQHDYDPLTPIEESLRALDDLVRQGKVRYIGNSNFPAWRIAEAEYVARAMNVSRFVSCQDEYSLVVRDIEKDLLPAATEYKLGLLPFFPLASGLLTGKYRKGESAPDDTRFGKVPRLRDRYVTPRNEDIVEKLQAFAKARGHSMLELAFSWLASRPQVSSVIAGATRVEQIEENVKAIAWKLSTDDLAEIDTITLG

SEQ ID NO: 6058 - protein, 436 aa, Raphanus sativus
MKGVRKTYDNSCTLSFLLVFFVLILFRSAFSINTLWSTESLTISNSRTLVSPGNVFELGFFRTTSSSRWYLGIWYKKVSERTYVWVANRDSPLSDSNGTLKITGNNLVILGHSNKSVWSTNLTRINERSPVVAELLANGNFVMRYFNKIGASGFLWQSFDFPTDTLLPEMKLGYDLKKGLNRFLTSWKNSDDPSSGEISYKLDTQRGMPEFYILKDGLRSHRSGPWNGIRFSGIPEDQKSSYMVYSFTENSEEVAYTFRMTNSSIYSRLKISSEGFLERWTTLESIPWNLFWSAPVDLKCDVYKTCGPYSYCDLNTSPLCNCIQGFMPSNVQQRDLRDPSGGCIRRARLSCSGDGFTRMRNMKLPETTMAIVDRSIGVKECEKRCLSDCNCTAFANADIRNGGTGCVIWTGELEDIRTYLADGQDLYVRLAAADLV

SEQ ID NO: 6059 - protein, 358 aa, Haemophilus influenzae Rd
MQSYNIAVLAGDGIGPEVMAEAIKVLNRVQEKFGFKLNFNEFFVGGAAIEHCGYPLPAETLKGCDQADAILFGSVGGPKWTNLPPDQQPERGALLPLRKHFKLFCNLRPATLYKGLEKFCPLRADIAAKGFDMVVVRELTGGIYFGQPKGREGDGVQTKAFDTEVYYKYEIERIARAAFEAAMKRNKKVTSVDKANVLQSSILWRETVTEMAKDYPEVTLEHIYIDNATMQLIKSPESFDVLLCSNIFGDIISDEAAMITGSMGMLPSASLNEEGFGLYEPAGGSAPDIAGKGIANPIAQILSAAMMLRYSFNLNEAADAIESAVQKVLASGHRTADLADDSTPVSTAEMGTLITQAI

SEQ ID NO: 6060 - protein, 314 aa, Nicotiana tabacum
MADQENCVRVTRLAKKRAAEAMVQHLQQPNKKRVVLGEIRNLSNQIQMFDSEPLKPKCNKQTTKRKVKRSVSVKEREFREEDVDSKLDDDPQMCSAYVSDIYEYLHQMEIEKKRRPLSDYLEKVQKDVTANMRGVLVDWLVEVAEEYKLLSDTLYLAVAYIDRYLSIKVIPRQRLQLLGVSSMLIASKYEEIKPPRVEDFCYITDNTYTKKDVVKMEADVLQSLKFEMGNPTTKTFLRRFTRVAQEDCKNSNLKLEFLGCYLAELSLLDYNCVKFLPSLVAAAVIFLSRFTLQPKLHPWSVGLEQNSGYRACLL

SEQ ID NO: 6061 - protein, 168 aa, Zea mays; identical to SEQ ID NO: 2378
  unsure (1)..(168): unsure at all Xaa locations

SEQ ID NO: 6062 - protein, 150 aa, Pyrococcus horikoshii
MNTLKMQRRIAAELLKCGENRVWIDPEKVDEVASAITREDIRRLIKEGVIRKKPIEGQSRYRARIRHEQKKKGRHRGPGSRKGKKTARMGKKELWIKTIRALRRELRKLKEQKKIDRKTYRMLYIRAKGGQFKNKHQLYLFLEEHGLLKK

SEQ ID NO: 6063 - protein, 344 aa, Pseudomonas fluorescens PfO-1
MSDPLTLNQRFVLASRPVGAPTPENFRLEREALPDLEDGQVLLKTLYLSLDPYMRGRMSDAPSYAAPVQIGEVMTGGAVSRVEQSRHPKFHPGDLVVGATGWQSHSISDGRNIIPIPSGLPSPSMALGVLGMPGMTAYMGLMDIGQPKEGETLVVAAASGAVGSVVGQVAKIKGLRAVGVAGGAEKCKYVVEELGFDACIDHKAPDFAEQLAKACPDGIDIYYENVGGHVFDAVVPLLNSKARIPLCGLIAGYNASEAPKGPDRLPALQRTLLTKRVRIQGFIVFDDYGDRQPEFISAMVPWVRDGKVKFREDVVEGLEQAPQAFIGLLEGRNFGKLVVKVAQD

SEQ ID NO: 6064 - protein, 870 aa, Coccidioides posadasii
MSPTIWIATLLYWFAFQARKSVAAPPGVGALDDRAELPDGFHSPQYYPAPRGLGAGMEEAYSKAHTVVSKMTLAGKVNLTTGTGFLMALVGQTGSALRFGIPRLCLQDGPLGLRNTDHNTAFPAGISVGATFDKKLMYERGCAMGEEFRGKGANVHLGPSVGPLGRKPRGGRNWEGFGSDPSLQAIAAVETIKGVQSKGVIATIKHLVGNEQEMYRMTNIVQRAYSANIDDRTMHELYLWPFAESVRAGVGAVMMAYNDVNGSASCQNSKLINGILKDELGFQGFVMTDWYAQIGGVSSALAGLDMSMPGDGSVPLSGTSFWASELSRSILNGTVALDRLNDMVTRIVATWFKFGQDKDFPLPNFSSYTQNAKGLLYPGALFSPLGVVNQFVNVQADHHKLARVIARESITLLKNEDNLLPLDPNRAIKYSEQMPGTNPRGINACPDKGCNKGVLTMGWGSGTSNLPYLVTPEDAIRNISKNTEFHITDKFPNNVQPGPDDVAIVFVNADSGENYIIVESNPGDRTVAQMKLWHNGDELIESAAKKFSNVVVVVVHTVGPIIMEKWIDLLRSRVSCLPDFQDKKLEILLLISCSETSVRVAASIYDTESRIGLSDSVSLINQRFGQIQDTFTEGLFIDYRHFQKENITPRYHFGYGLSYTTFNFTEPRLESVTTLSEYPPARKPKAGDRHTPTISHLLQKWPGPKTLTGSGAYLYPYLDNPSAIKPKPGYPYPEAIQPNLNLNPRAGGSEAVTRRYGMLRSRFPLKLLILERNPVRAVAQLYVELPTDDEHPTPKLQLRQFEKTATLEPGQSEVLKMEITRKDVSIWDTMVQDWKVPATGKGIKLWIGASVGDLKAVCETGKGKSCHVLN

SEQ ID NO: 6065 - protein, 306 aa, Hordeum vulgare subsp. spontaneum
MATAGKVIKCKAAVAWEAGKPLSMEEVEVAPPQAMEVRDKILYTALCHTDVYFWEANGQTPVFPRILGHEAGGIVESVGEGVTELVPGDHVLPVFTGECKECAHCMSEESNLCDLLRINVDRGVMIDDGQSRFTIDGKPIFHFLGTSTFSEYTVIHVGCVAKIDPEAPLDKVCLLSCGISTGLGATLNVTKPKKGMTVAIFGLGAVGLAAMEGARMSGASRIIGVDLNPAKHEQAKKFGCTDFVNPKDHTKPVQEVIVEMTDGGVNRAVECTGNADAMISAFECVHDGWGVAHKEAVFKTHPMNFL

SEQ ID NO: 6066 - protein, 148 aa, Tetraselmis striata
LTEEQKQDIREAFDLFDTDGSGTIDAKELKVAMRALGFEPKKEEIKKMIADIDKDGSGTIDFEEFLQMMTAKMGERDSREEIMKAFRLFDDDETGKISFKNLKRVAKELGENMTDEELQEMIDEADRDGDGEVNEEEFFRIMKKTSLF

SEQ ID NO: 6067 - protein, 264 aa, Nicotiana benthamiana
MLELRLVQGSLLKKVLESIKELVNDANFDCSATGFSLQAMDSSHVALVALLLRSEGFEHYRCDRNISMGMNLGNMAKMLKCAGNDDIITLKADDGSDTVTFMFESPTQDKIADFEMKLMDIDSEHLGIPEAEYHAIVRMPSAEFARICKDLSSIGDTVVISVTKEGVKFSTRGDIGTANVVCRQNTTVDKPEEATVIEMNEPVSLTFALRYLNSFTKATPLSNTVTISLSSELPVVVEYKIAEMGYIRFYLAPKIEEDEEETKP

SEQ ID NO: 6068 - protein, 333 aa, Saccharopolyspora erythraea
MTTDAATHVRLGRSALLTSRLWLGTVNFSGRVEDDDALRLMDHARDRGINCLDTADMYGWRLYKGHTEELVGRWLAQGGGRREDTVLATKVGGEMSERVNDSGLSARHIIASCEGSLRRLGVDHIDVYQMHHIDRSAPWDEVWQAMDSLVASGKVSYVGSSNFAGWHIAAAQENAARRHSLGMVSHQCLYNLAVRHAELEVLPAAQAYGLGVFAWSPLHGGLLSGALEKLAAGTAVKSAQGRAQVLLPSLRPAIEAYEKFCRNLGEDPAEVGLAWVLSRPGIAGAVIGPRTPEQLDSALKASAMTLDEQALSELDEIFPAVASGGAAPEAWLQ

SEQ ID NO: 6069 - protein, 341 aa, Methanothermobacter thermautotrophicus
KPLKSTDKTDQILTDIKLHQPDRDNMRDMDVAVTGGLGFIGSHLTDELLERGNRVTVIDDLSTGSPDNLRDPHHEDLEIIEGSINDLDLEKVFQGKDYVFHQAALASVPESVRDPLRCHRVNATGTLRVLMASSRAGVRKVVNASTSAVYGNNPEIPLREDARPMPLSPYAVSKVTGEYYCQVFEDQGLETVSLRYFNVYGPRQRPDSQYAAVIPRFIDALLSGRSPEIYGDGEQSRDFIYVGDVVRANIFLAESRGSGVYNVAGGSSVTVNRLFDIISGILESDAEPEYLDERPGDVRHSLADTSRLAAAGFRPEVGLEEGLMRTVEWFLERLKIGSSYQ

SEQ ID NO: 6070 - protein, 477 aa, Xylella fastidiosa 9a5c
MFKQLWATKLSQPSQDSAEGLSLQRVLGVWGLTALGIGAVIGGGIFVITGQAAANHAGPAIMLSFALAAICCTFCALAYAEFAAMVPVSGSAYTYTYATFGELAAWFIGWMLVLEYGVSAAAVAVSWSGYFLSLLQHLGIDLPAALVNAPLDGTLHATGAIANLPAATIVLLLTWLCYFGIRKSSKINIAMVALKSGLILLIIGVGWKYVNPDYWQPFIPPNQGPGKYGWDGVLHGASMVFFAYIGFEAVSVAAQESHRPQRDLPISMMSALAICTVLYIMMAAVMTGLVPYTQLGTDEPVVTAVAAHPQLGWLRVVVEIGALVGLSSVVLVMLIGQPRIFMIMAGDGLLPPIFSTIHSKHRTPHINTVITGLGIALLAAVFPLDVLGELTSMGTLIAFAAVCAGVLILRCTRPDLPRPFRMPAAWLFCSAGVLSCITLLSAMTRHNWMLMSVWTVLGFALYFGYGYRHSKLHREST

SEQ ID NO: 6071 - protein, 487 aa, Silene latifolia
MSTQAHRNRLLGTENGNGGGGVKVVNNPKLTKKRPPLSNLTNHPRPSLVPSAITKSTKAKRDSSTGVRSTSFPAENPSATLNSKPSAVVPLKTAFTRSNVLVSCKASLPNGKGEQSHITRHPASCTMDTTPTPEDAQSVSMDESMSTCDSLKSPEVEYMDENDVAALCSIERKTSKNLYISDDMETTGSFCKREIVSAMEIDKVVDVDDNHMDPQFCSTIACDIYKHLRESETQKRPSTDFMEQTQKDINASMRAILVDWLVEVAEEYRLVPDTLYLTVNYIDRYLSGNAMNRQRLQLLGVACMMIAAKYEEICAPQVEEFCYITDNTYFKEEVLQMESGVLNFLKFEMTAPTTKNFLRRFVRAAQVMNEVPAFQLECLANYVAELSLLEYSMLKYAPSLIAASSVFLAKYMLTSSRPWNATLRHYTLYEASDLEECVKALHQLCLNSHISSLPAIREKYSHHKYKSVAKKHCPSSIPAEYFQNSSC

SEQ ID NO: 6072 - protein, 537 aa, Xanthomonas axonopodis pv. citri str. 306
MGAGTIGPVFSMTGLPLTTSISPGASAGARLPLQIPFIIGNEACERFSFYGMRNILVQFLITSLLLQEISGPGREAEAKHILHSFMIGVYFFPLLGGWLADRFSGKYNTILWFSLVYCAGHACLALFEGSRDGFFLGLGLIALGAGGIKPLVASFMGDQFDQSNKHLAKVVFDAFYWIINFGSLFASLLIPLALKNLSPAWAFGIPGILMFVATLVFWLGRKRYVLVPLPPKDPHGFAAVVRTALLTHAPGQGRPGLLLAVVSVLLALAGFALIEPLGIVVCLCIALVLLLAGIGGGTWWQLERARGTHPDVAVEGVRALLRVLVIFALVMPFFSLFDQKASTWVLQGREMTMPAWFTASQMQALNPLLVMLLIPFNNLVLYPLLRRGGWEPTPLRRMTSGIAFSGVAWIAVGAIQMIMDGGEPMHIAWQILPYALLTFGEVLVSATGIEFAYSQAPPSMKGVVMSFWYLTTTVGNLWVLLSNVAVRNATVTAHIADTGLSEAAFLMFFFAAFAFLAALAFGLYARRYRMVDNYRTA

SEQ ID NO: 6073 - protein, 394 aa, Xylella fastidiosa Temecula1
MTKPIRNVAVLGATGSIGAAALDVLARHPRQFHVSLLAAGQRVDALLALCRTYRPDHAVIGDATLYTTLRDGLNAAGLATKAYAGEAALAELVASTTCDTVVAAIVGAAGLHSTLAAARAGKRLLLANKESLVLAGMLLMREASISGAEIIPIDSEHNAIFQCLRSRTTDGVHRVTLTASGGPFRGHNRTMLAKITPTQAMAHPTWSMGPKISVDSATLMNKGLEVIEAHHLFGLPSEQIDVLVHPQSLVHSLVEFIDGSTLAQLSLPDMRTTLAVGLAWPERIGSGVQGLDLMKHNRLDFEHPDTETFSCLRLARDAMQTGGTAPAVLNAANEIAVSAFLQGRIGFLTIPALIEHALTTLPRYEADTLETLLTVDTETRRITHAALTHFPLPL

SEQ ID NO: 6074 - protein, 285 aa, Zea mays
MHIREEEATPSTVTGIMSTLTSAGQQKLKEPMSPGGGSASVAGSAAERNNGGRGKGKTEIKRIENTTNRQVTFCKRRNGLLKKAYELSVLCDAEVALIVFSSRGRLYEYANNSVKGTIERYKKATSDNSSAAGTIAEVTIQHYKQESARLRQQIVNLQNSNRALIGDSITTMSHKELKHLERLDKAPGKIRAKKNDVLCSEVEYMQRREMELQNDNLYLRSRVDENERAQQTANMMGAPSTSEYQQHGFTPYDPIRSFLQFNIVQQPQFYSQQEDRKDFNDQGGR

SEQ ID NO: 6075 - protein, 341 aa, Shigella flexneri 2a str. 301
MKALSKLKAEEGIWMTDVPVPELGHNDLLIKIRKTAICGTDVHIYNWDEWSQKTIPVPMVVGHEYVGEVVGIGQEVKGFKIGDRVSGEGHITCGHCRNCRGGRTHLCRNTIGVGVNRPGCFAEYLVIPAFNAFKIPDNISDDLASIFDPFGNAVHTALSFDLVGEDVLVSGAGPIGIMAAAVAKHVGARNVVITDVNEYRLELARKMGITRAVNVAKENLNDVMAELGMTEGFDVGLEMSGAPPAFRTMLDTMNHGGRIAMLGIPPSDMSIDWTKVIFKGLFIKGIYGREMFETWYKMAALIQSGLDLSPIITHRFSIDDFQKGFDAMRSGQSGKVILSWD

SEQ ID NO: 6076 - protein, 137 aa, Phaseolus vulgaris
MAQKAQKNDTDFKVPEPITPCATATAAAATSISEPSRFFDAATPATSSRSPKRSLPLEDAANADRTVASEPKRAVNRCSGCRRRVGLTGFRCRCGDLFCAEHRYTDRHDCSYDYKTVGREAIARENPVVKAAKIVKV

SEQ ID NO: 6077 - protein, 259 aa, Nitrosomonas europaea ATCC 19718
MIWPSVDMASIHIETTGNGPDLVMLHGWAMHSGVWDGVVESLSQRFRLHQVDLPGHGASRDCALDSLDQMTEVIADRLPGRYSVCGWSLGGQVAIRLALQAPERVQQLVLVASTPCFVRRADWPWGMEDSTLTLFMENLARDYTQTLNRFLTLQVSGSEDQARVLAWLRKSILRGQPPTPATLQAGLKILQTSDLRAELNQVSQPVLLIHGRNDVITPAGAADWMQQHLPRARLVLFPHCGHAPFLSFPEQFVSCFDAL

SEQ ID NO: 6078 - protein, 421 aa, Physcomitrella patens
MGRKPCCEKVGLRRGPWTSEEDQKLVSHITNNGLSCWRAIPKLAGLLRCGKSCRLRWTNYLRPDLKRGIFSEAEENLILDLHATLGNRWSRIAAQLPGRTDNEIKNYWNTRLKKRLRSQGLDPNTHLPLEDSKLDDTEDDTDDEGGDSSDVTMSDASKSEKRSKKKSKPKETVKVRQPKGPKPAPQLKMCQSDEGPVLLKVPKAPKSPISVNPGPGCNYDDDSEHSSSSTVTTKSHEDHRDSSDFIKALTSVSSFPEAELWSCIKPITNSFSSTALLSEWDSYRAFDSSLFPSSYPQLNSGLPKLEDVNSKSSAVASPVQGMLPAYNPMGMEMQTRMQFSSQLTHEIGQNYGGIFQETCYPQPDMGMSWSMHAELSHCGTESLFATPNPANAPSNFEEVPQPSPCTTSQELQRLAALLDLI

SEQ ID NO: 6079 - protein, 368 aa, Nostoc sp. GSV224
MPLAAVMTAPNQPVEVQQLPDPILEKGGIILETLYSEVCGTDVHLLHGRLEGVPYPIIPGHFSVGRVVETGGAVSDVNGKLIQPGAIATFLDVHETCYNCWYCLVAKASTRCPQRKVYGVTYSAKDGLLGGWSELIYLKPGVKVLTLPEEVSPKQFIAGGCALPTALHAIDRAQIQIGDVVVVQGCGPVGLSAAILALLSGAGKVIVIDKFESRLVVAKSFGVDETLAIKADDPRQHIERVLELTNGHGADVTIEATGIPIAVKEGLNMTRNGGRYVIVGHYTNTGEILINPHLEINLKHIDIRGTWGIDFSHFYRMIELLKRHSDSSKNIAWSSIISRSYTLKEINQALADVEQGSVLKAVIQPNLS

SEQ ID NO: 6080 - protein, 326 aa, Bacillus cereus ATCC 14579
MQKETVIIIGGGPCGLAAAISLQKVGINPLVIEKGNIVNAIYNYPTHQTFFSSSEKLEIGDVAFITENRKPVRNQALAYYREVVRRKSVRVNAFERVEKVQKDGEAFQVETTKRDGSKEIYIAKYIVVATGYYDNPNYMNVPGEELKKVAHYFKEGHPYFDRDVVVIGGKNSSVDAALELVKSGARVTVLYRGIEYSPSIKPWILPEFEALVRNGTIQMHFGAHVKEITEHTLTFTVDGEALTIKNDFVFAMTGYHPDHSFLTKMGVQIDEETGRPFYTEDRMETNAENIFIAGVIAAGNNANEIFIENGRFHGDAIAQTIASREK

SEQ ID NO: 6081 - protein, 523 aa, Candida tropicalis
MATQEIIDSVLPYLTKWYTVITAAVLVFLISTNIKNYVKAKKLKCVDPPYLKDAGLTGISSLIAAIKAKNDGRLANFADEVFDEYPNHTFYLSVAGALKIVMTVDPENIKAVLATQFTDFSLGTRHAHFAPLLGDGIFTLDGEGWKHSRAMLRPQFARDQIGHVKALEPHIQIMAKQIKLNQGKTFDIQELFFRFTVDTATEFLFGESVHSLYDEKLGIPTPNEIPGRENFAAAFNVSQHYLATRSYSQTFYFLTNPKEFRDCNAKVHHLAKYFVNKALNFTPEELEEKSKSGYVFLYELVKQTRDPKVLQDQLLNIMVAGRDTTAGLLSFALFELARHPEMWSKLREEIEVNFGVGEDSRVEEITFEALKRCEYLKAILNETLRMYPSVPVNFRTATRDTTLPRGGGANGTDPIYIPKGSTVAYVVYKTHRLEEYYGKDANDFRPERWFEPSTKKLGWAYVPFNGGPRVCLGQQFALTEASYVITRLAQMFETVSSDPGLEYPPPKCIHLTMSHNDGVFVKM

SEQ ID NO: 6082 - protein, 283 aa, Pennisetum ciliare
MGQVLGLVQVDQSTVAIKETFGKFSEVLEPGCHFLPWCIGQQISGYLSLRVRQLDVRCETKTKDNVFVTVVASVQYRALAEKASDALYKLCDIRAHIQSYVFDVIRATVPKLDLDDAFEQKNDIAKAVEDELEKAMSAYGYEIVQTLIVDIEPDDRVKRAMNEINAAARMRLAASEKAEAEKIIQIKKAEGEAESKYLAGVGIARQRQAIVDGLRDSVLAFSENVPGTTAKDIMDMVLVTQYFDTMKEIGASSKSSSVFIPHGPGAVKDVAAQIRDGLLQANQ

SEQ ID NO: 6083 - protein, 593 aa, Oryza sativa
  unsure (1)..(593): unsure at all Xaa locations
GARASDVADQAAPACERDAEKLEFIEEMTRGFDAVQERVLAAILARNNGAEYLRRHGMEGRTDREAFKARVPVVTYEDLRPEIERIANGDRSNIISSHPITEFLTSSGTSAGERKLMPTIEDELDRRQMLYSLLMPVMNLYVPGLDKGKGLYFLFIKSETKTPGGLPARPVLTSYYKSDHFKHRPFDPYNVYTSPTAAILCTDAFQSMYAQMLCGLVARAEVLRVGAVFASGLLRAIRFLQLHWRELAHDIRTGTLSAKVTEPSIRDAVAEVLAAPDAELAAFVEAECGKDKWEGIITRMWPNTKYLDVIVTGAMAQYIPTLKFYSGGLPMACTMYASSECYFGLNLRPMCDPSEVSYTIMPNMGYFELMPHDPXXRLVDLADAEVGREYELVITTYAGLCRYRVGDILQVTGFHNAAPQFRFVRRKNVLLSIDSDKTDEAELQAAVERASALLSPYGASIVEYTSQADATTIPGHYVVYWELMVREGGAWPPPAEEEGRGVFERCCLEMEEALNAVYRQGRNGEAIGPLEIRVVRAGTFEEVMDYAISRGASINQYKAPRCVSFGPIIELLNSRVISKHFSPACPKYSPHKK

SEQ ID NO: 6084 - protein, 189 aa, Pinus strobus
AWHSAGTYDVKSKTGGPFGTIKHPDELAHGANNGLDIAIRLLEPIKEQFPTISYADFYQLAGVVAVEITGGPDIPFHPGRPDKTEPPEEGRLPDATKGIDHLRDVFGHMGLSDKEIVALSGAHTLGRCHKERSGFEGAWTSNPLIFDNSYFKELLSGEKEGLLQLPSDKALLEDPIFRSYVEKYAADDD

SEQ ID NO: 6085 - protein, 196 aa, Oryza sativa
  unsure (1)..(196): unsure at all Xaa locations
STRPXRSRSRVDARDLAHALPTHYYHKVARSCIHVVXYENEPAVDSGNGGTQMTGHVAPRKSSNFFQEYGMDNGFQKKTSTAATKTQIQETDEARKKFFDVAPISSSQFFGNQSREEKDAQMSLQKFAGSSSISSADLFGRRDNDSNLDLSAADLINRISFQASQDLSSLKNMAGETGKKLTSIASNFISDLDRIL

SEQ ID NO: 6086 - protein, 481 aa, Chlamydophila pneumoniae J138
MTSRTKSSKNLGTIALAGMVVSSIIGGGIFSLPQNMAATAGAGAVILSWILTGFGMFFIANTFRILSTIRPDLKEGIYMYSREGFGPYIGFTIGWGYWLCQIFGNVGYAVITMDALNYFFPPYFQGGNTLPAILGGSILIWVFNFIVLKGIRQASIINVIGTIFKIIPLIIFIILTAFFFKLAVFKTDFWGHAVTKAQPSLGSVSSQLKGTMLVTLWAFIGIEGAVVMSGRAKNPLSVGQATVLGFLGCLTIYILFSLLPFGSLFQHQLANIPNPSTAGVLDILVGKWGEVLMNVGLIIAVLSSWLSWTIIVAEIPFSAAKNGTFPEIFTIENKEKSPSVSLYITSSVMQLAMLLVYFSSNAWNTMLSITGVMVLPAYLASAAFLFKLSKSKTYPKKGSIKAPLAMITGILGVVYSLWLIYAGGLKYLFMALVLLALGIPFYIDAGKKKKNAKTFFAKKEIVGMTFIGLLALTAIFLFSTG

SEQ ID NO: 6087 - protein, 503 aa, Tropaeolum majus
MSGTKATSVSVPLPDFKQSVNLKYVKLGYHYSITHAMYLFLTPLLLIMSAQISTFSIQDFHHLYNHLILHNLSSLILCIALLLFVLTLYFLTRPTPVYLLNFSCYKPDAIHKCDRRRFMDTIRGMGTYTEENIEFQRKVLERSGIGESSYLPPTVFKIPPRVYDAEERAEAEMLMFGAVDGLFEKISVKPNQIGVLVVNCGLFNPIPSLSSMIVNRYKMRGNVFSYNLGGMGCSAGVISIDLAKDLLQVRPNSYALVVSLECISKNLYLGEQRSMLVSNCLFRMGGAAILLSNKMSDRWRSKYRLVHTVRTHKGTEDNCFSCVTRKEDSDGKIGISLSKNLMAVAGDALKTNITTLGPLVLPMSEQLLFFATLVGKKVFKMKLQPYIPDFKLAFEHFCIHAGGRAVLDELEKNLKLSSWHMEPSRMSLYRFGNTSSSSLWYELAYSEAKGRIKKGDRVWQIAFGSGFKCNSAVWKALRNVNPAEEKNPWMDEIHLFPVEVPLN

SEQ ID NO: 6088 - protein, 66 aa, Triticum aestivum; identical to SEQ ID NO: 890

SEQ ID NO: 6089 - protein, 298 aa, Rhizobium tropici
MKEAYAAISREKAKPLVLECIGIDQPRPDEILVRIVASGVCHTDMVVRDQGYDVPQPVVLGHEGSGVVEVVGADVKGLSPGDHVALSYAYCGKCEKCRGGTPYYCEDFFGRNFRGTRPDGSCPLHDSHGTQISGCFFEQSSFATYAIASERNAVKVSKDVPLELMGPLGCGLQTGAGAVLNCLKPQPGSSIAVFGAGAVGMAAVMAAKIAGCSTIIVIDLNDERLELAIELGATHIINARNGDSVKAIREIIPEGADFSLECTSSPKVFRQAVDCLGTPGTCGLVGSSALGTEGIVDI

SEQ ID NO: 6090 - protein, 52 aa, Zea mays
QITKRGDTVDEKIKKLDAELARYKEQIKKTRPGPAQEAVKARAMRVLKQRRM

SEQ ID NO: 6091 - protein, 374 aa, Hippocratea volubilis
ALSIAGAVQSQKLAVRAISQLQSLPGGDIKLLCDTAVESVRDLTGCDRVMVYKFHEDEHGEVVAESKRPDLEPYIGLHYPATDIPQASRFLFKQNRVRIIVDCHASPVNVIQDDGLMQPLCLVGSTLRAPHGCHAQYMENMGSIASLAMAVVINGNDEDGIGGRNPTRLWGLVVCHHTSARCIPFPLRYACEFLMQAFGLQLNMELQLAAQLLEKHVLKTQTLLCDMLLRESPTGIVTQSPSTMDLVKCDGAALYYQANYYPLGVTPTEAQIKDIVEWLLVFHGDSTGLSTDSLADAGYPGATLLGNAVCGMAVAYITNRDFLFWFRSHTAKEIKWGGAKHHPEDKDDGLRMHPRSSFKAFLEVVKSRSLPWEN

SEQ ID NO: 6092 - protein, 336 aa, Oryza sativa
  unsure (1)..(336): unsure at all Xaa locations
XWRSRSSLSPVAAVSFLDSNRGGAFNQLKDKFRVVALAAGSNVTLLADQVKTFKPKLVAVRNESLVDELKEALADCDWKPEIIPGEQGVIEVARHPDAVTVVTGIVGCAGLKPTVAAIEAGKDIALANKETLIAGGAFRDWPVDKLKEVKVADALKHPNWNMGKKITVDSATLFNKGLEVIEAHYLFGAEYDDIEIVIHPQSIIHSMIETQDSSVLAQLGWPDMRIPILYTMLGSLTFKAPDNVKYPSMDLAYAAGRAGGTMTGVLSAANEKAVELFIDEKIGYLDIFKVVELTCDAHRNELVTRPSLEEIIHYDLWAREYAASLQPSTGLSPVPV

SEQ ID NO: 6093 - protein, 206 aa, Glycine max
PIQTTDTFRILLASGLLLRDLSSELLTFQLHSSGHPINPELFLVLEQTKASSLLSKEESSPGKDANMKLNKEKFHRKLIFDSVNEILGAKFGSSPEPCFQPNSNRLTKKTLSAQKLLKELCFEIEKIQAKKPECCLEDDHDGLKNMLCEDVMHGSESWTDFHGYLPGVVLDVERLLFKDLVDEVVIGESSGLRVKPSVRRRKLFGK

SEQ ID NO: 6094 - protein, 126 aa, Glycine max
  unsure (1)..(126): unsure at all Xaa locations
MASSCVANLSLSGVSQSHYVKANGMSTAKLNSICKTSALSIQKRSNRSRKFSVSAEYGSRRGSGGGDFVAGFLLGGALFGAAAYIFAPQIRRSXMSEEDEYGFKKPDQPSYYDEGLEKTRETLNEK

SEQ ID NO: 6095 - protein, 108 aa, Oryza sativa (indica cultivar-group)
DDDVVVACVVKAADAAAEGTFVKFLCSYGGRILPRHADGALRYVGGDNRVVSVDRSLPFHELQRKLREMCGWEAVCLRCQLPTEDLDALVSVTGDDDLANLLEEYDAA

SEQ ID NO: 6096 - protein, 125 aa, Triticum aestivum
AKPPAASVIGIAGIGMAELLPRVELDLKRASARVIDKAKEHCSHVADVSYEVKEGDARNVLCEAVERHHADMLVMGSHGYGAFKRAVLGSVSDYCTHNAHCTVMIVKKPKHHKKHEQLGFHRKEA

SEQ ID NO: 6097 - protein, 160 aa, Triticum aestivum
  unsure (1)..(160): unsure at all Xaa locations
RYLLASSAPPPPLAVIYVGDVHGYITKLESLCSNLXAALPADALATALVIFLGDYNDRGPHTRRVLNFLLALPTRYPAQRHVFLCGNHDLAFVAFRWGAAAAAQTVPVLWAPAQRHLSVLPLSLILPNALLITPFLRKIDTVIKDSRNAAESGMGHTTHN

SEQ ID NO: 6098 - protein, 508 aa, Thermoplasma acidophilum
MLKKELGIIDLMMASVTGMIGSGWLFSAFYASSMAGPYSIFSWLVGTGIVAILALIYADLSGRVPMAGAAAGYPFLTNGTVAGSLNAWSLFLGYASTPPLEVIASISYLSFLVPGLLNNNGLLTTTGILLAVALLVAFFILNATGIRNTSRFNNIISYMKIAIPIITSFFFIFTIFSIRNFTLVGTVKPEGIFTAVPGAGIAFSFLGFRQAVELSGEAKNPQKTVPIAIMLSVAVASAIYMIVQIAFIGSLQWGSIKPGDWAALADSGYSSGPMLVLASTLGLGALATVLLFDGIISPLGTSSIYQTTTSRISYRISEMGFFPKKISTTNSRSVPIFALILDLVVMILFVLPFPSWQSLVSVNSDLTIIAYMSGPISLAIFEKYGIEAKGFRLPASKILAPLGFALSALIVYWSGYPTTLYMSAIAIAGLVLFVFARKNPIRDISQGSYMIAILAILPVVSYLGSYGIGIIPFPLDLIVISAVALAIFYAGTRAAPQSVALMENFISS

SEQ ID NO: 6099 - protein, 294 aa, Rhizobium sp. USDA 4003
RGKTQIKEFAEFPDLEQLPLWGFDGSSTQQAEGHSSDCVLKPVAVYPDPARTNGVLVMCEVMMPDGVTPHASNKRATILDDEGAWFGFEQEYFFYKDGRPLGFPESGYPAPQGPYYTGVGYSNVGSVARQIVEEHLDLCLAAGINHEGINAEVAKGQWEFQIFGKGSKKAADQMWMARYLMQRLTEKYGIDIEYHCKPLGDTDWNGSGMHANFSTAYMREVGGKAYFEALMAAFDKNLMDHIAVYGPDNDKRLTGKHETAPWNRFSYGIADRGASIRVPHSFIKSDYKGYLEDR

SEQ ID NO: 6100 - protein, 436 aa, Raphanus sativus
MKGVRKTYDNSYTLSFFLLFFVFILFRPAFSMNTLSATESLTISSNKTLVSPGNVFELGFFRTNSSSRWYLGIWYKKLTNRIYVWVANRDNPLSSSTGTLKFSGNNLVLLGDSNKSFWTTNFTRGNGDLRWVAELLANGNFVMRDSNNNDSSGFLWQSFDFPTDTLLPEMKLGYDLKKGLNRFLISWRSSDDPSSGEYSYKLEPRSFPEFYVFSDDIRVHRSGPWNGIQFSGIQEDQKSSYVVYNFTENGEEVAYTFQMTNNSIYSRLIISSAGYFQRLTWNPSSETWNMFWSSPASLQCDPYMVCGAYAYCDVNASPMCNCIQGFDPRNMEKWNLRSQSSGCIRKTRLSCSGDGFTRMKNMKLPETTMATVDRSIGVKECEKRCLSDCNCTAFANADIRNGGTGCVIWTGELEDIRTYVADGQDLYVRLAAADLV

SEQ ID NO: 6101 - protein, 375 aa, Zea mays
MPAASWSAPTTSFAPAPAPPWGPWRTKAAPLPIRTLPRRVLLNAVGESAMVAAGDTLLGLYEKERLGLLQYADDESKEERYWETLDADLRYWTRSLRPVQWYPGHIAKTEKELKEQLRLMDVVIEIRDARIPLSTSHPKMDSWLGNRKRIIVLNRKDMISTEDMNAWATYFGNQGIKVVFSNGQLGMGTMKLGRMAKSVASVANTKRKEKGLLPRPVRAGIVGYPNVGKSSLINRLLKRRMCPAAPRPGVTRELKWVRFGTDLELLDSPGILPMRISDQTSAIKLAICDDIGERSYDFADVAAILVQMLIRHPAVGSEAFRRRYKIDVDSECGKTFVTKLSVHLFNGDTSQAAFRILSDYRKGKFGWVALERPPT

SEQ ID NO: 6102 - protein, 380 aa, Picea abies
NNVNPIKEVQDSPKEPNPITEQISVHADCKQTVEKPNENEIVVSANKAAVASLKQQSTLQSPRISRQPKTSLNQGNPVPLAKLHEDAGRSSSLDFVNIDSEYKDPQMCTAYVTDIYANMRVVELKRRPLPNFMETIQRDINANMRSVLIDWLVEVSEEYKLVPDTLYLTISYIDRFLSANVVNRQRLQLLGVSCMLVASKYEEICAPPVEEFCYITDNTYKKEEVLDMEINVLNRLQYDLTNTKPLRPFSGVSFEQLKHPVRFQACIWEFMGNYLAELTLVEYDFLKYLPSLIAAAAVFLARMTLDPMVHPWNSTLQHYTGYKVSDMRDCICAIHDLQLNRKGCTLAAIRDKYNQPKFKCVANLFPPPVISPQFFIDNEV

SEQ ID NO: 6103 - protein, 507 aa, Zea mays
MEATADSLPWAAQCAGAALFAAALCVTALGVVLVFLRRWPWCSCHVCRAYLTGSWARDFTNLGDWYAHLLRESPTGTIHVHVLGCTVTANPANVEYMLRTNFDNFPKGKAFAALLGDLLGGGIFNVDGHAWRHQRKMASLELGSVAVRSYAFGIVAQEVESRLVPVLAAAADAGAVVDLQDVFRRFAFDTICKISFGLDPGCLEREMPVSRLADAFDVATRLCAMRGAAASPLVWRAKRLLNVGSERELREAIALVDELAAAVIRERRKLGVVGSHDLLSRFMASAGAGDGDDKYLRDIVVSFLLAGRDTVSSALTTLFMLLSKNPGVAAAMRAEAGDGESAAPLTYEHLKGLHYTHAVLYENMRLFPPVQFDSKFCAGPDVLPDGTYVAGGTRVTYHPYAMGRMPRIWGADHGAFRPDRWLTGAGASFVPESLYRYPVFQAGLRVCLGKELAVTEMKVVAVAVVRAFDVEVVGDSGATACAPKFVSGLTASISGGLPVRVRRRVVR

SEQ ID NO: 6104 - protein, 289 aa, Triticum aestivum
  unsure (1)..(289): unsure at all Xaa locations
MSRGRQTYWCFQCSQRVGARVGEMDGPYSRMGSFVEMDDADALMSQFVGMYSDFHRDXGFGIMEAMSTVMRHGMGSMNREADVRGRPSILSDLETEFGSGPWLLFRGQLPGHLSEANSGFDVFVNGRRGVGMRRADVADYFVGPGLEDLIEQLTHNDRRGPPPASQSSIDAMPSVRITARHLTGDSHCPVCKDKFELGSEAREMPCKHLYHSDCILPWLXQHNSCPVCRYELPTQSSSGASCSRSRSTNQNDSSSSSSSSGRTSGRQRRRNPFSFLWPFRSSSSSTGSR

SEQ ID NO: 6105 - protein, 142 aa, Glycine max
  unsure (1)..(142): unsure at all Xaa locations
MGLAMGKLMLGKIIVETPKHEVLHTGDGYEIRKYPPCVAAEVTYDPKEMKGDRDGGFQVLANYIGAFGKPQNTKPEAIAMTAPVITSSGGGEAEPIAMTAPVITSSEPEPVAMTVPVLTAEGREEQAGKVTMQFLLPXKYAK

SEQ ID NO: 6106 - protein, 175 aa, Glycine max
MAKKSQKSLNSTGKRTRKSVPRDSPPQRSSIYRGVTRHRWTGRYEAHLWDKNCWNESQSKKGRQVYLGAYDDEEAAARAYDLAALKYWGQDTILNFPLSNYEEKLKEMEGQSKEEYIGSLRRKSSGFSRGVSKYRGVARHHHNGRWEARIGRVFGNKYLYLGTYATQEEAAAAYD

SEQ ID NO: 6107 - protein, 169 aa, Leavenworthia stylosa
NTEIVGMIHDGESRFSIKGKPIHHFLGTSTFSEYTVVHSGQVAKINPEAPLDKVCIVSCGLSTGLGATLNVAKPKKGQSVAVFGLGAVGLGAAEGARIAGASRIIGVDLNSNRFEQAKKFGVTEFVNPKEHDKPVPKVIAEMTNGGVDRSVECTGSVQAMIQAFECVHD

SEQ ID NO: 6108 - protein, 197 aa, Pseudomonas sp. Y2
MTCYSLNGLIPVVHPSAYVHPSAVLIGDVIIGPNCYVGPLASLRGDFGRIVLEEGANIQDTCVMHGFPDSDTVVGCNGHIGHGAVLHGCRIGEDVLVGMNAVVMDGAEIGARSFVSATAFVKAGFSCAEQSLVMGAPASVKRPLSDQEVAWKQAGTREYQLLAQRCLQDMVACQPLAEVEEQRPRIADRGLRPKGQV

SEQ ID NO: 6109 - protein, 464 aa, Bacillus anthracis str. A2012
MDKNLKKDLKIRHITMISIGGVIGAGLFVGSGAVVHSAGPGSIVSYALAGLLVVFVMRMLGEMAAINPTSGSFATYAREAIGPWAGYTIGWLYWFFWVIVIAIEATAGAGIIQYWIPEIPLWLLSLILTILLTLTNVFSVKSFGEFEYWFSFIKVISIVLFLCLGLAVILGFVPGTEAPGTSNLVGQGGFMPNGISSVLLGITVVIFSFMGSEIVAVAAGESAEPVKAVKTATNSVIWRILVFFIGSIAVVVTLLPWNSANILKSPFVAVLEHIGIPAAAQIMNFIVLTAVLSCLNSGLYTNSRMLFSMAERGDAPKAFLKLNSSGVPVRAVLFGTFFAYIGVVFSYISPDKVFLFLVNASGGIALLVYLVIAISHLKIRKKMGRVEQQNLKVKMWFFPYVTYVTIAAIIAVLIAMLAIESLRSQALLTMLVTVLIIISYFIFNRNKNSTVLNTKSKNEESVRF

SEQ ID NO: 6110 - protein, 368 aa, Zea mays
  unsure (1)..(368): unsure at all Xaa locations
MGKGAQGSDAAAAGGEVEENMAAWLVAKNTLKIMPFKRPPVRPYDVRVRMKAVGICGSDVHYLREMRIAHFVVKEPMVIGHECAGVVEEVGAGVTHLSVGDRVALEPGVSCWRCRHCKGGRYNLCEDMKFFATPPVHGSLANQVVHPADLCFKLPDGVSLEEGAMCEPLSVGVHACRRVGVXGPETGVLVVGAGPIGLVSLLAARAFGAPRVVVVDVDDXRLAVARSLGADAAVRVSPRXEDLADEVERIRAAMGSDIDVSLDCAGFSKTMSTALEATRPGGKVCLVGMGHNEMTLPLTAAAAREVXVVGVFRYKDTWPLCIDFLRSGKVDVKPLITHRFGFSQRDVEEAXFEVSARGRDAIKVMFNL

SEQ ID NO: 6111 - protein, 430 aa, Lotus japonicus
MAQILAPSTQWQTRITKTSPNASPITSNMWSSLLWKQNKKVARASKFRVLAIKSDGSTINRLEGLLNLDVTPYTDKFIAEYIWIGGTGVDVRSKSRTISKPVSHPSELPKWNYDGSSTGQAPGDDSEVILYPQAIFRDPFRGGNNILVICDAYTPQGEPIPTNKRHRAAEIFSNPKVQAEIPWYGIEQEYTLLQTDVKWPLGWPVGGYPGPQGPYYCAAGADKSFGRDISDAHYKACLYAGINISGTNGEVMPGQWEYQVGPSVGIEAGDHIWASRYLLERITEQAGVVLTLDPKPIEGDWNGAGAHTNYSTKSMREEGGFEVIKKAILNLSLRHQDHIRAYGEGNERRLTGKHETADINTFSWGVANRGCSIRVGRDTEKEGKGYLEDRRPASNMDPYVVTALLAETTLLWEPTLEAEALAAQKIQLKV

SEQ ID NO: 6112 - protein, 381 aa, Glycine max
MYRVLHRAFCTATEPATTATVAVSIRSISEDLYKEVKLKNVVEKFKKASDIDRFRKKTGIYEDTVRRLAGARRFRWIRDILEHQKQYSDISNEGFSARLISLYGKSGMTKHARKVFDEMPQRNCSRTVLSLNALLAAYLHSHKYDVVQELFRDLPTQLSIKPDLVTYNTIIKAFCEKGSFDSALSVLREIEEKGLSPDSITFNTLLDGLYSKGRFEEGEKVWEQMGVKNVAPGVRSYCSKLVGLAEVKKMGEAVVLFREMEKLGVKPDLFCINAVIKGFVNEGNLDEAKKWFGEIAKFEYDPDRNTYSIIVPFLCEKGDFKTAIDMCKEIFNNRCRVDATLLQGVVDKLASEGMDTEAKEIVEIGKTNRYCRYRLDLPAEK

SEQ ID NO: 6113 - protein, 350 aa, Arabidopsis thaliana
MATSGNATVANKQVILRDYVTGFPKESDLIFTDSTIDLKIPEGSKTVLVKNLYLSCDPYMRIRMGKPDPGTAALAPHYIPGEPIYGFSVSKVIDSGHPDYKKGDLLWGLVGWGEYSLITPDFSHYKIQHTDVPLSYYTGLLGMPGMTAYAGFYEICSPKKGETVFVSAASGAVGQLVGQFAKIMGCYVVGSAGSNEKVDLLKNKFGFDDAFNYKAEPDLNAALKRCFPEGIDIYFENVGGKMLDAVLLNMKLHGRIAVCGMISQYNLEDQEGVHNLANVIYKRIRIKGFVVSDYFDKHLKFLDFVLPYIREGKITYVEDVVEGLENGPSALLGLFHGKNVGKQLIAVARE

SEQ ID NO: 6114 - protein, 378 aa, Neurospora crassa
MHFPGHSSKKEESAQAALTKLNSWFPTTKNPVIISAPMYLIANGTLAAEVSKAGGIGFVAGGSDFRPGSSHLTALSTELASARSRLGLTDRPLTPLPGIGVGLILTHTISVPYVTDTVLPILIEHSPQAVWLFANDPDFEASSEPGAKGTAKQIIEALHASGFVVFFQVGTVKDARKAAADGADVIVAQGIDAGGHQLATGSGIVSLVPEVRDMLDREFKEREVVVVAAGGVADGRGVVGALGLGAEGVVLGTRFTVAVEASTPEFRRKVILETNDGGLNTVKSHFHDQINCNTIWHNVYDGRAVRNASYDDHAAGVPFEENHKKFKEAASSGDNSRAVTWSGTAVGLIKDQRPAGDIVRELREEAKERIKKIQAFAA

SEQ ID NO: 6115 - protein, 157 aa, Zea mays
MAASDVEYRCFVGGLAWATDDHSLHNAFSTYGEVLESKIILDLETQRSRGFGFVTFSTEEAMRNAIEGMNGKELDGRNITVNKAQSRGGRGDDDVAGYGGAREDGGYVGGGPRNGGGGYGGGDGYGGGDGGYGGGGVGYGGGNRGGGYGNSDGNWRN

SEQ ID NO: 6116 - protein, 645 aa, Borrelia burgdorferi B31
MSDTVPKRFKDVVALYSELDIFMYKEGESKSFKKQIYADFWNETKRVASGLLHCGIKRGEKVVIISDSRREWIIIDVATLGLGCVDVPRGNDSSEDELAYIINHSESTFIFVENNKQLHKVLSKKHDLRLVRCIVVIDDDKSYEEKIGNITVFSYKKLLELGTEYLRANPKSFDMEIEKGSSKDIATIIYTSGTTGMPKGVMLRHESFIFQLDRLYDYLPTLKPGKIMISILPLWHSFERACEYIVALKGIAIAYSKPIGPVLLKDFLLLNPQMIVSVPRIWEGIRIGIIKKVSESFIKKFVFGGFLKVGIIYAKLKERFLGLSPIYKKTNFLISLFSKLFLFIGIVLIFPIKLLGDILVFKKIKNALGQNFEFGVSGGGALVDYVDYFFKAVGIKVLEGYGLTETGPILSVRRLKGPVAKTVGPILPDVEYKVVGIDGRVLPYGEKGELWVRSPQIMSGYFKDKAKTSEVLTEDGWFNTGDLVRLTINNEISIVGRSKDTIVLRGGENIEPEPLERVLGKSLFIENIMIVGQDQKFLGAVIVPNFDNLEKWANSSGVSFSSRSDLLANEDVNKLYSKHISDTINTKLGFKNFEKIVGFVLLQDPFTIGEELTNTLKLKRYYISKKYEDKIKLIFSKSDLDLNGY

SEQ ID NO: 6117 - protein, 915 aa, Saccharomyces cerevisiae
MTVANTETHSAAKPSSTIGPWKLGETLGFGSTGKVQLAQHERTGHRTAVKVISKSIFNNNGNHSNDDSVLPYNIEREIVIMKLLSHPNVLSLYDVWETNNNLYLILEYAEKGELFNLLVDHGPLPEREAINCFRQIIIGISYCHALGIVHRDLKPENLLLDSFYNIKIADFGMAALQTDADLLETSCGSPHYAAPEIVSGLPYEGFASDVWSCGVILFALLTGRLPFDEENGNVRDLLLKVQKGQFEMPNDTEISRDAQDLIGKILVVDPRQRIKIRDILSHPLLKKYQTIKDSKSIKDLPRENTYLYPLADSNNHTSASIDDSILQNLVVLWHGRHADDIVSKLKENGTNKEKILYALLYRFKLDSVRGSNKKNRNKIKKTKKNKRSSTLSSSSSLLLNNRSIQSTPRRRTSKRHSREFSSSRKRSSFLLSSNPTDSSPIPLRSSKRITHINVASANTQATPSGVPNPHKRNSKKRSSKRLSYMPNTKRSSLTSKSLSNFTNLIDDDDWEYIEKDAKRTSSNFATLIDEIFEPEKFELAKREKAELQRKVQEAKRQSVNAQKINEDEFGSEVSDGMKELKKINDKVSSPLINYEFSQQELLQDIDTLLTNRYQLSSYTRPISRLDPGLTPVTETLPNNLKEKTALLQDTEKKIIETIRRSKFLGSLLNVRGGLSPGKSELAPIEESPIVSTTPLIYNDRMEPRRISDVEVPHFTRKSKHFTTANNRRSVLSLYAKDSIKDLNEFLIKEDPDLPPQGSTDNESRSEDPEIAESITDSRNIQYDEDDSKDGDNVNNDNILSDFPQGVGISQEYDMKDKNPNQSPISKSAEPTLVVKLPSLSSFQGKNASGLGLYQREPSKVTLPSLTSNNSSVGENIEDGAEKGTESEKIAASLSDDDLKEDNDKKDNDTVNALLQ

SEQ ID NO: 6118 - protein, 132 aa, Triticum aestivum; identical to SEQ ID NO: 3574

SEQ ID NO: 6119 - protein, 439 aa, Shigella flexneri 2a str. 301
MSQAKSNKMGVVQLTILTMVNMMGSGIIMLPTKLAEVGTISIISWLVTAVGSMALAWAFAKCGMFSRKSGGMGGYAEYAFGKSGNFIANYTYGVSLLIANVAIAISAVGYGTELLGASLSPVQIGLATIGVLWICTVANFGGARITGQISSITVWGGIIPVVGLCIIGWFWFSPTLYVDSWNPHHAPFFSAVGSSIAMTLWAFLGLESACANTDVVENPERNVPIAVLGGTLGAAVIYIVSTNVIAGIVPNMELANSTAPFGLAFAQMFTPEVGKVIMALMVMSCCGSLLGWQFTIAQVFKSSSDEGYFPKIFSRVTKVDAPVQGMLTIVIIQSGLALMTISPSLNSQFNVLVNLAVVTNIIPYILSMAALVIIQKVANVPPSKAKVANFVAFVGAMYSFYALYSSGEEAMLYGSIVTFLGWTLYGLVSPRFELKNKHG

SEQ ID NO: 6120 - protein, 317 aa, Glycine max
  unsure (1)..(317): unsure at all Xaa locations
MSTSKSVSSSSEDDNELRRGPWTLEEDNLLSQYISSHGEGRWNLLAKRSGLKRXGKSCRLRWLNYLKPDVKRGNLTPQEQLIILELHSKWGNRWSKIAQNLPGRTDNEIKNYWRTRIQKQARHLKIDTDSREFQELVRRFWMPRLLQKAKESSSSAMSIQNQATPMPFDGVSQHSTVGTIPSHSHTPWQGPCMNEAGPTYMDQHEQNSDSEHNNGSCISLSESANFPKVPQHFGRTTITQYHALNNNDFGTFTYDGYNVSNNVYEMDNFKTPTTRVAEDAQYPTGDCQMVGSNWVNSDFACNMWNMDELWQFSKLQK

SEQ ID NO: 6121 - protein, 327 aa, Xanthomonas axonopodis pv. citri str. 306
MSSPITLIEAITQALAWELEHDPAVLVLGEDVGVNGGVFRATAGLQQRFGSDRVLDTPLDETTIAGLSVGLAAQGMKPVAEAQFDGFVYPMVDHLICHAARLRNRTRGRLHCPMVLRVPWGGGIRAPEHHSEANEAIFTNVPGLRVVLPSSPQRAYGLLLAAIRDPDPVIYMEPKRIYRQYKEVVANDGEALPLDVCFVLRDGTDVTLVTWGAQVKEALEAADKLAGEGISAEVIDVATLRPLDFDTIAESVAKTGRCVIVQEAPRTAGFGAEIAARLAEQSMYDLVAPVERVTGYDTHIPLFRLEMKFLPSVERIVSAARRAVAAG

SEQ ID NO: 6122 - protein, 152 aa, Manihot esculenta
MVKAEAVLTSSEGVSGTIFFTQEGDGPTTVTGNISGLKPGLHGFHVHALGDTTNGCMSTGPHFNPSGKDHGAPEDEIRHAGDLGNVTAGDDGTASFTIIDKHIPLSGQNSIIGRAVVVHADPDDLGRGGHELSKTTGNAGGRVACGIIGLRG

SEQ ID NO: 6123 - protein, 163 aa, Chlamydomonas reinhardtii
MAANTEQLTEEQIAEFKEAFALFDKDGDGTITTKELGTVMRSLGQNPTEAELQDMISEVDADGNGTIDFPEFLMLMARKMKETDHEDELREAFKVFDKDGNGFISAAELRHVMTNLGEKLSEEEVDEMIREADVDGDGQVNYEEFVRMMTSGATDDKDKKGHK

SEQ ID NO: 6124 - protein, 238 aa, Oryza sativa
  unsure (1)..(238): unsure at all Xaa locations
XQIWGRPESDVQVQTQTQAQXXHNRYGETDNRDWRARTVQPPAANEEKSWDNIREAKAAHASSGRQQEQVNRQDQLNHQFASKAQVGPTPALIKAEVPWSARRGNLSEKDRVLKTVKGILNKLTXPEKFDLLXRGQLMESGIPLADILKXDVLSLLHIWKKAVFXEPPPRPMYAQLCSDLNEKLPSFPSEEPGGKEITFKRVLLNNCQEAFEGAESLRAEIAKLTGPDQEMERRDKER

SEQ ID NO: 6125 - protein, 351 aa, Oryza sativa (japonica cultivar-group)
MAAAGAGASGPAAETAAATFRRVYGTLKAELLKDPSFDFNDDAIQWLESMLDYNVLGGKLNRGLAVVESYKILKAASATEPSEEELFLACILGWGIEWLQAYFLVLDDIMDNSQTRRGKPCWFRLPKVGLIAINDGLVLRSQISRIFRRYFRGKSYYVDLLDLFNEVEIQTTSGQLLDQITTNEGRKDLNKYRRIVEYKTAYYSFYLPVACALLLFDESLDNYAQVKHILVEMGVYFQSQDDYLDCFGEPEIIGKIGSDIEDFKCSWLFVQALERADEKQKGVLFENYGKSDPACVAKVKDLYNELHLQRVFSEYERESYEKLISAIEAQPNEAVRAVLKSFLHKIYKRSK

SEQ ID NO: 6126 - protein, 419 aa, Erucastrum gallicum
YHHSCTIFFLVLIQFHHVFSTNTLSPNDALTISSNKTLVSPGDVFELGFFKTTTRNSRDGTDRWYLGIWYKTTSDQRTYVWIANRDNPLHNSMGTLKISHANLVLLDQSDTPVWSTNLTGVAHLPVTAELLANGNFVLRDSKTNDLDQFMWQSFDFPVDTLLPEMKLGRKVNSSEKEKILTSWKSPTDPSSGDYSFILETEGFLHEFYLFKNEFKVYRTGPWNGVRFNGIPKMQNWSYIDNSFIDNKEEVAYTFRVNNNHNIHSRFRMSSTGYLQVITWTKTVPHRNMFWSFPEDTCDVYRVCGPYAYCDMHTTPMCNCIKGFVPKNAAQWDLRDASGGCVRSSKLSCGEGDGFLRLGQMKLPETSEALVEKGIGLKECKDKCLRDCHCTGFANIDIMNGGSGCVTWTGELVDMRNYDA

SEQ ID NO: 6127 - protein, 145 aa, Pseudanabaena sp. PCC 6903
VYRFNEHGDGTVIAETKQPHLESFLGLHYPDSDIPKQAKHLYTLNWLRLIPDVNYQPTALVSHKQSPEAKSSSEKVPLDMSYCALRSVSPIHIEYLQNMGVTASMSVSLIQNKKLWGLIACHHYTPKFIPYETRTICEFLGQLMS

SEQ ID NO: 6128 - protein, 325 aa, Ralstonia metallidurans
MPAAKLIPPVLQNLALPVIASPMFIVSYPELVLAQCKAGIVGSFPALNARPAELLDEWLTQIQAELANFKAANPGKPVGPIAVNQIVHASNARLEHDVKVCVEHKVPIFITSLRAPPKEMIDAVHSYGGIVLHDVINIRHAEKAIEAGVDGLILVAAGAGGHAGTLSPFALVGEVRKFFDGPIALSGSIATGEAVLAAQAMGADFAYVGTRFIASQEAHAALEYKQSITSSAASDIIYTNLFTGVHGNYIRESIVNSGLDPENLPVADKSKMDFSSGSSKAKAWKDIWGAGQGVGQIEDIPTAGEIVARMKSEYDAARARLGLVA

SEQ ID NO: 6129 - protein, 450 aa, Zea mays
MRGSMSNYYDDYDDIDEIEDDYDMDDPADDMVDEQRGVRDSDAEDNDYGQPNDKIPDTSSADARNGRDIQGIPWEQLNITRKKYRQSRLEQYKNYENVPNSGEEAMKDCKPTEKGGMYYEFRRNTRSIKSTILHFQLRNLVWATSKHDIYLVSHYSIRHWSALSGVDTELINVQGHVAPREKHAGSLSEGFYQTQVSTLAVKDNLLVAGGFQGELICKHLDQEGISFCCRTTYDDNAITNAVEIFNTSSGAVHFMASNNDSGVRYYDMERFQLFKHFQFEWPVNHASLSPDRKVVVIVGDDPDGLLIDANSGKTVHSIKGHRDYSFASAWSPDGRTFATGNQDKTCRIWDVRNLSKSVHVLRGNLGAIRSIRFTSDGQFMSMAEPADFVHIYDVKSDYNKRQELDFFGEISGTSFSPDTDTLFVGVWDRMYGSLLQFGRLYNYSYLDSLF

SEQ ID NO: 6130 - protein, 228 aa, Gossypium costulatum
  unsure (1)..(228): unsure at all Xaa locations
FTSLCHTDVYFWEAKGQTPLFPRIFGHEAGGIVESVGEGVTHLKPGDHVLPVFTGECGNCRHCKSKESNMCDLLRINTDRGVMLSDGKTRFSINGKPIYHFVGTSTFSEYTVAHVGSVAKINPAAPLDXVCILSCGISTGLGATLNVAKPAKGSTVAIFGLGAVGLAAAEGARIAGASRIIGVDLNPNRFEEAKKFGCTEFVNPKDHNKPVQEVLAEMTNGGVDRSVE

SEQ ID NO: 6131 - protein, 180 aa, Bacillus cereus ATCC 14579
MGFPKLETERLFLRELTLLDAETMFQYFSKESVIRYFGMDSFQNIEQAKTTIQTFKNRYEEGSVFRWGIEKKGTGQLIGTCGFHLINNHHKRAEIGYELDDTYWGQGYASEALQAILAYGFEMLQLIRIAAVVYVENKASQKLLIKAGFQEEGLLRKHMIQNGVAHDTILYSLLKEEWKK

SEQ ID NO: 6132 - protein, 537 aa, Schizosaccharomyces pombe
MEPEYVSFSDKDTKSILNESKSSLKDVKPSLEEKSYITPGLVDDVEPKGKNFVVRFFDDFKPAKATGEDGTALKRSLKSRHMQMISIGGAIGTGLYVGSGSSLADGGPASVIINYSLIGIMMFFIVYALGEMAVAYPVAGGFNTYATRFIDPAWGFAVSWNYFINYFVTFPLELTTCAITFRYWTDINSAAWISIFLVVIIIVNLFGVRAYGEVEFILSTVKVVATFGFIILAIIINCGGVPTDHRGYIGGSIIKHKPFRHGFKGFCSVFTTAAFSFSGTEVIGLAAAEVDNPQKALPHAVKQVFWRIAIFYVVSLILIGLLISPDDPNLMGNGSTSVSPFVLAIKEANIKGLPSVFNAVIIISVVSVTNSSTYTAGRTLHGMANLKQAPSFFKYTDRLGRPLLAMIVVLLFGFFAYINEADKNGNDVSDTVFNWLLALSGLSNFFTWGSICLCHIIFRLAFKKQGHSLKELGFVSPMGIWGSCIGLFFNILCLMAQFYVSLFPIGGKPNANDFFQGYLAAPVTLAFFIGYKIYDRS

SEQ ID NO: 6133 - protein, 222 aa, Glycine max
KDMVSETESPPLIGPRISFSDGGDFICTELEKEIVKGSVKVSDFEFLSENASPERMHTADELFSEGKLLPLWQEKHSEKLKNVNLKTNEEEESRKVEAAMTSDDSSKNRVCWFIDEDPSPRPPKCTVLWKELLRLKKQRSSSSVKSSLSPSSSTSSSSSLEDKREGKRGKKGLERTRSSTSVRIRPMIHVPVCTPPSKSSVSLPPLFPSLRLKKNRAEKSKL

SEQ ID NO: 6134 - protein, 222 aa, Phanerochaete chrysosporium
TLTFVIYFLTQHPDVLQRLRQEILDVVGPSNLPTYDDIKQMKYLRAVLNETQRLYPPVPWNMRYAVEDSIVPNSEPEGKPWFIPAGASVSYSVHCMHRRKDYWGPDAEEFDPDRFLDERLHKYLTPNPFIFLPFNAGPRICLGQQFAYNEMSFFLVKLLQTFEDISFERDAFEPNALPPAEWAKFPGRKGKEKFWPRAHLTLYSEGGMWVKMREAQAMGQVA

SEQ ID NO: 6135 - protein, 366 aa, Schizosaccharomyces pombe
MIRLQKFGEIVGTSRSWKLLSSTIAKRYSSSSNGVKEMTVRDALNSAMEEEMKRDDRVFLIGEEVAQYNGAYKISRGLLDKFGPKRVIDTPITEMGFTGLATGAAFAGLRPICEFMTFNFSMQAIDHIVNSAARTLYMSGGIQACPIVFRGPNGPAAAVAAQHSQHFAPWYGSIPGLKVVSPYSAEDARGLLKAAIRDPNPVVVLENEILYGKTFPISKEALSEDFVLPFGLAKVERPGKDITIVGESISVVTALEAADKLKADYGVEAEVINLRSIRPLDINTIAASVKKTNRIVTVDQAYSQHGIGSEIAAQIMESDAFDYLDAPVERVSMADVPMPYSHPVEAASVPNADVVVAAAKKCLYIK

SEQ ID NO: 6136 - protein, 123 aa, Lycopersicon esculentum
DLKPENVLVREDGHIMLSDFDLSLCCSFSPTLVKTSSLELEPLKKNSGYCVQPACIEPSCIQPSCVVPTTCFSRRIFSSKSKKDRKPKNDVGNQVRPLPELIAEPTGARSMSFVGTHECLAPE

SEQ ID NO: 6137 - protein, 442 aa, Rhodobacter sphaeroides
MPGHIFGRSTRGSLPVAAEGEGCYILDTEGRRYLDGSGGAAVSCLGHSNAAVRAALHDQLDRLAFAHTGFFTSEPAERLADRLAAAAPEGIERVYLVSGGSEAVEAALKLARQYFMEVGQPGRHRVIARRQSYHGNTLGALAAGGNEWRRAQFAPLLVETSHVSPCYEYRGRAEDESLEAYGLRVADELEAEIQRLGPETVMAFVAEPVVGATAGAVPAVPGYLKRVREICDRHGVLLILDEVMCGMGRTGHLFACAEDGVAPDMITIAKGLGAGYQPIGALLVQGRIYDAIAAGSGFFQHGHTYMGHAMAAAAANAVLDEIEGRDLLQAVRRQGARLEALLQERLGQHPHVGDIRGRGLFRGIELVADRETKEPFDPARKLHARIKAEAFAGGLICYPMGGTLDGVRGDHILLAPPFIISDAELDELVDKLSGALDRALAA

SEQ ID NO: 6138 - protein, 296 aa, Rhizobium sp. CC2160
RGKTQIKEFDAFPTLEQLPLWGFDGSSTQQAEGRSSDCVLKPVAVYPDPVRTNGALVMCEVMMPDGKTPHPSNTRATVLDDESAWFGFEQEYFFYKNGRPLGFPEQGYPAPQGPYYTGVGYKNVGDIARRIVEEHLDICLAAGINHEGINAEVAKGQWEFQVFGKGSKKAADEVWLARYLLLRLTEKYGIDVEFHCKPLGDTDWNGSGMHANFSTAYMREVGGKDYFEALMAAFEKNLHDHINVYGPDNHLRLTGKHETAPWDKFSYGVADRGASIRVPHSFVNNGYRGYLEDRRP

SEQ ID NO: 6139 - protein, 151 aa, Legionella pneumophila
MDLFRKKDIKGSPDNESHLAKCLSVFDLTFLGVGAIIGAGIFVLTGIVAATISGPAVIFSYVVAGFACAFAALSYAELAASIGGCGSAYGYAYAGFGELIAWIVGWDLLLEYSIGVSAVSIGWSGYANDFLMALKIFIPTHLLHGPVDGGI

SEQ ID NO: 6140 - protein, 435 aa, Haemophilus influenzae Rd
MSAKSNKIGVVQLTILTMVNMMGSGIIMLPTKLAEIGTISIVSWLVTAVGSTALAYAFAQCGMFSKKSGGMGGYAEYSFGKAGNFMANYTYGVSLVIANTAIAISAVGYGSELFGTILSPLSIALWTIFTLWLATVLNFGGARITGNISSFTIWGVIIPVVGISIIGWKWFDGSMYVNSWNPHNVPTFEAIGVSISMTLWAFLGLESACANADAVENPEKNVPIAVLGGTLGAAVIYIVSTNVIAGIVPNLELANSTAPFGLAFAHMFDETVGKVIMGLMVMSCFGSLLGWQFTIAQVFKSSAEEGYFPAFFKKITSKDAPVVGMITITALQTLLSLMTISPSLNKQFNVLVDLAVVTNVIPYLLSMAALAVLLKAENVAPQKYKTTVFVAFIGSLYSIYALYAAGEQAMLYGSIVTFIGWTLYGFVSYKFDLKK

SEQ ID NO: 6141 - protein, 159 aa, Triticum aestivum
  unsure (1)..(159): unsure at all Xaa locations
GTYSLILSLMQLXFENVIKKHTYTAVLNMQIYTALVATIASMVGLFTSGEWRMMTEEMDTFRSGQFSYFMTLVWTAVSWQITSVGVVGLVFEVSSLFSNVISTVSLPIVPLFAVLIFHDTMDGIKIISMLIAAWGFVSYLMQHFIDDKKARKAAAGWLV

SEQ ID NO: 6142 - protein, 341 aa, Pseudomonas aeruginosa
MNAYAKALSRLETTTSSWLVTGVAGFIGSNLLELLLKFNQKVVGLDDFSTGHMYNLDEVRGLVGEERWRNFKLIQGDIRDIGDCRRAVEGVDYVLHQAALGSVPRSIADPITTNSVNISGFLNILVASKEAGVKSLTYAASSSTYGDHPGLPKVEEVIGKPLSPYAVTKYVNELYADVFSRCYGFNLIGLRYFNVFGKRQDPNGAYAAVIPKWISAMIKGEPVYINGDGETSRDFCFINNVIKANLLAAFCETEEAKNQVYNVAYGGRTTLGQLFDSLKVELSRNGINYEQGPIYREFRAGDVRHSQAEIKKAQAYLGYNPEYDIQAGIAEAMPWYISFVK

SEQ ID NO: 6143 - protein, 403 aa, Zea mays
MMLEGKSYLVSRSVPSSCEPETEWEYLAHAVLSGKRPAPEDDVEVEDPDETGSGGKRSKPASPQPHTPDICEGHGSNRHATGSGEQRITGSNPMTSIGRDLTLNCLLRLSRSDYGSVASLSRDFRSMVRSGEIYRLRRQNGVAEHWVYFSCNVLEWDAYDPYRERWIQVPKMPPDECFKCSDKESLAVGTELLVFGMARIVFRYSILTNSWSRADPMNSPRCLFGSTSVGGKAFVAGGTDCVGNILSSAEMYDSETHTWTPLPSMNTARKMCSGVFMDGKFYVIGGVANSNRVLTCGEEYDLKRGSWRTIENMSGGLNGVTGAPPLIAVVSNELYAADYGEKDLKKYDKKNNRWITLGKLPERSVSMNGWGLAFRACGDRLIVIGGPRTYTGGTIELNSWIPD

SEQ ID NO: 6144 - protein, 336 aa, Methanosarcina acetivorans C2A
MKINTWFGSLEVGSGGEILAFDLFPKGIRELALRSLSLRSSRENLPPEGFDLKAAALECGFVASLSEYYSLLHEVTLEAAKLQVSEAITPDQRIVQAVEALDDINETTNSLSERLFEWYGGYFPESGLVGEALALFIVKYGSRENVPPDDPLYLKARDSMGAKLETADEALLKGFAESVCSLYSRRKQLEAYIESSMEALAPNLTTIAGPMLGARLISIAGSLEKLAAFPSSTIQVIGANKALFKHLRARAPSPKHGVIYSHPFINTSPWWVRGKVARALAAKISLAARIDFYSATKDLSLMGELEEKVRKIRAANPKPPQKRQEGRGKPKKKRRK

SEQ ID NO: 6145 - protein, 332 aa, Zea mays
MGSPRKSDKKAALDFAAWGFNITSSVGIIMVNKALMATHGFSFATTLTGLHLLTTTLMTIVFRWLGLSQPSHLPLPDLIKFVIFSNLSIVGMNVSLMWNSVGFYQIAKLCMIPASCLLEVVFDRVHYSRDTKLSIMVVLVGVAVCTVTDVSVNAKGMLAAVIAVWSTALHQYYVHFLQRKYSLNSFNLLGHTAPAQAGWLPRVRPGADYLLTGKRVDQFSLSSLALFFLALSCFIAIGVNLSQFICIGRFSAVSFQVLGHMKTVLVLSLGFLFFGKEGLNLQVVLGMVLAVLGMIWYGNASAKPGGKERRSILPVRSASLKGSSEEKAGAEK

SEQ ID NO: 6146 - protein, 238 aa, Methanosarcina acetivorans C2A
MQAGFLSEFVNTPLFGILLSLVAFQIGSLLYKKTRSSVFNPLLIGFVLVILFLLYFRIDFETYNVGGDYISFFLGPATVVLAVPLYKKIQLLKSNSLPIITGISAGCIAGISSIFIFSSLFGLDEVITNSLVPKSVTTPIGIEISKQIGGLPAITVAAIIVTGIIGAILGPFICRCFRINDGVAVGIAIGTASHALGTTRAIELGETEGAMSGLAIGIAGLVTVFLAPMLLYLFSIVF

SEQ ID NO: 6147 - protein, 349 aa, Zea mays
MKDLSSFHDTFGSFSAKRTDKIGDYSGSSKWGKKPVSLDDDRRSTYDQHYSRNSSLFAALDDERKLLVPVGVQQPHAYARSLARFASKLGPVGWDVAANRIRRALPPGTSFGPGWVVDGEPPQNSQWAPAASTNPSSEPTAPPNMPSKNDVLDHKSGPSSNGDVTGEEHLTRTQTVASTSASFDKSSDISSKVTKLENGVTESCGGTDNTGSAAPPMQQHSHSREIHSNINGFTAMSNAMSQYAGQGLFGSGIHMTHAQVLGMFSGMNGKVNGYIHRHPVTADSLKTAGQNGDVGKATVNPVQSAGQDPKTATENSSAHPGLNSRAQSSGSSPRGKLANPKHPDLALQL

SEQ ID NO: 6148 - protein, 477 aa, Glycine max
  unsure (1)..(477): unsure at all Xaa locations
MAAMQRPLKRTIAIAKLRACFSSLRPAAAADIVASPPPQLPPFDHQPHPYNGPFADEVLAKRKTFLGPSVFHYYKKPLNIVEGKMQYLYDDCGRRYLDXAFAGIVTASCGHCHPGILYAITEQSKLVRHASTIYLHHTIGDCAGSWAAXKMPGNLKVVYFVNSGSEANELAMMMARLYTGSLGMISLRNAYHGGSSSTLGLTALNTWKYPIPEGHVHHVMNPDPYRGAFGADAASYANDVQDHIDYGTSGKVAGFIAETMQGVGGAVELAPGYLKLVYDIIHKAGGVCIADEVQTGFGRTGSHYWGFETQGVIPDIVTMAKGIGNGLPLGAVVTTPEIASVLAQKIQFNTFGGNPVCSAGGLAVLRVLDKEKRQAHCADVGSHLLERLRFLMERHDIIGNVRGRGLMVGIELVTDRDNKTPAKAETAVVFEKLRELGVLVGKGGLHGNVFRIKPPMCFSKDDADFLVDALDYSLSKL

SEQ ID NO: 6149 - protein, 384 aa, Mycobacterium tuberculosis H37Rv
MRAVVIDGAGSVRVNTQPDPALPGPDGVVVAVTAAGICGSDLHFYEGEYPFTEPVALGHEAVGTIVEAGPQVRTVGVGDLVMVSSVAGCGVCPGCETHDPVMCFSGPMIFGAGVLGGAQADLLAVPAADFQVLKIPEGITTEQALLLTDNLATGWAAAQRADISFGSAVAVIGLGAVGLCALRSAFIHGAATVFAVDRVKGRLQRAATWGATPIPSPAAETILAATRGRGADSVIDAVGTDASMSDALNAVRPGGTVSVVGVHDLQPFPVPALTCLLRSITLRMTMAPVQRTWPELIPLLQSGRLDVDGIFTTTLPLDEAAKGYATARARSGEELRFCLRPDSRDVLGAHETVDLYVHVRRCQSVADLQLEGAADGVDGPSMLN

SEQ ID NO: 6150 - protein, 117 aa, Neurospora crassa
MPTMWLSDSQKIGVAFCSGGGFFLIGGVLLFFDRAMLAMGNQKAKGTAAFFSGLALILMRWPLIGFCVELYGIMILFGDFLGTIAGFARNIPVIGPYIGTAVDRSGVVARQNADLPV

SEQ ID NO: 6151 - protein, 122 aa, Glycine max
MGRTYVLMMVAALLLSSTMAQSPASSPALSPTHTPVATPPRRALSPSPSSVSPAASPATGNSPPAPPTSSPSESPLPSAATPNISPSTISTPPSEGPAANGAVFNRVSGSALLLIFAAAILI

SEQ ID NO: 6152 - protein, 95 aa, Zea mays
  unsure (1)..(95): unsure at all Xaa locations
FYTLRVLLQMGVCXLCFGGQMPADKEQRIVDHLAKPWAEPYQEKDCIQLPSYRNHYVNGDNFTPKSHQQDPQRMTRAYTQTGATLNLLRAFTSGG

SEQ ID NO: 6153 - protein, 644 aa, Neurospora crassa
MSSSRYSLRQTPRLDLGHHHVTFSTTPLSLLPGPCEAASRVKCGLLTFHDSKKELFQGMVETPVRRNTRRSKSQIPESSDGESSASATETVSKQTSAKAKNDTLRKRNLKTTGKFFEHIDEEENTMQPTPPYTSSDEPDVENAPLLSGNSSSSSRSSLDANGKPGAEKLIDGWRPGMDPKIDTSGHFEFGGSLGTGAMMIFFPILMWYMWIGATQYNGGIPSREPGQSWADFAAHLCDLVYTKAFPHAKAWLWYWTFLIFEGAFYCLMPGVTAYGKPLPHEGGKMLKYHCSAYVSFYVTFAIAGVLHFTGIFPLYQIIDEFGPLLSVAIISGFLVSIVAYVSAFVRGATHRMTGHHVYDFFMGAELNPRMFGVLDFKMFFEVRLPWYILLLLSLGAAARQWDRYGYVSGEVGFLVMAHYLYANACSKGEELIVTTWDMYYEKWGFMLIFWNLAGVPLSYCHCTIFLASHHPDEYRWNRFALVGLYVSYLFVYWVWDTCNSQKNRFRAQERGKLLYRKTFPQLPWQTVKNPQKIETETGDSILVDGWYGLARKVHYTCDAYFAICWGLITGFSSPFPWFYPVFFCCMIAHRAWRDITRCREKYGDAWKEYERRVPYLFIPVSFFFFSFFSLFFFFFFPFRHSCWG

SEQ ID NO: 6154 - protein, 346 aa, Mesorhizobium loti
MTKYKLEYIWLDGYTPVPNLRGKTQIKEFAEFPTLEQLPLWGFDGSSTMQAEGRSSDCVLKPVALYPDPARTNGILVMCEVMMPDGVTPHESNSRATILDDEDAWFGFEQEYFFYKDGRPLGFPESGYPAPQGPYYTGVGYKNVGDVARKIVEEHLDQCLAAGINHEGINAEVAKGQWEFQIFGKGSKKAADQIWMARYLLLRLTETYGIDIEFHCKPLGDTDWNGSGMHCNFSTKFMREVGGKAYFEALMAQFDKNLMDHIAVYGPDNDKRLTGKHETAPWNKFSYGVADRGASIRVPHSFVKNDYKGYLEDRRPNSQGDPYQIASQVLKTISQVATDAKVSAAA

SEQ ID NO: 6155 - protein, 329 aa, Magnetospirillum magnetotacticum
MITMLLVTGGAGYVGSHTLHHLIRNGYSPESIIVVDNLCRGSRDAVPHGVHFAEVDLLDTEVLVELFRRHDVSAVIHFAGFAYVDESMADPTAYYRTNVVAGLSLLEAMVRVGCRAIVFSSTCATYGTPSSVPIAESEPQIPINPYGETKLVFERALEWYERCHGIRHVILRYFNAAGAAYGVGSYGNHDVRMIPAAVLAAMGRRPPVKIFGTDYETSDGTCVRDYVHVADLAEGHCLALEHLREDGASTALNLGSGRGSSVLNILEAVHRIGGRPVPNEKSPRRLCDPPTLIADTRLAQRILGWHPAYTLDDIISSVWHWHQSMVMAR

SEQ ID NO: 6156 - protein, 192 aa, Azotobacter vinelandii
MTIRTFQGITPILGERVFVDPASVVLGNVAIGDDSSIWPQVAIRGDVHRIRIGARTSIQDGSVLHVTHAGPFNAEGHPLEIGDEVTVGHKVTLHGCRIGNRVLVGMGAIVLDGAVVEDEVIVGAGSLVPPGKTLESGFLYVGSPVKQVRPLNDKERGFFRYSADNYVRLKDQHLAEHYLPLKEPHLLADHED

SEQ ID NO: 6157 - protein, 276 aa, Rhizobium galegae
WGFDGSSTMQAEGRSSDCVLKPVALYPDPARTNGALVMCEVMMPDGVTPHATNARATILDDEDAWFGFEQEYFFYQNGRPLGFPEQGYPAPQGPYYTGVGYSNVGDVAREIVEEHLDLCLEAGINHEGINAEVAKGQWEFQVFGKGSKKAADQIWMARYLLQRLTEKYGIDIEYHCKPLGDTDWNGSGMHCNFSTKYMREVGGKDYFEALMAAFDKNLMDHIAVYGPDNDKRLTGKHETAPWNKFSYGVADRGASIRVPHSFVKNDYKGYLEDRRP

SEQ ID NO: 6158 - protein, 90 aa, Glycine max
MTESMVRNKPGMASVKDMPVLQDGPPPGGFAPVRYARRIPNKGPSAIALFLTTFGAFSWGMYQVGQGNKVRRALKEEKIAARSAILPMLQ

SEQ ID NO: 6159 - protein, 231 aa, Escherichia coli K12
MMANIWWSLPLTLIVFFAARKLAARYKFPLLNPLLVAMVVIIPFLMLTGISYDSYFKGSEVLNDLLQPAVVALAYPLYEQLHQIRARWKSIITICFIGSVVAMVTGTSVALLMGASPEIAASILPKSVTTPIAMAVGGSIGGIPAISAVCVIFVGILGAVFGHTLLNAMRIRTKAARGLAMGTASHALGTARCAELDYQEGAFSSLALVLCGIITSLIAPFLFPIILAVMG

SEQ ID NO: 6160 - protein, 295 aa, Streptococcus mutans UA159
MGVFIFLCFILFLVILLIASGLYVVRQQTVAIIERFGKYQLTSASGIHLRLPFGIDKIAARIQLRLLQSEIIVETKTKDNVFVTLNVATQYRVNEQNVTDAYYKLMRPEAQIQSYIEDALRSSVPKLTLDELFEKKDEIALEVQHQVAEEMSTYGYIIVKTLITKVEPDAEVKQSMNEINAAQRKRVAAQELANADKIKIVTAAEAEAEKDRLHGVGIAQQRKAIVDGLAESIMELKGTNVSLTEEQIMSILLTNQYLDSLNTFAQHGNSSIFLPANPEGAEDIRTQVMSALKAR

SEQ ID NO: 6161 - protein, 246 aa, Xanthomonas axonopodis pv. citri str. 306
MTSRVALVTGGTGGIGTAICKRLADQGHRVASNFRNEEKARHWQQRMQAQGYAFALFRGDVASSEHARALVEDVESSLGPIEVLVNNAGITRDTTFHRMSAEQWHEVINTNLNSVFNVTRPVIEGMRKRGWGRVIQISSINGLKGQYGQANYAAAKAGMHGFTISLARENAAFGVTVNTVSPGYVATDMVMAVPEEVRAKIVADIPTGRLGRPEEIAYAVAFLVAEEAAWITGSNLDINGGHHMGW

SEQ ID NO: 6162 - protein, 302 aa, Candida glabrata
MVSEAEFLASYPQKCPAGSLPGTPGNTDEAQEGALKQLRSELEAAGFKERLDDSTLLRFLRARKFDVALAKEMFENCEKWRKEYGTNTIMQDFHYDEKPLVAKYYPQYYHKTDKDGRPVYFEELGAVNLTEMEKITTQERMLKNLVWEYESVVNYRLPACSRAAGYLVETSCTVMDLKGISISSAYSVLSYVREASYISQNYYPERMGKFYLINAPFGFSTAFRLFKPFLDPVTVSKIFILGSSYQSELLKQIPAENLPSKFGGKSEVDEAAGGLYLSDIGPWRDAKYIGPEGEAPEMFSMK

SEQ ID NO: 6163 - protein, 222 aa, Pleurochrysis carterae
AMDSSHVSLVALLLRADGFDHYRCDRGMSLGINLGSMGKVLKCCNNEDIVTLKSDDNGDAMTFMFENSTQDRISDFELKLMDIDSEHLGIPDTEYNCTVRMPSGEFQRMCRDLAILGDTVTISVSKEGVKFSVTGEMGSGNMTVRQNTSVDTKEEEQVHVEMDEPVSLNFALRYLNFFTKATPLSGQVILQLSKDVPLVVEYRIGDLGHIRYYLAPKIEDEN

SEQ ID NO: 6164 - protein, 469 aa, Zea mays
MSFSLRKLLVPILVLVLFLDLCVESGFSQSKPARDDHVHHHGGGCSHSHDHDHDHDHDHHVKKTTAKVEMKLPEELAEEEDMRLCGFGPCLHDHDHESSSTLTGFALWLNALGCSLLVSLASLICLVLLPIMFVQGKPSKWFVDSLALFGAGAMLGDAFLHQLPHAFGGGHSHSNDHHENHDHHDHSHSDSPSHSHSIQDLSVGLSVLAGIVVFLLVEKLVRYVKENSSGSNTWGHHHHHHHAGSKKLKDEGDHNNLDQQSSSDAIVNSSEKVSGGSTDKSLRKRKTSASDATDKSDSGTEITSDGKSDKPEQVETRSSSLVFGYLNLFSDGVHNFTDGMALGSAFLIYGSVGGWSRTMFLLAHELPQEIGDFGILVRSGFTVTKALFFNFLSALVALAGTALVLVWGNEPGQSSLIEGFTAGGFIYIAVAGVLAEMNNSGKSTLKNSACHLISLILGMSVALCISLIE

SEQ ID NO: 6165 - protein, 219 aa, Nicotiana plumbaginifolia
MESNNVVLLDFSGSSFGMRLRIALALKGIKYEAKEENLSDKSPLLLEMNPVHKKIPILIHNGKPICESLNILEYIDEVWHEKCPLLPSDPYQRSQARFWANYIDNKIYSTGRRVWSGKGEDQEEAKKEFIEIFKTLEGELGNKTYFGGDNLGFVDVALVPFTSWFYSYETCANFSIEAECRKLVVWQNCMENERVSKSLPHPHKIYDFVLELKHKLGLA

SEQ ID NO: 6166 - protein, 171 aa, Zea mays
MAAEAAAAGKEKMRTLVSSDFKKFDVEESVARESLIILNLMADCDDSDIPVFNVNAKILDKVIAYCRKHASAPRADGGDAEPSAASNKASADDLKSFDAEFVDVDLVTLLELIKAADYLEINGLLDLTCQAVADMIKGKTPEEIRETFDIENDFTPEEEAKVRRENQWAFE

SEQ ID NO: 6167 - protein, 373 aa, Cichorium intybus
VLELGFFRTPSSSRWYLGMWYKKLSERTYVWVANRDNPLSCSIGTLKISNMNLVLLDHSNKSVWSTNHTRGNERSPVVAELLANGNFVLRDSNKNDRSGFLWQSFDYPTDTLLPEMKLGYDLRTGLNRFLTSWRSSDDPSSGDFSYKLQTRRLPEFYLFKDDFLVHRSGPWNGVGFSGMPEDQKLSYMVYNFTQNSEEVAYTFLMTNNSIYSRLTISSSGYFERLTWTPSSGMWNVFWSSPEDFQCDVYKICGAYSYCDVNTSPVCNCIQRFDPSNVQEWGLRAWSGGCRRRTRLSCSGDGFTRMKKMKLPETTMAIVDRSIGLKECEKRCLSDCNCTAFANADIRNGGTGCVIWTGQLEDIRTYFANGQDLY

SEQ ID NO: 6168 - protein, 305 aa, Miscanthus transmorrisonensis
IESVGEGVTDVAPGDHVLPVFTGECKECPHCKSAESNMCDLLRINTDRGVMIGDGKSRFSINGKPIYHFVGTSTFSEYTVMHVGCVAKINPQAPLDKVCVLSCGISTGLGASINVAKPPKGSTAAIFGLGAVGLAAAEGARIAGASRIIGADLNPSRFEEARKFGCTEFVNPKDHKKPVQEVLAEMTNGGVDRSVECTGNINAMIQAFECVHDGWGVAVLVGVPHKDAEFKTHPMNFLNERTLKGTFFGNFKPRTDLPNVVELYMKKELEVEKFITHSVPFAEINKAFDLMAKGEGIRCIIRMEN

SEQ ID NO: 6169 - protein, 521 aa, Lycopersicon esculentum x Lycopersicon peruvianum
MVLNNINSILEALQANPILIFFFIIPLFFLYLFSTSRRKRYPPGPLGWPLIGNMMIMDQLTHRGLAKLAQKYGGVFHLKMGYVHKIVISGPEEARQVLQVQDNIYSNRPKTVAISYLTYDRADMAFADYGPFWRQMRKLCVMKLFSRKRAESWDSVRDEVDSMVKIVTTNAGTSINLGELVFCLTRNIIYRAAFGTSSDEGQDDFIKILQEFSKLFGAFNMADFIPWLGWIGKQGLNVRLAKARASLDGFIDTIIDDHIERKKAIHVINDDGYRESDMVDELLAFYSEETKVNESEDLQNAIRLTRDNIKAIIMDVMFGGTETVASAIEWAMAELMKSPEDLKKVQQELANVVGLNRKVDESDFENLTYLKCCLKETLRLHPPIPLLLHETAEESTVSGYYIPANSHVIINSFAIGRDKNSWEDPDSFKPSRFLKEGVADFKGGNFEFLPFGSGRRSCPGMQLGLYALEMAVAHLLHCFTWELPDGMKPSELNMDDMFGLTAPLANRLVAVPTPRLLCEIY

SEQ ID NO: 6170 - protein, 203 aa, Zea mays
MPFNTELTRALGIRVPVVQGGMQWVGYAELASAVSNAGGLGILTALTQPTPEDLRKEIRRCRTMTNKPFGVNLTLLPAMVPPDYGAYARVIIEEKVNIVETAGNSPGPVIRQLKAAGTIILHKCTTIRHAQSAVKLGVDFLSIDGFECAGHVGETDITNFILLSRARQSLGVPFIASGGFADGQGLAAALALGACGINMGTRF

SEQ ID NO: 6171 - protein, 414 aa, Clostridium thermocellum ATCC 27405
MYNYKYYFCRGGLSMQLEEIINLDKKYFMNTFGNRTPVCFSHGKGINLWDINGKKYYDFLAGIAVNALEHSHPKLVNAIKQQAEKLIHCSNLYYIESQAKLAEKLVSISCADKVFFANSGAEANEGAIKLARIYFKKKGMPEKYEIITLEKSFHGRTLATIAATGQDKYQKPYCPLTPKFLKVPINDLEALEKAINSSTCAVMIEPIQGESGVNLTSVEYMKGVRKLCDEKGILLIFDEVQCGLGRTGKLFAYEHFGVEPDIFTLAKALGGGFPIGALCAKEHVASAFEPGDHGSTFGGNPLACTAALAALDVIIEEGLVENSAKMGTYFMSKLSELAEKYSIIQEVRGKGLMIGVQLSIDAAVEIKNKCFEKGYLIGSIGNNILRMLPPLIVTEQDIDGMIDTLDSVFQEYQI

SEQ ID NO: 6172 - protein, 174 aa, Oryza sativa
MNGNVRSLAFADGGNQLLSSGGDGHVYHWDLRTRKCIHKGTDEGSLAGISLCTSPDSSLFATGSTSGIVNVYKRDDFLGGKRKPLKTIENLTTEIGEMKFNHDAQVLAISSRKERNGMRLVHVPSLTVFQNWPGPRFSLHYPRCLDFSPGSGFLSVGHAGGKVLLYKLHHYQNA

SEQ ID NO: 6173 - protein, 187 aa, Fragaria x ananassa
MRKPCCEKTETTKGAWSIQEDQKLIDYIQKHGEGCWNSLPKAAGLRRCGKSCRLRWINYLRPDLKRGSFGEDEEDLIIRLHKLLGNRWSLIAGRLPGRTDNEVKNYWNSHLKKKILKTGTTLRPNKPHENNHAPNNKLVKLFNKMDDEVVDEVSSADSAAGCLVPELNLDLTLSIKTSTGMADPQVA

SEQ ID NO: 6174 - protein, 170 aa, Glycine max
ARVKPSKHSDAVSPAILRRRCEHAACELLEEEANLLIYCCVFKMGEIWWSLLGSAIPVVVAGQAFRLKKRRAEEQRLQSGRGRERNSDEIFVCERVCISKRMLKKLGSFSKDPIPDTCVTVCGVSDVDACADACARTVCINQHQVPNWNDICLRRCQSECLKLSSQSRSS

SEQ ID NO: 6175 - protein, 328 aa, Oryza sativa
  unsure (1)..(328): unsure at all Xaa locations
MDHLAIIATELGDSSDFEVEGIQNLTENDVSDEEIEAEDLARRMWKDRIKLRRIKERQDIALQQAVDKSKGKPISDQAMRKKMSRAQDGILKYMLKLMEVCNARGFVYGIIPDKGKPVSGASDNIRAWWKEKVKFDKNGPAAIAKYESENLASADAPSSGIKSQHSLMDLQDATLGSLLSSLMQHCDPPQRKYPLERGTPPPWWPSGNEDWWIALGLPRGQIPPYKKPHDLKKVWKVGVLTGVIKHMSPNFDKIRNHREESMPQQGEKELKSNALIRLFLRRQEQKNHQREKDHATVSPXLSRRLGSNASLHLFLSPILSVGLPSXLX

SEQ ID NO: 6176 - protein, 456 aa, Salmonella enterica subsp. enterica serovar Typhi
MESNNKLKRGLSTRHIRFMALGSAIGTGLFYGSADAIKMAGPSVLLAYIIGGVAAYIIMRALGEMSVHNPAASSFSRYAQENLGPLAGYITGWTYCFEILIVAIADVTAFGIYMGVWFPAVPHWIWVLSVVLIICAINLMSVKMFGELEFWFSFFKVATIIIMIVAGIGIIVWGIGNGGQPTGIHNLWSNGGFFSNGWLGMIMSLQMVMFAYGGIEIIGITAGEAKDPEKSIPRAINSVPMRILVFYVGTLFVIMSIYPWNQVGTNGSPFVLTFQHMGITFAASILNFVVLTASLSAINSDVFGVGRMLHGMAEQGSAPKVFAKTSRRGIPWVTVLVMTIALLFAVYLNYIMPENVFLVIASLVTFATVWVWIMILLSQIAFRRRLPPEEVKALKFKVPGGVVTTIAGLIFLVFIIALIGYHPNTRISLYVGFAWIVLLLIGWIFKRRRDRQLAQA

SEQ ID NO: 6177 - protein, 722 aa, Oryza sativa
MAAMRVSPLAVTRQPYMITVNENTPRDEGLWTASENGSSLLAQAVVAKRSTGGGDLAQGGVAAAEIRRVHDDEQGVIVLFALLDKTGILPIDHGIIYALLLGGLVLDVDAILMLLSSNQMIFFFDRKPKLAWLAPQLVSMGVVEAEALHGAVEALAGSLQPHVATAFFVFSACTVALAALLAVVRLRPPWWCDCTVCEAFLTASWAGEFDNLCDWYAHLLRTSPAQTVHVHVLRNVLTANPVTVDHVLRARFDNYPKGAPFSAILADFLGRGIFNVDGDAWLFQRKLAAAELASPALRAFAARVVASELRCRLIPLLHSASREGNGKVLDLQDMFRRFAFDSICKISFGLDPGCLELSMPVSTLVEAFDTASTLSARRATVPMQIIWRLKRFLNVGDERKLRDAVRLVDALAAEVIRQRRKLGGAATGSDLLSRFMGSIDDDKYLRDIVVSFMLAGRDTIASALTAFFLLLSDHPEVATAIRDEVARVTGDGNRTMAATFDKLKDMHYVHAAMYESMRLFPPVQFDSKFAAGDDTLPDGTVVAKGTRVTYHAYAMGRMESVWGPDCAEFRPERWLRDGRFVPESPYRYPVFQAGVRVCIGKELALMEMKAVIVAVVRSFDIEAIARSSRRPKFAPGLTATFAGGLPPTTQRRRARARWCSPPTSPTPRRRTTRAQRWSRFSSRRCPGRRRSSAPAGRVSRSTGTATPSGRTCATQRQGGGPP

SEQ ID NO: 6178 - protein, 327 aa, Streptomyces avermitilis MA-4680
MEQRHLGRTGLRVSRIGLGTLTWGRDTDEHDAAELLKVFWEAGGTLVDTADVYGDGEAEYVLGQLIEGLVPRRDLVISTKAGSVADPDRRFDGSRGHLLSALDASLARLGTDYVDLWQVHAFDPHTPLEETLQALDLAVSTGRARYAGVSNFCGWQLAKAATWQLSAPGPRTRIASTQMEYSLLQRGVEREVLPAALDLGVGLLPSSPLGRGVLTGKYRGGTPAGSRGASEHLAPFVAPYLDDTASGIVDAVQTAADGLAVTPLQVALAWVRDRPGVAAPIVGARNAQQLTAALSVETLSLPDEICRALDDVSAPVHHYPDQDWSTL

SEQ ID NO: 6179 - protein, 512 aa, Pseudomonas aeruginosa UCBPP-PA14
MEPAVPVRRREQRLCRGHRGQLVGGLRPHRRPRRRFRHARGDRRRLRLLRRPRGCRRRHRARPRRRGAVADRSQADPLLRTLRGRRTDLPRSRRSKALPGNPRLPQAVPRTHLPRRPALRQRPGRHRRRGRGAHRGCRAAREERSQAGAGRPAARRLRVLSLSRPKTRTRRTIMARKISYQQAINEALAQEMRRDPSVFIMGEDNAGGAGAPGEDDAWGGVLGVTKGLYHQFPGRVLDTPLSEIGYVGAAVGAATRGMRPVCELMFVDFAGCCLDQILNQAAKFRYMFGGKAVTPLVIRTMVGAGLRAAAQHSQMLTSLWTHIPGLKVVCPSSPYDAKGLLVQAIRDNDPVIFCEHKLLYSMQGEVPEELYSVPFGEANFLRDGDDVTLVTYGRMVHLALDAAASLARQGISCEVLDLRSTSPLDEDSILESVEKTGRLVVVDEANPRCSMATDIAALVAERAFSALHAPIRRVTAPHTPVPFSDALEDLYIPDAAKIEAAVRQALEGRDAA

SEQ ID NO: 6180 - protein, 113 aa, Glycine max
  unsure (1)..(113): unsure at all Xaa locations
TSDATRADLGILVSYLSIARILDQICRDIQYGSKFLNDREPVTVHIGVKTRSSVRGVCRLFTIDNDRHAXIITQPMGTMLPSILLGKCLNGRLCTFLFLDQLVWLGGTGVYHN

SEQ ID NO: 6181 - protein, 715 aa, Clostridium stercorarium
MENKPVYLDPSYSFEERAKDLVSRMTIEEKVSQMLYNSPAIERLGIPAYNWWNEALHGVARAGTATMFPQAIGMAATFDEELIYKVADVISTEGRAKYHASSKKGDRGIYKGLTFWSPNINIFRDPRWGRGQETYGEDPYLTARLGVAFVKGLQGNHPKYLKAGGMCKNILPFTVVPESLRHEFNAVVSKKDLYETYLPAFKALVQEAKVESVMGAYNRTNGEPCCGSKTLLSDILRGEWGFKGHVVSDCWAIRDFHMHHHVTATAPESAALAVRNGCDLNCGNMFGNLLIALKEGLITEEEIDRAVTRLMITRMKLGMFDPEDQVPYASISSFVDCKEHRELALDVAKKSIVLLKNDGLLPLDRKKIRSIAVIGPNADSRQALIGNYEGTASEYVTVLDGIREMAGDDVRIYYSVGCHLYKDRVENLGEPGDRIAEAVTCAEHADVVIMCLGLDSTIEGEEMHESNIYGSGDKPDLNLPGQQQELLEAVYATGKPIVLVLLTGSALAVTWADEHIPAILNAWYPGALGGRAIASVLFGETNPSGKLPVTFYRTTEELPDFTDYSMENRTYRFMKNEALYPFGFGLSYTTFDYSDLKLSKDTIRAGEGFNVSVKVTNTGKMAGEEVVQVYIKDLEASWRVPNWQLSGMKRVRLESGETAEITFEIRPEQLAVVTDEGKSVIEPGEFEIYVGGSQPDARSVRLMGKAPLKAVLRVQ

SEQ ID NO: 6182 - protein, 924 aa, Medicago truncatula
MELQVIRIFRLVVAFVLCLCIFIRSASSATKGFESIACCADSNYTDPKTTLTYTTDHIWFSDKRSCRQIPEILFSHRSNKNVRKFEIYEGKRCYNLPTVKDQVYLIRGIFPFDSLNSSFYVSIGVTELGELRSSRLEDLEIEGVFRATKDYIDFCLLKEDVNPFISQIELRPLPEEYLHGFGTSVLKLISRNNLGDTNDDIRFPDDQNDRIWKRKETSTPTSALPLSFNVSNVDLKDSVTPPLQVLQTALTHPERLEFVHDGLETDDYEYSVFLHFLELNGTVRAGQRVFDIYLNNEIKKEKFDVLAGGSKNSYTALNISANGSLNITLVKASGSEFGPLLNAYEILQARSWIEETNQKDLEVIQKMREELLLHNQENEALESWSGDPCMIFPWKGITCDDSTGSSIITKLDLSSNNLKGAIPSIVTKMTNLQILNLSHNQFDMLFPSFPPSSLLISLDLSYNDLSGWLPESIISLPHLKSLYFGCNPSMSDEDTTKLNSSLINTDYGRCKAKKPKFGQVFVIGAITSGSLLITLAVGILFFCRYRHKSITLEGFGKTYPMATNIIFSLPSKDDFFIKSVSVKPFTLEYIEQATEQYKTLIGEGGFGSVYRGTLDDGQEVAVKVRSSTSTQGTREFDNELNLLSAIQHENLVPLLGYCNEYDQQILVYPFMSNGSLLDRLYGEASKRKILDWPTRLSIALGAARGLAYLHTFPGRSVIHRDVKSSNILLDQSMCAKVADFGFSKYAPQEGDSYVSLEVRGTAGYLDPEYYKTQQLSEKSDVFSFGVVLLEIVSGREPLNIKRPRIEWSLVEWAKPYIRASKVDEIVDPGIKGGYHAEALWRVVEVALQCLEPYSTYRPCMVDIVRELEDALIIENNASEYMKSIDSLGGSNRYSIVMDKRALPSTTSTAESTITTQTLSHPQPR

SEQ ID NO: 6183 - protein, 374 aa, Euonymus europaeus
ALSIAGAVQSQKLAVRAISQLQSLPGGDIKLLCDTVVESVRDLTGYDRVMVYKFHDDEHGEVVAESKRPDLEPYFGLHYPATDIPQASRFLFKQNRVRMIVDCHASPVCVIQDYRLIQPLCLVGSTLRAPQGGHAQYMENMGSKASLAMPVIINGNDEEVIGGRNATRLWGLVVCHHTSARCTPFPLRYACEFLLQAFGLQLNMELQLAAQLSEKHVLKTQTLLCDMLLRDSPTGIVTKSPSIMDLVKCDGAALYYQGKYYPLGVTPAQAQMKDIVEWLLAFHGDSTGLSTDSLADAGYPGAALLGDAVCGMAVAYITKRDFLFWFRSHTAKEIKWGGAKHHPEDKDDGQRMHPRSSFKAFLEVVKSKSLPWEN

SEQ ID NO: 6184 - protein, 421 aa, Escherichia coli O157:H7 EDL933
MSNNEFHQRRLSATPRGVGVMCNFFAQSAENATLKDVEGNEYIDFAAGIAVLNTGHRHPDLVAAVEQQLQQFTHTAYQIVPYESYVTLAEKINALAPVSGQAKTAFFTTGAEAVENAVKIARAHTGRPGVIAFSGGFHGRTYMTMALTGKVAPYKIGFGPFPGSVYHVPYPSDLHGISTQDSLDAIERLFKSDIEAKQVAAIIFEPVQGEGGFNVAPKELVAAIRRLCDEHGIVMIADEVQSGFARTGKLFAMDHYADKPDLMTMAKSLAGGMPLSGVVGNANIMDAPAPGGLGGTYAGNPLAVAAAHAVLNIIDKESLCERAMQLGQRLTKTLIDAKENVPAIAAVRGLGSMIAAEFNDPQTGEPSAAIAQKIQQRALAQGLLLLTCGAYGNVIRFLYPLTIPDAQFDAAMKILQDALRD

SEQ ID NO: 6185 - protein, 648 aa, Candida albicans
MSNPEKLQSLQMISIDNANTGRRSTLSSTISSFDADRSLYNSTTSSTGSTSSSPYPRSYHPRDLLNSFIDSFKEFDYSTLPPVYNNITDQESQLQLNPANPNFDYSHFTQLERDALITASSPLSKRLKTRHLTWISLGASIGSGLLISSGSSLAHAGPLGLLIVWIFVGSVIFATMSSLAELATAFPVSGSFTTYVTLFVDKSISFAIAWNYALQWLVTFPLQLVAASLAIEYWTIKIHPAIFVTIFYVCIVFINLFGVYGYAEIEMVVSIIKVIAVIGFNILAIIIVTGGVPGQPYIGAKNWQGPQGGLFNTIEPFKQMCHIVSNVAFAYGGVELFGLAAVETASPKKSINRARKQIFYRLMVFYILSIVMIGFAVSYKTPELQDSGAFGTDINASPFVIAIKQAKIKALPSIMNGAVILTVLSVGNASVYASTRVLCAIGALQQGPKFLSFIDRSGRPMGCLIVQFVFGLLAYLICIPGKNVPAQIFDWLLSLSGLSALFTYISMNVCQLRFNCALKHRARIPKDELLYVSPLWCSWYGIFAIIAILALQFWAALFPPGAGKADVESFFKIYLGGPILFLCWLGHKLYSYWYLNVPLTKFWLTVDEIDIDTGRRQIDLETIKQEIAEEKIVMESKPWWYRLYKTFC

SEQ ID NO: 6186 - protein, 245 aa, Tontelea attenuata
ALSIAGAVQSQKLAVRAISQIQTLPGGDIKLLCDTVVESVRDLTGYDRVMVYKFHEDEHGEVVAESKRPDLEPYIGLHYPATDIPQASRFLFKQNRMRMIVDCHASPVRVIQDDGLMQPLCLVGSTLRAPHGCHAQYMENMGSIASLAMAVIINGNDEEVIGGRNPTRLWGLVVCHHTSARCIPFPLRYACEFLMQAFGLQLKMELQLAAQLLEKHVLKTQTLLCDMLLRDSPTGIVTQSPSIMD

SEQ ID NO: 6187 - protein, 475 aa, Escherichia coli K12
MSIRLEGYMQTTQQNAPLKRTMKTRHLIMLSLGGVIGTGLFFNTGYIISTTGAAGTLLAYLIGALVVWLVMQCLGELSVAMPETGAFHVYAARYLGPATGYTVAWLYWLTWTVALGSSFTAAGFCMQYWFPQVPVWVWCVVFCAIIFGLNVISTRFFAEGEFWFSLVKVVTIIAFIILGGAAIFGFIPMQDGSPAPGLSNITAEGWFPHGGLPILMTMVAVNFAFSGTELIGIAAGETENPRKVIPVAIRTTIARLIIFFIGTVFVLAALIPMQQVGVEKSPFVLVFEKVGIPYAADIFNFVILTAILSAANSGLYASGRMLWSLSNERTLPACFARVTKNGVPLTALSVSMLGGVLALFSSVVAPDTVFVALSAISGFAVVAVWLSICASHFVFRRRHLQQGKALSELHYRAPWYPLVPVLGFVLCLVACVGLAFDPAQRIALWCGLPFVALCYGAYFLTQPRNAKQEPEHVAE

SEQ ID NO: 6188 - protein, 648 aa, Magnetospirillum magnetotacticum
RLMALSLHGEAEALVEHSSRHAQFLSKLAGADDFVDAMSEPPLVATDMFANCTGAAIVYLNERREIATRLIGQTPPPDDVLRLMEWLRAYSAGSVVSTDCISSIFPAFASHAKEASGVLATFIGDNRDQALLWFRPEVIREINWGGRPEKTMDSTGTTYLPRRSFERWVEQKHGHSARWLSWEIQVAGALATAMTKVILRQNRRIKTLNGEVERFLWVTSHHLRESPRRILIGCQQIRRHLRDHLDGGGEVILEQMRDTAEGMDLRLKGLLAYSEFGHSQIAPRPLQLADALAPVLAQMDEEIRSVGAVVRVLGDLPEVLGDQRGIQFVFQSLIDNALQFRSPDRGAEVNIWAERCEDVWTISVGDNGIGIEPEYHERVFNLFETLRPAEQSRGIGLGLSLCHRIIEQLGGRISLTSIADRGTTVQFALPAAAKAEHQAAPERNLRGVDTLALLRHATRDLHAEIERHPLMLPLSEGRVTPQQYRNALAVIYGFYRPSEELLYAKFPHLAETMGIRPKLPALVHDLVALGFSDMEVAALPLSPAIPTVESWGEGLGMVYVLEGATLGGQVVMRRISHCLGVLSGLATSFHNFHGDGAGPHWRQFQTRMAEQLDANPAAQQKAAECAVTTFESLGNWFTTAERTWATSN

SEQ ID NO: 6189 - protein, 339 aa, Glycine max
  unsure (1)..(339): unsure at all Xaa locations
MDRGDQMTLPGSASYYMQRGIPGAGNQPVLHNSPNIGPLSNPNLPCQSSIGGGGTIGSTLPLESSGISAPCVNVSAPSGAVPGETVKRKRGRPRKYGPDGAVSLALTPTPASHPGALAQGKRGRGRPPGSGKXQQLASLGELMSGSAGMGFTPHIITIAVGEDIATKIMAFSQQGPRAICILSANGAVSTVTLRQPSTSGGTVTYEGRFEIVCLSGSYLVADSGGSRNRTGGLSVSLASPDGRVVGGGVGGVLIAASPVQVILGSFSWGASKTKIKKKEGSEGAEVALETDHQTVHNPVAVNSISPNQNLTPTSSLSPWPASRSLDMRNSHIDIDLMRG

SEQ ID NO: 6190 - protein, 121 aa, Triticum aestivum
MVSLKIQKRLAASVMKCGKGKVWLDPNESSDISMANSRQNIRKLVKDGFIIRKPTKIHSRSRARRMKIAKMKGRHSGYGKRKGTREARLPTKVLWMRRMRVLRRLLKKYRESKKIDKHMYH

SEQ ID NO: 6191 - protein, 444 aa, Brassica oleracea var. acephala
MRGVIPNYHHSYTLLFFVILVLFPHVFSTNTLSPNEALTISSNKTLVSPGDVFELGFFKTTTRNSPDGTDRWYLGIWYKTTSGHRTYVWVANRDNALHNSMGTLKISHASLVLLDHSNTPVWSTNFTGVAHLPVTAELLANGNFVLRDSKTNDLDRFMWQSFDYPVDTLLPEMKLGRNRNGSGNEKILTSWKSPTDPSSGDYSFILETEGFLHEFYLLNNEFKVYRTGPWNGVRFNGIPKMQNWSYIDNSFIDNNKEVAYSFQVNNNHNIHTRFRMSSTGYLQVITWTKTVPQRNMFWSFPEDTCDLYKVCGPYAYCDMHTSPTCNCIKGFVPKNAGRWDLRDMSGGCVRSSKLSCGEGDGFLRMSQMKLPETSEAVVDKRIGLKECREKCVRDCNCTGYANMDIMNGGSGCVMWTGELDDMRKYNAGGQDLYVKVAAASLVPS

SEQ ID NO: 6192 - protein, 256 aa, Ceratopteris richardii
MPFIPATMKHHAALDSTDIKGKSKNSCKDLKSRALKRSRQDVVVDSDTEEKRRGLTMEQINILEMKFKEDVELEPERKTLIAKQLGLRPRQVAIWFQNRRARWKNKQVECKYELLKAQYDAVVKEKESITMEHESILEGNRRLHSESIEKANTLGGAISPALPSCNIMSPTDSADCQSEIIMSVDVIEGAISCCHPIQEPSSRMAADVVVETEYSFYSSLDNSFSQFPMLVRQLIANGHCLQDAYDIYLGCEYFYG

SEQ ID NO: 6193 - protein, 480 aa, Zea mays
MALQTLNPYRHAAAVSPVPSPVPHRGHPPPHAVLHLPPRRRLAGGAARPLAVAAAVSGAVNEARRRGVPQEGGEDGRKDTDLATLGNLCVDVVLSVPQLPPAQQEERKAYMERLAASPPDQKFWEAGGNCNLAFAAARLGLNCSTLGHVGEEIYGKFLLDVLQAEGISVVGMLENTNAAACRQAYETLLCWVLVDPFQKHGFCSRADFSKEPAFSWIRKLPADIRTAIHHSKILFCNGYAFDEFFPDVIASSIDCAICSGTAVFFDPGPRGKSLLHGTLGEQRALEHALRLSDVLLLTSDEAESLTNIRNPVQAGQELLKRGIRTKQVVIKMGSRGSIMITKNTISCAPAFKIDVVDTVGCGDSFTAAIAFGFLHDLPAVNTLTLANAVGAATATGCGAGRNVARLDKVLQLVREADLNEDVTLWTELTEGNSLRIEVSILSGMARNGFSENIVAVPVTKVVSELLPMFEAVPVRSAVQA

SEQ ID NO: 6194 - protein, 373 aa, Oryza sativa
  unsure (1)..(373): unsure at all Xaa locations
MEALWKQASRLKEQVSRQLQGVFKPFGAAYGNSENAFTDESEVNLHQRLEKLYLSTRAAKHFQRDIVRGVEGYIVTGSKQVDIGNKLSDDSQKYGTGNTCTSDNTLSKAAMYYGKARSLMEKERGNMLRAFGTQVAEPLRAMVMGAPLEDARHLAQRYDRMRQEAEAQAVEVSRRQNRVRESAPNGDVITKLEAAEYKLEELKSSMVGLGKEAVAAMAAVEAQQQRLTLQRLIAMVEAERAYHQRVLEILDHLEQEVYGIRLQKIEAPPTPSAENYMAQPPPSYDEVNXGMFASSSVDDSVTSVDFFLGEALDSFKAESESELNLSAGDIVIVRKISTNGWAEGECKGKAGWFPHGYIERRERVLASKVPHIF

SEQ ID NO: 6195 - protein, 433 aa, Oceanobacillus iheyensis HTE831
MVRKQGNMKWWQLSLVGIGCTIGTGYFLGSSIAIEQSGAAVLWLFLFAAIGTYFVYESLAKLSIEYPDKGSFRTYAKKAFGDWAGFSNGWVYCLSELLIMGSQLIALGIFTRFWFPNLPLWLCMVIFAVLGLAIILTGLAGFEKMENIFGIMKASAIIMFILVAVLLLVKGTESLINPIPHIFSGDLPSIWWGGFIYAFYAFGGIEIMGLVATDLKNKQEALKAGRWMLLGLGSIYIIALGLALAFIDETKIIADESPFITALQPFDIPLIADVFNGVFIIAGFSTMVASLYAIITILVSLSEDHHAPAFLSKKGRLKIPFPAFVCLIVGLFVSIFIALLLPDRIFEYITTAAGLMLLYNWLFILASFMKLQRPTRWNFMKPIIAGVLIIIAVATTLFAEISRIGFFVSIGFIIMIAIAVLMMKEKWHITSSS

SEQ ID NO: 6196 - protein, 330 aa, Thermus thermophilus
MVPAPEAIRQALQERLLARLDHPDPLYRDLLQDYPRRGGKMLRGLLTVYSALAHGAPLEAGLEAATALELFQNWVLVHDDIEDGSEERRGRPALHRLHPMPLALNAGDAMHAEMWGLLAEGLARGLFPPEVLLEFHEVVRRTAYGQHLDLLWTLGGTFDLRPEDYFRMVAHKAAYYTAVAPLRLGALLAGKTPPAAYEEGGLRLGTAFQIVDDVLNLEGGEAYGKERAGDLYEGKRTLILLRFLEEAPPEERARALALLALPREAKPEAEVGWLLERLLASRALAWAKAEAKRLQAEGLALLEAAFQDLPGKEALDHLRGLLAALVERRA

SEQ ID NO: 6197 - protein, 427 aa, Salmonella typhimurium LT2
MNTNNALMQRRHNAVPRGVGQIHPIFAERAENCRVWDVEGREYLDFAGGIAVLNTGHLHPGIVSAVEAQLKKLSHTCFQVLAYEPYLALCERMNQKVPGDFAKKTLLVTTGSEAVENAVKIARAATKRSGAIAFSGAYHGRTHYTLSLTGKVHPYSAGMGLMPGHVYRALYPCPLHNISDDDAIASIERIFKNDAAPEDIAAIIIEPVQGEGGFYAASPAFMQRLRALCDQHGIMLIADEVQSGAGRTGTLFAMEQMGVAADITTFAKSIAGGFPLAGVTGRADVMDAIAPGGLGGTYAGNPIACAAALAVLDIFEQENLLQKANTLGKTLRDGLMEIAETHREIGDVRGLGAMIAIELFENGDPGKPNAALTADIVTRAREKGLILLSCGPYYNILRILVPLTIEASQIRQGLEIIAQCFDEAKQA

SEQ ID NO: 6198 - protein, 305 aa, Miscanthus sinensis f. glaber
IESVGEGVTDVAPGDHVLPVFTGECKECPHCKSAESNMCDLLRINTDRGVMIGDGKSLFSINGKPIYHFVGTSTFSEYTVMHVGCVAKINPQAPLDKVCVLSCGISTGLGASINVAKPPKGSTVAIFGLGAVGLAAAEGARIAGASRIIGVDLNPSRFEEARKFGCTEFVNPKDHKKPVQEVLAEMTNGGVDRSVECTGNISAMIQAFECVHDGWGVAVLVGVPHKDAELKTHPMNFLNERTLKGTFFGDFKPRTDLPNVVELYMKKELEVEKFITHSVPFAEINKAFDLMAKGEGIRCIIRMEN

SEQ ID NO: 6199 - protein, 368 aa, Triticum aestivum; identical to SEQ ID NO: 5552

SEQ ID NO: 6200 - protein, 580 aa, Zea mays; identical to SEQ ID NO: 1273

SEQ ID NO: 6201 - protein, 549 aa, Oryza sativa (japonica cultivar-group)
MALYLLFESASGYALFHAHGVDEIGQGVDAARASVLELQRFSKAVKLAGFSPFSSAVDALNQCNAISEGIMTDELRSFLELNLPKVKEGKKAKYSVGVMEPKVGSHISEATGIPCQCNEFVQELLRGVRLHFDHFIDQLKVVDFTFALVSTPTDLEKAQLGLGHSYSRAKVKFNVNRVDNMVIQAIFLLDTLDKDINSFSMRVREWYSWHFPELVKIVNDNYVYSKIAKFVVNKSDLAEKDIPALADIIGDEDKAKEIVEAAKASMGQDLSPVDLINVQQFAQRVMNLSEYRKNLYELGARLISHAGSLSNLAKCAASTLQILGAEKALFRALKTRGNTPKYGLIFHSSFIGRASTRNKGRIARYLANKCSIASRIDCYSELNTSVFGQKLREQVEERLDFYDKGIAPRKNLDVMKAAINDMTNAVSEDGGEKEKNDTSAKKNKKKKSKAEADGEEMDLDKPAKVAAEETDPENENKKKKKHKLEEPQDQEMAVNGNLEQDETPKKKKKKKPEASEDVEPRTATEGKKRKKKKSKTLLIMSHDQLKCQG

SEQ ID NO: 6202 - protein, 141 aa, Brassica oleracea
LPEKLYKNLSHSTRMLRYTVPLPMLAYPLYLWYRSPGKEGSHYNPYSSLFAPSERKLIATSTTCWSIVLATLVYLSFLVGPVTVLKVYGVPYIIFVMWLDAVTYLHHHGHDDKLPWYRGKEWSYLRGGLTTVDRDYGIFNN

SEQ ID NO: 6203 - protein, 622 aa, Neurospora crassa
MPPLYSHNLEPGRDSLELASLASSDPGPDTGDDTSSRPSISSSRKLSLEREDPLDNGNYAASGHRVRPERSTSVNSTFSFAANLFPLSSTTGGGYAPLGAPTATRGHVNGGLGGGSLEKHKTLTYLNGLSLIVGLIIGSGIFSSPSQVNANAGSPGAAIIVWVVAGILAWTGAASYAELGGAIPLNGGPQVYLSKIFGELAGFLFTWVAVLVLKPGSAAIISIIMGEYLVRTFIGAEAETINPWISKSVALVGLFLVTFLNSVSTKLGTRMNDMLMFLKFVALLGVTIVGIVVAATGFSFSGAANLDWKKHDWFEGTKMDASAFAVALYAGLWAFDGWDNTNYVVGEFRNPGRDLPRVIHTAMPLVILSYILANVAYFFVLPLDTINSTNTVAVIFGSKVFGPVGALILALIVSASCFGALNASTFTSSRLVYVAGKEGYIPELFGRIGSGTAVDQHESLTTMRTRSWFTKKLVRIVADEDTGLFYTPIPALMLNCALTTAYVCVGEFGTLVTFYGVAGYTFYFLTVLGLIVLRVKEPNLERPYKTWITTPIIFCCVSLFLLSRAVFAQPLQTLLVVAFVVVGVPVYYWRRYVNGRSAVKREAGGMREVREERPWWKFWQIR

SEQ ID NO: 6204 - protein, 247 aa, Pseudomonas aeruginosa PAO1
MSLQGKVALVTGASRGIGQAIALELGRLGAVVIGTATSASGAEKIAETLKANGVEGAGLVLDVSSDESVAATLEHIQQHLGQPLIVVNNAGITRDNLLVRMKDDEWFDVVNTNLNSLYRLSKAVLRGMTKARWGRIINIGSVVGAMGNAGQTNYAAAKAGLEGFTRALAREVGSRAITVNAVAPGFIDTDMTRELPEAQREALLGQIPLGRLGQAEEIAKVVGFLASDGAAYVTGATVPVNGGMYMS

SEQ ID NO: 6205 - protein, 407 aa, Zea mays
MAAALQATPLKTLSISRRRVGGAGARPRPMAASFRCSAAARSYNITLLPGDGIGPEVVAVAKDVLSLAGALEGVELRFQEKLVGGSALDATGVPLPDETLDAAKGSDAVLLGAIGGYKWDNNEKHLKPETGLLQLRAGLGVFANLRPAAVLPQLVDASTLKKEVAEGVDIMVVRELTGGIYFGKPRGFGTNDNGDDIGFNTEVYSASEIDRIARVAFEVARKRRGRLCSVDKANVLEASMLWRKRVTALASEFPDIELSHMYVDNAAMQLVRNPKQFDTIVTNNIFGDILSDEASMITGSIGMLPSASVGESGPGLFEPIHGSAPDIAGQDKANPLATILSAAMLLRYGLGEENAANRIEAAVTETLNHGFRTGDIYSPGTTLVGCKRMGEEVLKTVNSLKEVAAVN

SEQ ID NO: 6206 - protein, 194 aa, Oryza sativa
MAAPDVEYRCFVGGLAWATDDRSLEAAFSTYGEILESKIINDRETGRSRGFGFVTFSSEQAMRDAIEGMNGKELDGRNITVNEAQSRRSGGGGGGGYGQRGGGGGYGGGGYGGGGGGGGYGQRREAATAVAVATVAAVVAAATVVATAAAAAATPTGTGGTERWGPHGQVIYLSNRATIIIIRSLSSLVLCGTI

SEQ ID NO: 6207 - protein, 302 aa, Desulfitobacterium hafniense
MIKTKLCDLIGIEYPIFQGGMAWTATGELAAAVSEAGGLGIIGAGQAPADWLRQEIHKIKKVTNKPYGVNVMLMSPFVEDVMQVIVEERVPVITTGAGNPGKYIPMLKEVGTKIIPVVASVALARRLEKAGVDALIAEGMESGGHIGEISTLPLVPQVVDAVSIPVIAAGGIYDGRGMVAALALGAEGVQMGTRFMCAEECTISSKVKEMILKAKDRDTVVTGRSTGHPVRCLGNKLTREFEQLEKEGTDPEVLEKMGAGKLRLAMVEGDTQIWLRDVRANRRSGPEDRTGGGYHSGRDARG

SEQ ID NO: 6208 - protein, 553 aa, Hordeum vulgare
MYRVKSESDCEMMHQEDQMDSPVGDDGSSGGGSPHRGGGPPLKKGPWTSAEDAILVDYVKKHGEGNWNAVQKNTGLFRCGKSCRLRWANHLRPNLKKGAFTPEEERLIIQLHSKMGNKWARMAAHLPGRTDNEIKNYWNTRIKRCQRAGLPIYPASVCNQSSNEDQQGSSDFNCGENLSSDLLNGNGLYLPDFTCDNFIANSEALSYAPQLSAVSISSLLGQSFASKNCGFMDQVNQAGMLKQSDPLLPGLSDTINGALSSVDQFSNDSEKLKQALGFDYLHEANSSSKIIAPFGGALTGSHAFLNGTFSTSRTINGPLKMELPSLQDTESDPNSWLKYTVAPAMQPTELVDPYLQSPTATPSVKSECASPRNSGLLEELLHEAQGLRSGKNQQLSVRSSSSSVSTPCDTTVVSPEFDLCQEYWEERLNEYAPFSGNSLTGSTAPMSAASPDVFQLSKISPAQSPSLGSGEQAMEPAYEPGAGDTSSHPENLRPDAFFSGNTADSSVFNNAIAMLLGNDMNTECKPVFGDGIMFDTSVWSNLPHACQMSEEFK

SEQ ID NO: 6209 - protein, 167 aa, Oryza sativa
  unsure (1)..(167): unsure at all Xaa locations
MAAPDVEYRCFVGGLAWATDDRSLEAAFSTFGEILESKIINDREXTGRSRGFGFVTFSSEQAMRDAIEGMNGKELDGRNITVNEAQSRRSGGGGGGGYGQRGGGGGYGGGGGYGGGGGGGGYGQRREGGYGGGGGYGGGRGGGGYGGGYGGGYGXRGGGNSDGNWRN

SEQ ID NO: 6210 - protein, 437 aa, Lactococcus lactis subsp. lactis
MKENKLLSPAAIFLLGVNSIIGSGIFLLSGKIYEDAGIWSLLAILCAGLSIFVIAFAYANMSKIYSKNGGAFVYAKETFGRFPGFIVGMVTWLLGTVTLATEVSVLLTAMKMILPNLNSRLIGIIIILALGIISYFGSSIIAGLDNLTSFVKIVLVLVFIFTCLWLVRGLNFSSPNLLTASSANLGGFKGFLSAYGTVFFFFTGFSFLPVNAEKMKNPAKNLPKMMSLVMLTCLAVYLIIQTITIGALGPELTKTLVPAATAFSKIVGSIGIPLFVVGICFSIFGVIVATTFNTPTILASLAQAHEDVPMFVSKNNRFGTPTWAIILTTVCGIALFLSGNYVFLSGLTVFMSFVQYLSTGLANIKKKFLLIGIGSVLFSLVLLTSFTLSVLILGLGILILLVMIYFVVKLDDDEREKWLKEHQEKSKGADVNTVKRL

SEQ ID NO: 6211 - protein, 336 aa, Mycobacterium tuberculosis H37Rv
MKLAIIAGDGIGPEVTAEAVKVLDAVVPGVQKTSYDLGARRFHATGEVLPDSVVAELRNHDAILLGAIGDPSVPSGVLERGLLLRLRFELDHHINLRPARLYPGVASPLSGNPGIDFVVVREGTEGPYTGNGGAIRVGTPNEVATEVSVNTAFGVRRVVADAFERARRRRKHLTLVHKTNVLTFAGGLWLRTVDEVGECYPDVEVAYQHVDAATIHMITDPGRFDVIVTDNLFGDIITDLAAAVCGGIGLAASGNIDATRANPSMFEPVHGSAPDIAGQGIADPTAAIMSVALLLSHLGEHDAAARVDRAVEAHLATRGSERLATSDVGERIAAAL

SEQ ID NO: 6212 - protein, 171 aa, Putterlickia verrucosa
MAGQFAKPRSDSFEEKDGVKLPSYRGDNVNGDAFDVESRVPDPQRMMRAYTQSVATLNLLRAFATGGYAAMQRVSQWNLDFAKNSEQGDRYRELGHRVDEALGFMSAAGLGVGHPIMTTTEFWTSHECLLLPYEQALTREDSTSGLYYDCSAHMLWVGERTRQLDGAHVEF

SEQ ID NO: 6213 - protein, 220 aa, Magnetospirillum magnetotacticum
EGEYSNAGGRMFPGTEREFAVQESVFTRHGVDRVLTFAFDLARSRPKRHLTSATKSNGISITMPFWDERVRAVAESYPDVRWDQYHIDILTAHFVLNPDRFDVVVASNLFGDILSDLGPACTGTIGIAPSGNINPERRYPSVFEPVHGSAPDIAGQGVANPIGQIWSGAMMLEHLGEREAAAEIVAGIERVLTEKALRTRDLGGTADTQTCGRAVEQALG

SEQ ID NO: 6214 - protein, 333 aa, Zea mays
MARKCSSCGNNGHNSRTCSGHGAGGGGVRLFGVQLHVGSSPVAMKKCFSMECLSSSASAAPAYYAAALAATNSASPSASSSSSLVSVEEAPEKMAHGYLSDGLMGRAAQERKKGVPWTEDEHRRFLAGLEKLGKGDWRGISRHFVTTRTPTQVASHAQKYFLRQSSLTHKKRRSSLFDVVENAERAATSSIKGMERLRLKDAITTATATGSAEPGTGTTAQLPPALSLGVGRPPARPDHAALPPSSLLSLQLPRCSAGIGRTAPSLALAPPKHSHPSSSLTAAKAGGLAPDLELKISTARQSEHQQQVQMGPSLPPPPPPPQRTPFLGTIRVT

SEQ ID NO: 6215 - protein, 90 aa, Zea mays
VRAFFDVHDQEGSHPGGIHLEMTGQNVTECIGGSRTVTFDDLSDRYHTHCDPRLNASQSLELAFIIAERLRKRRMRSGLNNSLPLPPLAF

SEQ ID NO: 6216 - protein, 351 aa, Leuconostoc mesenteroides subsp. mesenteroides ATCC 8293
MQKQSSSGGKFDIIVCRGKKDMAILVLGGAGYIGSHMVKRLIEADRDVVVVDALFTGHREAVNPKAKFYQVDIRDKTALSEVFDKENIEQVVHFAAFSIVPESVANPLKYFDNNTSGMITLLEVMKEHDVKQIVFSSTAATYGNPVNIPIKETDPQRPINPYGESKLMMEKIMAWSDQADGVKWVALRYFNVAGAAEDGTIGEDHAPETHLVPIILQAGLGQREYIEMFGDDYNTPDGFNVRDYVHVLDLADAHILALKYLADGNDSNQFNLGSATGFSVKEMVEAARSATGVDIPAKIGPRRAGDPDILIANSDKARDVLGWAPKYDNVQDIIKTAWNWHKNHPSGYNDK

SEQ ID NO: 6217 - protein, 474 aa, Bacillus anthracis str. Ames
MSQVNNTNNELKRTMKSRHLFMIALGGVIGTELFNGSGFIISQAGPGGSVLAFMAGGLLMYFVMLCLGELAVAMPVSGSFQEYATKFINPATGFTIGWLYWLSWANTTGLEFTTAGITMQRWFPDIPVWVWCLIFGVTIFMINALSARSYAETEFWFSSIKVSAIIAFIILGGAAMFGLIDLKGDEPAPLLSNFVNHGGLFPNGLAAILLTMVTVNYSFQGTELVGIAAGESEDPAKTLPRSIRNIIWRTMFFFVLAIFVLVALIPWEEAGLTKSPFVAVFDNISIPYAADIMNFVILTAVLSVANSGLYAATRMLWSLSKNEMAPAFLKKLSSRGIPLNALILTISISAFSLLTSVVAAETVYLWLISISGVITIIVWMSICVSQFFFRKHYVADGGRLEDLKFKTPLYPLVPILGFGLYGIILVSLIFIPDQRLGIYCTVPFIIFCYTYYHFKVKKRISTNTSSENKISETI

SEQ ID NO: 6218 - protein, 380 aa, Saccharomyces cerevisiae
MNCIPSPISERKIQINNEDCIGKENAFHTIPRESSINLTPHSTNEKKVLSEVNSNKIDSLQLPRGKLQRDSTHLEKTRKRQLSNDSTDPIEPKTVKKIKCHQWKNLDSIEMDDPFMVAEYTDSIFSHLYEKEIQMLPTHNYLMDTQSPYHLKSSMRALLIDWLVEVHEKFHCLPETLFLAINLLDRFLSQNVVKLNKLQLLCITCLFIACKFEEVKLPKITNFAYVTDGAATVEGIRKAELFVLSSLGYNISLPNPLNFIRRISKADNYCIETRNMAKFIMEYSICCNKFIHLKPSYLAAMSMYIARKIKNENSKWDETFIHYSGGIDIESDPAFKDFISELVEDIAVPDTNLDSLRLKYKKPKHGMVYFKVFDWCKQKR

SEQ ID NO: 6219 - protein, 523 aa, Oryza sativa (japonica cultivar-group)
MDRELVRTVKLATKNHAGVLFRRAVRHLPHIVAVTALVAAAPRLSTLLAAAAAGGSTMRWARALWSDLAGELGPSAPALAVACWAAALAAYTYAASRPRPVYLIDLAGYKAPREHEASRAKTIAHFGRCGRFSGESMAFQKRMLERSGLGEATHFPTSLISLPVDMCLRTAREESHAVIFGVVDEVLRKSGVAAADVGVLIFNSSLLSPTPSFTSLIVNRYGMRPGVVSHNLSGMGCSAGIIAIDLAKRLLQVHENTYALVVSTENITLNAYMGNNRPMLVTNTLFRVGGAAILLSNRAADRRGRAKYQLIHTVRTHRGAHDQSFGCVTQEEDDAGEVGVSLSKELMVVAGEALKTNITTLGPLVLPISEQLRFLATVVLKRVFRADVKAYLPDFKLALDHFCIHAGGRGVLDELEKSLKLSPWDMEPSRMTLYRFGNTSSSSLWYELAYCEAKGRIKRGDRVWQIAFGSGFKCNSAVWRALRTVDAAGLDAGDNPWMKEVDMLPVDVPKVAPIDETSYQIPN

SEQ ID NO: 6220 - protein, 711 aa, Schizosaccharomyces pombe
MLHLLSKDEFNSTLKSFEEQTESVSWIIDLRLHSKYAVSHIKNAINVSLPTALLRRPSFDIGKVFACIKCNVKVSLDEINAIFLYDSSMAGMNRIYDLVQKFRRGGYSKKIYLLSNGFEAFASSHPDAIVSTEMVKESVPYKIDINENCKLDILHLSDPSAVSTPISPDYSFPLRVPINIPPPLCTPSVVSDTFSEFASHAEYPGFSGLTPFSIHSPTASSVRSCQSIYGSPLSPPNSAFQAEMPYFPISPAISCASSCPSTPDEQKNFFIVGNAPQQTPARPSLRSVPSYPSSNNQRRPSASRVRSFSNYVKSSNVVNPSLSQASLEIIPRKSMKRDSNAQNDGTSTMTSKLKPSVGLSNTRDAPKPGGLRRANKPCFNKETKGSIFSKENKGPFTCNPWGAKKVSPPPCEVLADLNTASIFYKFKRLEEMEMTRSLAFNDSKSDWCCLASSRSTSISRKNRYTDIVPYDKTRVRLAVPKGCSDYINASHIDVGNKKYIACQAPKPGTLLDFWEMVWHNSGTNGVIVMLTNLYEAGSEKCSQYWPDNKDHALCLEGGLRISVQKYETFEDLKVNTHLFRLDKPNGPPKYIHHFWVHTWFDKTHPDIESITGIIRCIDKVPNDGPMFVHCSAGVGRTGTFIAVDQILQVPKNILPKTTNLEDSKDFIFNCVNSLRSQRMKMVQNFEQFKFLYDVVDYLNSGVNQASKPLMT

SEQ ID NO: 6221 - protein, 392 aa, Spathiphyllum clevelandii
PYEVPMTAAGALQSYKLAAKAISRLQSLPGGSMQKLTDTVVQEVFELTGYDRVMAYKFHEDDHGEVVSEITKPGLEPYLGLHYPATDIPQAARFLFMKNKVRMICDCHAKPVKVYQDEKLTFDLTFCGSTLRAPHSCHLLYMKNMNSIASLVMAVVVNEGDEEDEPLEHGQQLQQKRKRLWGLVVCHNTTPRFVPFLLRYACEFLMQVFAIHVNKEFELENQIREKNILRTQTLLCDMLLRDAPLGIISRSPNIKDLVKCDGAALLYQNKIWRLGSTPTESHIRDIASWLSEYHMDSTGLSTDSLYDAGYPGALTLGDAVCGMAAARITSKDILFWFRSHTAAEIRWGGAKHDPADEDDGRRMHPRSSFKAFLEVVKTRCLPWKDYEMEAIH

SEQ ID NO: 6222 - protein, 285 aa, Pichia pastoris
MSYSTRQIGAANTLENRVFIEKDGQVVSPFHDIPLYADESKKVLNMVVEVPRWTNAKLEISKEEKLNPILQDTKKGKLRFVRNCFPHHGYIHNYGAFPQTWEDPNVTHPETKAKGDNDPLDVCEIGERSYTGQVKQVKVLGVMALLDEGETDWKVIVIDINDPLAPKLNDIEDVEKHMPGLLRATNEWFRIYKIPDGKPENQFAFSGECKNKKYAEEVIQECREAWEKLIFGKTSPGEIDLTNTTLQSTPSFSPSATSAVPTASPAAPAKIDQSIDKWFYISGSA

SEQ ID NO: 6223 - protein, 247 aa, Ipomoea nil
MGRGRVQLKRIENKINRQVTFSKRRTGLLKKAHEISVLCDAEVALIVFSTKGKLFEYATESCMEKILERYERYSYAERQLNSTDQNSQGSWTLEHAKLKARMEVLQRNQRHYEGEDLDSLSLKELQNLERNLIQHSNIRSKRNQLMYESILCSEKDKHCRTKYQLSKKIKEREKEMATQQQQQQEVQWEQPNDDINSSYVVPPPLVHLSSEGEYQGEGEYGETEGTQRQQQNNTSAMPQWMLSHLQG

SEQ ID NO: 6224 - protein, 348 aa, Pyrococcus horikoshii
MSEKMVAIMKTKPGYGAELVEVDVPKPGPGEVLIKVLATSICGTDLHIYEWNEWAQSRIKPPQIMGHEVAGEVVEIGPGVEGIEVGDYVSVETHIVCGKCYACRRGQYHVCQNTKIFGVDTDGVFAEYAVVPAQNIWKNPKSIPPEYATLQEPLGNAVDTVLAGPISGKSVLITGAGPLGLLGIAVAKASGAYPVIVSEPSDFRRELAKKVGADYVINPFEEDVVKEVMDITDGNGVDVFLEFSGAPKALEQGLQAVTPAGRVSLLGLYPGKVTIDFNNLIIFKALTIYGITGRHLWETWYTVSRLLQSGKLNLDPIITHKYKGFDKYEEAFELMRAGKTGKVVFMLK

SEQ ID NO: 6225 - protein, 351 aa, Rhodobacter sphaeroides
MTRRHAVALIPGDGIGPEVIDASLEVLEKVARLHGFALDMTRFDWSCDRYLATGRMMPEDGIDQLRPHAAILLGAVGWPARVPDAVSLHGLLLPIRKSFDQFANMRPHRLLPGATGPLKSEAFDILCIRENTEGEYSGAGGRIHVGTPAEVAVETSIFTRRGVERILRFGFEQARRRSGRLASVTKSNAQKYSMVFWDEVTEEVAADYPDVTVSRYHIDAIAARMVMAPETLDVVVASNLFGDILTDLGAAIQGGLGFAPSANINPDRSQPSMFEPVHGSAPDIAGRGIANPVATLWSAALMLDHLGEEAAGRSLLAALSAVTAEGRLRTPDQGGRACTTDVARAVADRLS

SEQ ID NO: 6226 - protein, 176 aa, Zea mays
MAKPQEVRSVDSFSQLPFIRPAPPPAPAQPRDATIRLFGCDFSNDDQQQRQAKQQQQHRQDAAAADSPDAANGSSITSESNNGANKSGGGGGGGADRKFECHYCCRNFPTSQALGGHQNAHKRERQHAKRAHLQASLAMHRYVPGHMYGLFNYHQQQQHHLGGGGGGRFDYPAPLQ

SEQ ID NO: 6227 - protein, 394 aa, Zea mays subsp. mays
LGAERRARLPPGQMGWPLVGGMWAFLRAFKSGKPDAFIASFVRRFGRTGVYRSFMFSSPTVLVTTAEGCKQVLMDDDAFVTGWPKATVALVGPRSFVAMPHDEHRRIRKLTAAPINGFDALTGYLPFIDSTVTSSLRAWADHGGSVEFLTELRRMTFKIIVQIFLGGADQATTRALERSYTELNCGMRAMAINLPGFAYRGALRARRRLVAVLQGVLDERRAARAKGVSGGGVDMMDRLIEAQDERGRHLDDDEIIDVLVMYLNAGHESSGHITMWATVFLQENPDMFARAKAEQEAIMRSIPSSQRGLTLRDFRKMEYLSQVIDETLRLVNISFVSFRQATRDVFVNGYLIPKGWKVQLWYRSVHMDPQVYPDPTKFDPLRWEGHSPRAGTFL

SEQ ID NO: 6228 - protein, 176 aa, Desulfitobacterium hafniense
MLYSYLDKRPTLGKDVFIADGAKIIGDVHIDEGASIWYNSVIRGDIASIYIGKGTNIQDLSVIHVNTNVPVIIEDDVSIGHSVTLHGCTIKKGTMVGMGSTILNGAIIEEGSMVAAGSLITENKQFPPHVLIMGSPAKVVRALTSDEVNALKETAERYSQKAREHRENSPLPIAKC

SEQ ID NO: 6229 - protein, 289 aa, Glycine max
  unsure (1)..(289): unsure at all Xaa locations
MMGDSEMAKFGLKVGKNEKNGFPRGLDPAISKFFVQLQIVVKSRLSRLAKQDGMSLMSSVQRKGERSFSYSEAELNEQLQAWRENPSWVDKPPLIKVTGPKGSLCNLDVEVDVGLRPDAVYNIVIDPDNRRVFKNIXKVVSSQGFVDQGHRLVLDSAIETLXQYPCWAATLATRHIVNRKPNSCSVKFNHTKTTSIXPSPVKIGVDTITLDEAMCPHFKXDNEGRINCXTRARGRTRFKVSPEHLLQPYLVPPPXPLSWYLMGITARTTEMLNNYMLAETARIRGGYEA

SEQ ID NO: 6230 - protein, 197 aa, Oryza granulata
GQTPVFPRILGHEAGGIVESVGEGVTELVPGDHVLPVFTGECKECAHCKSEESNMCDLLRINVDRGVMIGDGQSRFTINGKPIFHFVGTSTFSEYTVIHVGCLAKINPEAPLDKVCILSCGISTGLGATLNVAKPKKGQTVAIFGLGAVGLAAMEGARLFGASRIIGVDLNPAKYEQAKKFGCTDFVNPKDHSKPVQ

SEQ ID NO: 6231 - protein, 380 aa, Solanum tuberosum
MSTTTGQVIRCKAAVAWEAGKPLVMEEVDVAPPQKMEVRLKILYTSLCHTDVYFWEAKGQNPVFPRILGHEAAGIVESVGEGVTELAPGDHVLPVFTGECKDCAHCKSEESNMCSLLRINTDRGVMINDGQSRFSINGKPIYHFVGTSTFSEYTVVHVGCVAKINPLAPLDKVCVLSCGISTGLGATLNVAKPTKGSSVAIFGLGAVGLAAAEGARIAGASRIIGVDLNASRFEQAKKFGVTEFVNPKDYSKPVQEVIAEMTDGGVDRSVECTGHIDAMISAFECVHDGWGVAVLVGVPHKEAVFKTHPMNFLNERTLKGTFFGNYKPRSDIPSVVEKYMNKELELEKFITHTLPFAEINKAFDLMLKGEGLRCIITMED

SEQ ID NO: 6232 - protein, 622 aa, Glycine max
MDSVPADVSNSHTINDPSKSPPAKETDRQASASVASGQDNSPHEASPRLSPTGISSSAKNLKISQPFSGSQDDSSSGNVGKSTFARITKPIPIRHASKSPVEDDSSSETAGQSNLFGTITKGLVDSSKNAVKAVQVKARHVVSQNKRRYQEGGFDLDMTYITENIIAMGFPAGDMSSGFFGYVEGFYRNHMEEVIKFFETHHKDKYKVYNLCSERLYDASLFEGKVASFPFDDHNCPPIQLIISFCQSAYSWLKEDIENVVVVHCKAGMARTGLMISSLLVFLKFFPTAEESMDYYNQKRCVDGKGLVLPSQIRYVKYFERVLTYFNGENPPARRCMLRGFRLLRCPYWIRPSITVSDHSGVLFSTKKHPRTKELLPEDFWFGAPKKGVMVFALPGEPRVFELAGDFKIHFHDRQGDFYCWLNTTMTENRKVLNTSDLDGFDKRKLPSPGFMVEVVLVDYNGNDVTSKIETTTKKSDESSSNNPASPTPVERSTPAQNADKESDSHDKDDVFSDGEAEQSASSRSKQTKAPSQAVEKVKNDTRVSESSRVSNEIANLSHATEQVSLGNKSSTPIRHASEPRTNVEGKTVSSLEVPSTESEFKAMAADASVFTFGDDEDYESD

SEQ ID NO: 6233 - protein, 348 aa, Bacillus halodurans
MQALRWHGVKDVRVDDIAEPATLKGKVKIKVKWCGICGSDLHEYAAGPIFIPQNSPHSLTEEKAPIVMGHEFSGQVVEVGDGVTKCEEGDRVVVEPIFACGTCTACKQGKYNLCEQLGFLGLAGGGGGFSEYVTVDEHMVHKIPDTVSFEQGALVEPAAVALYAVRQSQFNVGDQAVVFGTGPIGLLVIEALKASGASKIYAVELSTERRQRAEQLGAIALNPAEVNVVEEIQRLTDGGADVSFEVTGVPIVLTQAIESTKLNGQTMIVSIFEKEASFQPNLVVMRERNIAGIIGYRDIFPAVISLMNQGYFSAETLVTKRIGLHDIVEQGFEALMKTNCNIKCDTTK

SEQ ID NO: 6234 - protein, 281 aa, Oryza sativa
AIFRFRTVCRNWYSMLGSESFSQQYSEVPQRLPWFYTITHENASNNVVYDPSLKKWHHPSVPLAPAKIVIPVASAGGLVCLLDLSHRNFYICNPLTQSLKEIPRRSVQAWSRVAVGMVMNGGTSNEGYKVMWLGNDGNYEVYDSMKNMWSCPGTFPPSIKLPLALNFRSQPVAVGSMLYFMCAEPEGVLSYDVSTGIWRQFVIPLPLHLTDHTLAEFQGRVMLVGLLCKNAATCVCIWELQKMTLLWKEVDRMPNIWCLEFYREHMEMTCLGNSGLLMLSL

SEQ ID NO: 6235 - protein, 310 aa, Mycoplasma genitalium
MNLYDLLELPTTASIKEIKIAYKRLAKRYHPDVNKLGSQTFVEINNAYSILSDPNQKEKYDSMLKVNDFQNRIKNLDISVRWHENFMEELELRKNWEFDFFSSDEDFFYSPFTKNKYASFLDKDVSLAFFQLYSKGKIDHQLEKSLLKRRDVKEACQQNKNFIEVIKEQYNYFGWIEAKRYFNINVELELTQREIRDRDVVNLPLKIKVINNDFPNQLWYEIYKNYSFRLSWDIKNGEIAEFFNKGNRALGWKGDLIVRMKVVNKVNKRLRIFSSFFENDKSKLWFLVPNDKQSNPNKGVFNYKTQHFID

SEQ ID NO: 6236 - protein, 96 aa, Glycine max
  unsure (1)..(96): unsure at all Xaa locations
QRARIIEIDAARDIDIALAQNRVWARFSRETNXMIMVLXVSPEEAIWSLLYMHNNDQLITVMVSASDNYSLVQCRISWIEXTRRVKPMAGFAILES

SEQ ID NO: 6237 - protein, 229 aa, Zea mays
MQVAMAGETKDLVLLDFWVSPFGQRCRIALAEKGIAYEYSEQELLGGAKSDILLRSNPVHKKIPVLLHDGRPVCESLVILEYLEEAFPEASSPRLLPDAAYARAQARFWAAYSDKIYEAGTRLWKLRGDARAQARAEIVQVVRNLDGELGDKAFFGGEAFGFVDVALVPFVPWLPSYERYGDFSVAEIAPRLAAWARRCAQRESVARTLHPPEKVDEFINLLKKTYGIE

SEQ ID NO: 6238 - protein, 152 aa, Pinus sylvestris
GTRAVLSGSENVKGVLHFTQEGNEGTKVFGRITGLKRGLHGFHVHAMGDTTNGCLSTGPHYNPWKKDHGAPEDENRHAGDLGNIIAGEDGVAELSIQDWKIPLKGPHSIVGRAVVVHADRDDLGRGGHELSKTTGNAGGRVACGVIGLQSAV

SEQ ID NO: 6239 - protein, 371 aa, Malus x domestica
MGKGGMSDGDHADRCCGEAINGDVQQENMAAWLLGVKNLKIQPYKLPNLGPHDVRVRLRAVGICGSDVHHFKNMRCVDFIVKEPMVIGHECAGIIEEVGSEVEHLVPGDRVALEPGISCKRCNLCKQGRYNLCRKMKFFGSPPNNGCLANQVVHPGDLCFKLPDNVSLEEGAMCEPLSVGIHACRRANVCQETNVLVVGAGPIGLVTLLAARAFGAPRIVIADVNDERLLIAKSLGADAVVKVSTNIEDVAEEVAKIQKVLENGVDVTFDCAGFNKTITTALSATRPGGKVCLVGMGQREMTLPLATREIDVIGIFRYQNTWPLCLEFLRSGKIDVKPLITHRFGFSQKEVEEAFETSARGGNAIKVMFNL

SEQ ID NO: 6240 - protein, 230 aa, Xylella fastidiosa Dixon
HGASMVFFAYIGFEAVSVAAQESHRPQRDLPISMMAAVMTGLVPYTQLGTDEPVVTAVAAHPQLGWLRVVVEIGALVGLSSVVLVMLIGQPRIFMIMAGDGLLPPIFSTIHSKHRTPHINTVITGLGIALLAAVFPLDVLGELTSMGTLIAFTAVCAGVLILRCTRPDLPRPFRMPAAWLFCSAGVLSCITLLSAMTRHNWMLMSVWTVLGFSLYFSYGYRHSKLHREST

SEQ ID NO: 6241 - protein, 183 aa, Pseudomonas syringae pv. tomato str. DC3000
MKIRFVSIPLLLLSMSGAVMAADCPPLLQGELPKLRAKENIDLCKRFAGKPLVVVNTASFCGFAPQFKGLEELSQRYKGQGLEVLGLPSNDFKQEAKDGEETAKVCYVNYGVTFTMTEPQAVRGDDATHLFKVLAEQSSAPRWNFYKYVVDRQGKVVANFSSMTKPDDPELIAAIEKAIASKP

SEQ ID NO: 6242 - protein, 765 aa, Nostoc sp. PCC 7120
MRIDVESQNINVTSLKEAPIHLSGQIQPHGVLLVLEEPGLKILQVSNNTWGILGINAENILQKKLEDLLDSFQIERIQSGLSSGNLEFINPTKIWIRKKGDDYAVFDAVFHRNTEGFLILELEPAITQENIPFLSFYHLAKASINQLQKTANLRDFCQIIVQEVRKVTDFDRVMLYKFDDDGHGSVIAEEKLDSLEPYLGLHYPESDIPKPARKLFISNSIRVIPNAQAQAIQMIPALNPVSDRPVDLTNSILRSAANCHLEYLHNMGVGASLTISLIKDNKLWGLIACHHLSAKYVSYELRKACEFLGRVIFAEISAREETEDYDYRMNLTHIQSLLVEYMSQEDNFVDGLIKHQPSLLDLTSAQGAAVCFGDHCTLIGETPKAEDLVFLVQWLKNNVEEEVFYTDSLPQVYPDAERYKNVASGLLAIPISQRNYVLWFRPEVIQTVNWGGDPNQPFEVNKLDGNVRLCPRKSFELWKETVRLTSLPWRYVEIRAALELRKAIVNIVLRQADELAQLAHDLERSNAELKKFAYVASHDLQEPLNQVANYVQLLEMRYQDQLDADANEFITFAVEGVSLMQTLIDDVLAYSKVDTQAIAFQLTEVEKALDKALGNLRQRIAETGANITHDPLPTVMAGSTQLMQLFQNLIANAIKFRSEEAPQIHIGAERLEDEWLFSVRDNGIGIDPQFSDRIFVIFQRLHTRDEYHGTGMGLAICKKIIECHRGRIWVESQLGEGATFYFTIPVGGRERERRNGRKTQNNLFS

SEQ ID NO: 6243 - protein, 751 aa, Geobacillus stearothermophilus
MENQNRQNAAQCPFHGSVTNQSSNRTTNKDWWPNQLNLSILHQHDRKTNPHDEEFNYAEEFQKLDYWALKEDLRKLMTESQDWWPADYGHYGPLFIRMAWHSAGTYRTGDGRGGASTGTQRFAPLNSWPNNANLDKARRLLWPIKKKYGNKISWADLFILAGNVAIESMGGKTIGFGGGRVDVWHPEEDVYWGSEKEWLASERYSGDRELENPLAAVQMGLTYVNPEGPDGKPDPKAAARDIRETFRRMGMNDEETVALIAGGHTFGKAHGAGPATHVGPEPEAAPIEAQGLGWISSYGKGKGSDTITSGIEGAWTPTPTQWDTSYFDMLFGYDWWLTKSPAGAWQWMAVDPDEKDLAPDAEDPSKKVPTMMMTTDLALRFDPEYEKIARRFHQNPEEFAEAFARAWFKLTHRDMGPKTRYLGPEVPKEDFIWQDPIPEVDYELTEAEIEEIKAKILNSGLTVSELVKTAWASASTFRNSDKRGGANGARIRLAPQKDWEVNEPERLAKVLSVYEDIQRELPKKVSIADLIVLGGSAAVEKAARDAGFDVKVPFFPGRGDATQEQTDVESFAVLEPFADGFRNYQKQEYSVPPEELLVDKAQLLGLTAPEMTVLVGGLRVLGANYRDLPHGVFTDRIGVLTNDFFVNLLDMNYEWVPTDSGIYEIRDRKTGEVRWTATRVDLIFGSNSILRSYAEFYAQDDNQEKFVRDFINAWVKVMNADRFDLVKKARESVTALQCICTDRSATIIKLQ

SEQ ID NO: 6244 - protein, 439 aa, Helicobacter pylori J99
MNFQENLAALDLEYLWHPCSQMQEHQNFPIIPIKKAQGIYLYDFNDNAYMDLISSWWVNLFGHNNAYISQQLKNQIDNLEHVLLASFSHKPIITLSQRLCQLTGMDKCFYADNGSSCIEIALKMSYHAHFLKNQTRRKKLFLSLSNSYHGETLGALSVGDVKLYKDTYTPLLLKNLITPVPKNDSEIENSLNALKRLLDKHGEEICAFIAEPLLQCAGNMHIYSAKYLKQAVLWCKQKNIHIIFDEIATGFGRTGSMFAYEQCGIKPDFLCLSKGISGGYLPLSALLTHNEIYNQFYAPYEENKAFLHSHSYTGNALACACANATLDIFEKENVIEKNKALSEFIFSALQNALKPLIERQVVSDLRHLGMVFAFEVFLQTKERLSLAVFKKALKKGLLLRPLNNTIYLMPPYIITHEEIKKAIAGLVEAIDELKKAENK

SEQ ID NO: 6245 - protein, 278 aa, Triticum aestivum
MASWSSSSTQRSSGATMPCSVVKLDDDLLHHEEETAEEIRRGPWTVEEDLTLVNYIADHGDDRWNSLARAAGLKRTGKSCRLRWLNYLRPDVKRGNFTADEQLLILDLHSRCRLRWPNFPRPLPGRADFAADDHRRTRVQKHAKQLNCDANSTKFKDAMKYLWMPRLADHHLQQASTVGDHLVPGLPTSYMESSGMVTSSSDSFASESYDGARCTNASVGEMIQGGDWVQEQNQGFWPESNQTFQPQDSELSGWVQGFSESESLAENFWSLEDIWKMQ

SEQ ID NO: 6246 - protein, 860 aa, Brassica rapa
MKGVRNIYHHSYTSFLLVFVVMILFRPTLSIYFNTLSSTESLTISNSRTLVSPGDVFELGFFKTTSSSRWYLGIWYKKLPGRTYVWVANRDNPLSNSIGTLKISNMNLVILDHSNKSVWSTNHTRGNERSLVVAELLANGNFLMRDSNSNDAYGFLWQSFDYPTDTLLPEMKLGYDLKIGLNRSLTSWRSPDDPSSGYFSYKLEGSRRLPEFYLMQGDVREHRSGPWNGIQFIGIPEDQKSSYMMYNFTDNSEEVAYTFVMTNNGIYSRLKLSSDGYLERLTWAPSSGAWNVFWSSPNHQCDMYRMCGTYSYCDVNTSPSCNCIPGFNPKNRQQWDLRIPISGCKRRTRLSCNGDGFTRMKNMKLPDTTMAIVDRSMGVKECEKRCLSDCNCTAFANADIRNGGTGCVIWTGELEDMRNYAEGGQELYVRLAAADLVKKRNGNWKIISLIVGVSVVLLLLLLLLIMFCLWKRKQNRAKAMATSIVNQQRNQNVLMNTMTQSNKRQLSRENKADEFELPLIELEAVVKATENFSNCNELGRGGFGIVYKGMLDGQEVAVKRLSKTSLQGIDEFMNEVRLIARLQHINLVRILGCCIEAGEKILIYEYLENSSLDYFLFGKKRSSNLNWKDRFAITNGVARGLLYLHQDSRFRIIHRDLKPGNILLDKYMIPKISDFGMARIFARDETQVRTDNAVGTYGYMSPEYAMYGVISEKTDVFSFGVIVLEIVIGKRNRGFYQVNPENNLPSYAWTHWAEGRALEIVDPVILDSLSSLPSTFKPKEVLKCIQIGLLCIQERAEHRPTMSSVVWMLGSEATEIPQPKPPVYCLIASYYANNPSSSRQFDDDESWTVNKYTCSVIDAR

SEQ ID NO: 6247 - protein, 180 aa, Helianthus annuus
MATQTVFDFPDDVLQQPPMPADNAFSDKDVKGQDVELSKYKGKVLLIVNVASQCGFTNSNYPELTTLYQKYKDQGFEILAFPCNQFGGQEPGSNEEIQVFACTRFKAEYPVFSKVNVNGKEADPLYKFLKSSKGGFLGDSIKWNFTKFLVDREGKVVDRYAPTTSPLSIEKDIKKLLNVA

SEQ ID NO: 6248 - protein, 146 aa, Oryza sativa
  unsure (1)..(146): unsure at all Xaa locations
XPRPDYCRNPGKPSVITDEDFXPQVFSHLKKLLNKAGXISDICRNPGKPSEEFAAYIKQRGYDLHDVKTYGKMLEDAGFHHVIAEDRTDQFLRVLQRELAEVEKNKEAFMADFTQEDYDDIVNGWNAKLKRSSAGEQRWGLFIATK

SEQ ID NO: 6249 - protein, 176 aa, Triticum aestivum
GEAAARTTASRPSAVAMVQVGKLVDNYLAEVASDANLKPAKFCKLALAMPDHARIYDDGVYRAVDIYLKAHPRLTAEERDRVCGVVDCRKLTVEACTHAAQNERLPLRAVLQVLFFEQLQLRRAITGTLLASTASPPSAASESSAAAAGGGAASRRWARARRGGPRCRRARPAHDN

SEQ ID NO: 6250 - protein, 292 aa, Pyrococcus furiosus DSM 3638
MMLPKEIMMPNDNPYALHRVKVLKVYSLTETEKLFLFRFEDPELAEKWTFKPGQFVQLTIPGVGEVPISICSSPMRKGFFELCIRKAGRVTTVVHRLKPGDTVLVRGPYGNGFPVDEWEGMDLLLIAAGLGTAPLRSVFLYAMDNRWKYGNITFINTARYGKDLLFYKELEAMKDLAEAENVKIIQSVTRDPNWPGLKGRPQQFIVEANTNPKNTAVAICGPPRMYKSVFEALINYGYRPENIFVTLERRMKCGIGKCGHCNVGTSTSWKYICKDGPVFTYFDIVSTPGLLD

SEQ ID NO: 6251 - protein, 427 aa, Brassica rapa
NNSYTLSFLLVIFISILFRPAFSINSLSSTESLTISSNRTLVSPGNVFELGFFRTTSNSRWYLGIWYKKLSERTYVWVANRDNPLSNSIGSLKILGNNLVLLGHSNKSVWSTNLSRGYERSPVVAELLANGNFVMRDSNNNNASQFLWQSFNYPTDTLLPDMKLGYDLKTGLNRFLTSWRSYDDPSSGDFLYKLETRRLPEFYLMQGDVREHRSGPWNGIQFIGIPEDQKSSYMMYNFTENSEEVAYTFLMTNNSFYSRLTINSEGYLERLTWAPSSVVWNVFWSSPIHQCDMYRTCGPYSYCDVNTSPVCNCIQGFRPKNRQQWDLRIPTSGCIRRTRLGCSGDGFTRMKNMKLPETTMAIVDRSIGLKECEKRCLSDCNCTAFANADIRNRGTGCVIWTGELEDIRTYFADGQDLYVRLAAADLV

SEQ ID NO: 6252 - protein, 403 aa, Neurospora crassa
MPPKKQVVEEKILLGRPGNNLKSGIVGLANVGKSTLFQAITKCNLGNPALTHPPARQNFPYATIDPEEARVIVPDERFDWLCEKYQPKSRVPANLTVYDIAGLTRGASTGAGLGNAFLSHIRAVDAIFQVVRAFDDAEIIHVEGDVNPTRDLDIISEELRLKDIEFVEKALENQKKKTRQGGQSLQMKQWKEEEATIEKILAHLKDGKEVRKGTWGPKEIEVINPLFLLTAKPVVYLVNLSERDYIRKKNKHLPAIAAWINEHAKGDPIIPLSVSFEERLTRFETEAEAAEECKKVGAESALPKIIIQMRKALNLGSFFTTGPDEVRQWTIRNGTKAPQAAGVIHTDFEKTFIQAVVYNYNVLRELGGDEAEVKAKGKVMTKGKDYVVEDGDIILFKAGAAKS

SEQ ID NO: 6253 - protein, 455 aa, Methanopyrus kandleri AV19
MVEIKEIGEVSTEETSPGAHSHITGLGLDENLKAKPVGDGLVGQEEAREAAGIVVEMVKQGRRAGHGLLLVGPPGTGKTAIAYGIARELGEDVPFVSISGSEIYGTNLSKTEFLQQAIRRAIGVEFTETREVIEGKVESLEIERAKHPLSPYMEVPSGAIIELKTQDDHRRFKVPEEIAIQLVQAGVREGDVIQIDVESGHVTKLGRAKDALEEEEEELLGVHAVELPEGPVQKKKEIKRVVTLHDLDMANVRAGRLLGFREEEITDEIRQKVDERVQKMVDEGEASLVPGVLFIDEAHMLDIEAFAFLNRSLEEEIAPILVMATNRAMAKVRGTDEEAPHGIPGDLLDRMLIARTRPFERHEIHEIIGIRARVQDIQLTDEAHEYLTDLGEEKSIRYATRLLEPARIVAEKEGSEVVEKKHVERVEEVFTDVSDSVEYMERMRRELPVMKYLTG

SEQ ID NO: 6254 - protein, 436 aa, Streptomyces kasugaensis
MSDSVLLSARQPLPPIDYSHAAGAWIHTAEGDSLLDAASGLVCVNIGHAHPHVVEQITRQARTATFASPGVLLPAVQEELAGRLTEAVNRPGDGVSLACSGTSAVELAISYARLIQRSRGQDGRHHILTARLGYHGNSALTLGLSGHRRRRPHPDDALGLAPAFDPPYPGHHRDCPHDRCRASCADAVAEAIDRRGPESVAAVLIEPVNGTTGGAYTPPPGYLAALRRACHERGVLVIHDEVLTGLGRTGLPLGADHCTDAAADIVVLSKGLSAGYLPLAAVLVNPEGVARLRSGPRPLPLMGTMSATPLQAAAGLAVLDVLGEIGALDPARVRGGDVAAAVRAVAALPVVQETRGVGYFHAVELAPGTQAAALAAARDERLLLYPFNGFHADGTGEGLIVAPPLNSTPSEVEFLAQGLRRALERTAARSEDRSHR

SEQ ID NO: 6255 - protein, 269 aa, Pseudomonas putida KT2440
MSFQNKIVVLTGAASGIGKATAQLLVEQGAHVVAMDLKSDLLQQAFGSEEHVLCIPTDVSDSEAVRAAFQAVDAKFGRVDVIINAAGINAPTREANQKMVDANVAALDAMKSGRAPTFDFLADTSDQDFRRVMEVNLFSQFYCIREGVPLMRRAGGGSIVNISSVAALLGVAMPLYYPASKAAVLGLTRAAAAELAPYNIRVNAIAPGSVDTPLMHEQPPEVVQFLVSMQPIKRLAQPEELAQSILFLAGEHSSFITGQTLSPNGGMHM

SEQ ID NO: 6256 - protein, 342 aa, Zinnia elegans
MAFIFSSKKTSAFLCICIGFGMFGFSHEFSILGYAPEDLTSIHKVIHLFESSLVKHSKIYESFDEKLHRFEIFMDNLKHIDETNKKVSNYWLGLNEFADLTHEEFKNKFLGFKGELAERKDESIEQFRYRDFVDLPKSVDWRKKGAVSPVKNQGQCGSCWAFSTVAAVEGINQIVTGNLTVLSEQELIDCDTTFNNGCNGGLMDYAFAYVTRNGLHKEEEYPYIMSEGTCDEKRDASEKVTISGYHDVPRNNEDSFLKALANQPISVAIEASGRDFQFYSGGVFDGHCGTELDHGVAAVGYGTSKGLDYVIVRNSWGPKWGEKGYIRMKRNTGKPMGCVAYI

SEQ ID NO: 6257 - protein, 163 aa, Brassica rapa
TSFKFRQSPSSPRFRLNSRNWALNVTTPLTVDSSSSPPIEEEPKTQRFDPGAPPPFNLADIRAAIPKHCWVKNPWKSMSYVVRDVAIVFALAAGAAYLNNWLVWPLYWIAQGTMFWALFVLGHDCGHGSFSNDPRLNSVVGHLLHSSILVPYHGWRIRHRTHH

SEQ ID NO: 6258 - protein, 511 aa, Triticum aestivum
  unsure (1)..(511): unsure at all Xaa locations
FLHPPLPPRVRPLGGKNWKGVTRCPAVARLTGRGPAGSFAPPRCTCRAPGAARGSAPSSGRVTRAPPGAAPFPRSSSASSAPAGVRPVTWDPDAVAIIHDVQGYAKAPEDAVADVLKAGMDVNCGGYIHTHGVSAYPQGKITGEDIDRALRNLFAIRMRLGLFNGNPKYNRYGNIGADQVCKKEHQDLALQAAQDGIVLLKNDAGALPLSKSRVSSVAVIGPNGNNASLLLGNYFGPPCISVTPFQALQGYVKDATFVQGCNAAVCNVSNIGEAVHAASGADYVVLFMGLDQNQEREEVDRLELGLPGMQESLVNKVADAAKKPVILVLLCGGPVDVTFAKNNPKIGAIVWAGYPGQAGGIAIAQVLFGEHNPGGRLPVTWYPKEFTAVPMTDMRMRADPSTGYPGRTYRFYKGKTVYNFGYGLSYSKYSHRFASKGTKPPSMSGIXEGLKATASAAGTVSYDVDEMGXEACDRLRFPXVVRVXNHGSMDGRYLVLLXLXWSNXMDGWFVS

SEQ ID NO: 6259 - protein, 456 aa, Salmonella enterica subsp. enterica serovar Typhi
MDSQQHGEQLKRGLKNRHIQLIALGGAIGTGLFLGSASVIQSAGPGIILGYAIAGFIAFLIMRQLGEMVVEEPVAGSFSHFAYKYWGGFAGFASGWNYWVLYVLVAMAELTAVGKYIQFWYPEIPTWASAAAFFVIINAINLTNVKVFGEMEFWFAIIKVIAVIAMILFGAWLLFSDTAGPQATVRNLWEQGGFLPHGWTGLVMMMAIIMFSFGGLELVGITAAEADNPEQSIPKATNQVIYRILIFYIGSLAVLLSLLPWTRVTADTSPFVLIFHELGDTFVANALNIVVLTAALSVYNSCVYCNSRMLFGLAQQGNAPKALLNVDKRGVPVSSILVSAVVTALCVLLNYLAPESAFGLLMALVVSALVINWAMISLAHMMFRRAKQQQGVKTRFPALFYPFGNVLCLLFMAAVLIIMLMTPGMAISVWLIPVWLLILGVGYLCKEKTAKTVKAH

SEQ ID NO: 6260 - protein, 89 aa, Zea mays
MLRSIISGTYISCIYLRYWQRIPVTNHRGVLSDDSAFSTFPPEFVRPFIDPIASIFHRMLCGRYDASNDDGYCLENEPLPGSDSIDASR

SEQ ID NO: 6261 - protein, 449 aa, Pseudomonas fluorescens PfO-1
MEIEEFGYKQELKRSLTLTDLVVYGMIFMIPIAPFGVYGYVNAEAPGMVPLAYIIGMVAMVFTALSYGSMARAFPIAGSVYSYAQRGLNQHVGFIAGWLMLLDYLLIPPLLYVYAAMALNHLYPDIPKVGFILAFLVSATFVNLRGITFTARMNIVFLLAQLVVLGIFLFYAWNALHNGGGNGQLTLAPLYHPETFNFALLMQAVSIAVLSFLGFDAISTLAEEIKGDPGRSVGKAALITLVVMGVIFVAQTWIATDLAAGMGFKSADTAFYEIAEIAAGSWLATLTGVATALAWGVAVAITSQAAVSRLLFGMARDGKLPKVLAKVHPKHNTPYLSIYLVAVLSLVICYLFINSVDTLTSLVNFGALSGFMLLHLTVINYYWRRQKSGQVIRHLICPVIGFIIVAAIMYNMGVDAQKLGLIWIALGLVYLFFLNKLGASTALPDPSNG

SEQ ID NO: 6262 - protein, 124 aa, Glycine max
  unsure (1)..(124): unsure at all Xaa locations
MLICLHRCTFQNGDFGILIRSXGFSIPTALFVHFLSALEALAATALALLSSKDTGQSCMIEGHTAXASIYIALSVVLAPLISRGNTTLINTVVQMIFLTMVMAVALGIALVERMKCGLFKTRMP

SEQ ID NO: 6263 - protein, 263 aa, Magnetospirillum magnetotacticum
MSPPTPDVFPPTTGAHIMFDLTGRKALVTGATGGLGGAIARALHAQGAHVALSGTRRAVLEELAAELGGERVAVVEANLADKEAVEALLPAAESALGGLDILVNNAGITRDNLFMRMKDEEWEAVLNVNLTAAFRLSRAALKGMMRRRYGRIIGIGSVVGATGNPGQGNYAAAKAGLVGMTKALAAEVATRNITVNCIAPGFITSAMTDALNEKQRETILTRVPAGRLGTGAEIGAAAVYLASEEAGYVTGQTLHVNGGMAMY

SEQ ID NO: 6264 - protein, 550 aa, Zea mays
MALATNAAAAAAISGGSASQPRRASPSLLLLRRRCAVGAVHAAEPSKNPGVVPAAAKASTPTVVPENDTVPAPSLGPNASLRARWAVDSWRTKKALQQPEYPNQTELEEAVNTIEKSPPIVFAGEARHLEERLADAAVGRAFLLQGGDCAESFKEFTSANIRDTFRVILQMAVVLTFGGQMPVVKVGRMAGQFAKPRSDAFEERGGVKLPSYRGDIINGEAFDEKSRVPDPQRMLKAYYQSASKLNLLRAFATGGYADIQRVTQWNLDFTKHSEQGDRYRELAHRVDDALGFMGAAGLTVDQPLTTMIEFWTSHECLLLPYEQALTRQDSTTGLFYDCSAHMLWVGERTRQLDGAHVEFLRGIANPLGIKVSDKMEPGELVKLIDILNPTNKPGRITVITRMGAENIRVKLPHLIRAVRQAGQSVTWITDPMHGNTIKTPCGRKTRPFDSILAEVRAFFDVHDQEGSQPGGVHLEMTGQNVTECTGGSSNVTFDNLRDRYHTQCDPRLNASQSLELAFILAEKLRKRRMRRSSVASGLGGSILPLPPFGF

SEQ ID NO: 6265 - protein, 333 aa, Streptococcus mutans
MAILVLGGAGYIGSHMVDRLIEKGEEEVVVVDSLVTGHRAAVHPAAKFYQGDLADREFMSMVFRENPDVDAVIHFAAYSLVAESMKKPLKYFDNNTAGMIKLLEVMSEFGVKYIVFSSTAATYGIPDEIPIKETTPQRPINPYGESKLMMETIMKWSDRAYGIKFVPLRYFNVAGAKPDGSIGEDHSPETHLLPIILQVAQGVREKIMIFGDDYNTPDGTNVRDYVHPFDLADAHLLALNYLRQGNPSTAFNLGSSTGFSNLQILEAARKVTGQKIPAEKAARRSGDPDTLIASSEKAREVLGWKPQFDDIEKIIASAWAWHSSYPKGYDDRD

SEQ ID NO: 6266 - protein, 173 aa, Glycine max
MARMPLEPLIVGRVIGEVLDSFTTSTKMIVSYNKNQVYNGHELFPSTVNTKPKVEIEGGDMRSFFTLIMTDPDVPGPSDPYLREHLHWIVTDIPGTTDATFGKELVSYEIPKPNIGIHRFVFVLFKQKRRQCVTPPTSRDHFNTRKFAAENDLALPVAAVYFNAQRETAARRR

SEQ ID NO: 6267 - protein, 392 aa, Heteropterys thyrsoidea
DLEPVNPADVPVTAAGALKSYKLASKAISRLQSLPSGNISLLCDVLVKEVRDLTGYDRVMVYKFHEDEHGEVVSECRRSDLESYLGLHYPATDIPQASRFLFMKNKVRMICDCLAPPVKVIQDERLPQPLSLCGSTLRSPHGCHAQYMTNMGTIASLVMSVTINEDDDMMDGDQQQMTRKLWGLVVCHHTSPRFVPFPLRYACEFLIQVFGVQINKEVELAAQVREKHILQIQTMLCDMLLRDAPVAIITQSPNVMDLVECDGAALYFKNKTWLLGVTPTEEQIRDIAEWLLEYHSGNTGLSTDSLMEAGYPGASVLGDAVCGMAAVSITSRDFLFWFRSHTAKEIKWGGAKHDPDDKDDLRKMHPRSSFKAFLEVVKWRSMPWEDVEMDAI

SEQ ID NO: 6268 - protein, 132 aa, Vitis vinifera
MADEIILLDFWPSMFGMRVRLALAEKGLKYEYREEDLWNKSPLLLEMNPVHKKIPVLIHNGKPICESLIIVQYIDEVWCDKSPLLPSDPYQRAQARFWVDYIDKKLYELGRKIWSTKRRRAGNSQEGIHRVP

SEQ ID NO: 6269 - protein, 348 aa, Glycine max
VSYGVEFEGAGASKESKVNGDGGRDVNLGDSNYSFGEAEALSDEMEEESRYVAEILRIRDVLLNPEDESEAVLFDSLRRLQMMELTEDCLKATEIGKAVNSATSAPPHTYASTLHLLNGWKEMVDEWVKATTTTAITGSEEGTPDSVNPSVVDDDEEEGLPSPPLDEGAFFVTQAGSMELSQFFDGMDDDGNPRPTGPFSKNHENGRKPAFDSHSQQQAKENKAAVMPVRPNKPVTADSGPGRPPKSNVQRKSNMEPKMQQKMENNSITRRPPTAQLDKSKRSDDDAVQVKLEATKRKLQESYQQAEKAKRQRTIQVMEINDLPKQGLHRNTHFKPGYHSRHWANGRR

SEQ ID NO: 6270 - protein, 751 aa, Geobacillus stearothermophilus
MENQNRQNAAQCPFHGSVTNQSSNRTTNKDWWPNQLNLSILHQHDRKTNPHDEEFNYAEEFQKLDYWALKEDLRKLMTESQDWWPADYGHYGPLFIRMAWHSAGTYRIGDGRGGASTGTQRFAPLNSWPDNANLDKARRLLWPIKKKYGNKISWADLFILAGNVAIESMGGKTIGFGGGRVDVWHPEEDVYWGSEKEWLASERYSGDRELENPLAAVQMGLIYVNPEGPDGKPDPKAAARDIRETFRRMGMNDEETVALIAGGHTFGKAHGAGPATHVGPEPEAAPIEAQGLGWISSYGKGKGSDTITSGIEGAWTPTPTQWDTSYFDMLFGYDWWLTKSPAGAWQWMAVDPDEKDLAPDAEDPSKKVPTMMMTTDLALRFDPEYEKIARRFHQNPEEFAEAFARAWFKLTHRDMGPKTRYLGPEVPKEDFIWQDPIPEVDYELTEAEIEEIKAKILNSGLTVSELVKTAWASASTFRNSDKRGGANGARIRLAPQKDWEVNEPERLAKVLSVYEDIQRELPKKVSIADLIVLGGSAAVEKAARDAGFDVKVPFFPGRGDATQEQTDVESFAVLEPFADGFRNYQKQEYSVPPEELLVDKAQLLGLTAPEMTVLVGGLRVLGANYRDLPHGVFTDRIGVLTNDFFVNLLDMNYEWVPTDSGIYEIRDRKTGEVRWTATRVDLIFGSNSILRSYAEFYAQDDNQEKFVRDFINAWVKVMNADRFDLVKKARESVTALQLVSFNRSSIINRLQ

SEQ ID NO: 6271 - protein, 363 aa, Buchnera aphidicola
MKKNYRIAVLSGDGIGPEVMQEACKILNVLKKYFFLSLEIQKFNIGGIAIEREGVALPKTTLLGCENSDSILLGSVGGKKWDNLPVEQRPERAALLPLRKHFNLFSNLRPAKLYPELKCLSPLRSDIVKNGFDILCVRELTGGIYFGEPKGFVNKNNTKYAFDTEIYHEYEIIRIAHLAFKLARSRKKKVCSIDKSNVLQSSILWREVVESVSKKYPDVHLSHLYIDNAAMQIIKDPNQFDVLLCSNLFGDIISDECATITGSIGMLPSASFNEKNFGLYEPAGGSAPDIEGKNIANPIAQILSLSMLVRYGMNLNQIADKIDKAVNNVLKKGYRTSDISHDNNFLKTDEMGDLIVDSLINGK

SEQ ID NO: 6272 - protein, 257 aa, Streptomyces lavendulae
MSTVTDRATERLGQSGRVVVVSGASGQIGGACALELAALGATVVAGYHSGEQAIRKLREQVEGQGGTLVPVAADLSEPEGADALVAAAVERFGRVDGCVAAAGLRTRRLAMATDARSLEKLLRVNLAGSVGLAKACLKPMMRARYGRIVLFGSRAGTSGLPGHSAYAATKGALQPWAASVAGEVGKHGITVNVVAPGAIRAEVMDFSEAERDLVLQFIGAGRLGEPEEVAAAVSFLLSPSASYVNGNTLVVDGGARF

SEQ ID NO: 6273 - protein, 376 aa, Escherichia coli O157:H7 EDL933
MLQRGGDGCKQNQSCEPATIDGFMPKAQESIMGQQKQRNRRWVLASRPHGAPVPENFRLEEDDVATPGEGQVLLRTVYLSLDPYMRGRMSDEPSYSPPVDIGGVMVGGTVSRVVESNHPDYQSGDWVLGYSGWQDYDISSGDDLVKLGDHPQNPSWSLGVLGMPGFTAYMGLLDIGQPKEGETLVVAAATGPVGATVGQIGKLKGCRVVGVAGGAEKCRHATEVLGFDVCLDHHADDFAEQLAKACPKGIDIYYENVGGKVFDAVLPLLNTSARIPVCGLVSSYNATELPPGPDRLPLLMATVLKKRIRLQGFIIAQDYGHRIHEFQREMGQWVKEDKIHYREEITDGLENAPQTFIGLLKGKNFGKVVIRVAGDD

SEQ ID NO: 6274 - protein, 464 aa, Methanosarcina mazei Goe1
MIMNPKRIRALKSGKQGDGPVVYWMSRDQRAEDNWALLFSRAIAKEANVPVVVVFCLTDEFLEAGIRQYEFMLKGLQELEVSLSRKKIPSFFLRGDPGEKISRFVKDYNAGTLVTDFSPLRIKNQWIEKVISGISIPFFEVDAHNVVPCWEASQKHEYAAHTFRPKLYALLPEFLEEFPELEPNSVTPELSAGAGMVETLSDVLETGVKALLPERALLKNKDPLFEPWHFEPGEKAAKKVMESFIADRLDSYGALRNDPTKNMLSNLSPYLHFGQISSQRVVLEVEKAESNPGSKKAFLDEILIWKEISDNFCYYNPGYDGFESFPSWAKESLNAHRNDVRSHIYTLEEFEAGKTHDPLWNASQMELLSTGKMHGYMRMYWAKKILEWSESPEKALEIAICLNDRYELDGRDPNGYAGIAWSIGGVHDRAWGEREVTGKIRYMSYEGCKRKFDVKLYIEKYSAL

SEQ ID NO: 6275 - protein, 409 aa, Sulfolobus tokodaii
MKVYIVEHAIGSFAYDEQGKLIDFVLSSKDLGKVVDSLLDNEKGIPLPTTIELIQKIKPEEVVVENEAEIPNLQQLGVKASYEIHNLGSKIFRESLPKIAIETKFASSENDLYSFLYEVSFEYTRRKLRTAASKRDLLAIQAIRAIDDIDKTINLFSERLREWYSIHFPELNKLVEDHELYASIVSKFGHRDEITNTGLDEIGVNKDLSTKILDASKKSIGADITDVDIRSIKMLSDTILELFRIRSELTDYVESVMKEVAPNVTALVGPTLGARLLSLAGSLEDLAKMPASTIQVLGAEKALFRALRKGGKPPKHGVIFQYPAIHTSPRWQRGKIARALAAKLAIAARIDAFSGRFIGDKLNEELKKRIEEIKTKYAQPPPRKPQEQKRKEEERKGKKGGREKRKGRR

SEQ ID NO: 6276 - protein, 337 aa, Erwinia amylovora
MSILVTGGAGYIGSHTVLSLLQRGDDVVILDNLSNASRESINRVEKLTGKTATFFEGDLLDRSCLRSVFSAHRISAVIHFAGLKAVGASTRKPLEYYQNNVTGTLVLLEEMRSAGVNQFIFSSSATVYGADAPVPYVETTPIGGTTSPYGTSKLMVEQILRDYAKANPEFKTIALRYFNPVGAHESGQMGEDPNGIPNNLLPYIAQVAIGRLEKLGIFGDDYPTEDGTGVRDYIHVMDLAEGHLKALDHLSAIEGYKAYNLGAGKGYSVLEMVKAFEKASGGTVAYQISPRRDGDLAAFWADATLADKELNWRVSRGIDEMMRDTWNWQSQNPQGDS

SEQ ID NO: 6277 - protein, 379 aa, Chlamydia muridarum
MKRLALIGSTGSIGKQVLQVIREIPDAFVIETLAAYGRNRESLISQIREFSPRVVAVRDETTYKELRKLFPHIEILSGEEGLIAVATAASVDMTIVASSGIDALPAVMASIQERKTIALANKESLVAAGELVTTLAKKNHVQILPIDSEHNALFQCLEGRDPSTIKKLILTASGGPLRNKSKEELQKVTLQEVLKHPIWDMGPKITVDSSTLVNKGLEIIEAFWLFGLQAVEIEAVIHPQSLIHGMVEFCDGTILSVMNPPSMLFPIQHVLTFPDRYPSIISGLNFLTNQTLEFLPIDDERFPSIRLAKDVLREGGSMGCFFNGANEALVQRFLSGEIAWYQIVSKLQTLMDKYVVRSCLSLEDILQVDSEARALASEC

SEQ ID NO: 6278 - protein, 1139 aa, Oryza sativa
  unsure (1)..(1139): unsure at all Xaa locations
MPMATVRRDIELSLIYADSRRKHLPRVEKDGLLREEEEPEFPASRSPTPRTNPRLASPSSSPSPPRLAASXVVNMQRGRFVQPFGCLLAVHPETFALLAYSENAAEMLDLTPHAVPTIDQREALAVGTDVRTLFRSHSFVALQKAATFGDVNLLNPILVHARTSGKPFYAIMHRIDVGLVIDLEPVNPVDLPVTATGAIKSYKLAARAIARLQSLPSGNLSLLCDVLVREVSELTGYDRVMAYKFHEDEHGEVIAECKRSDLEPYLGLHYPATDIPQASRFLFMKNKVRMICDCSATPVKIIQDDSLTQPISICGSTLRAPHGCHAQYMASMGSVASLVMSVTINEDEDDDGDTGSDQQPKGRKLWGLMVCHHTSPRFVPFPLRYACEFLLQVFGIQINKEVELAAQAKERHILRTQTLLCDMLLRDAPVGIFTQSPNVMDLVKCDGAALYYQNQLWVLGSTPSEAEIKNIVAWLQEYHDGSTGLSTDSLVEAGYPGAAALGDVVCGMAAIKISSKDFIFWFRSHTAKEIKWGGAKHEPIDADDNGRKMHPRSSFKAFLEVVKWRSVPWEDVEMDAIHSLQLILRGSLQDEDANKNNNAKSIVTAPSDDMKKIQGLLELRTVTNEMVRLIETATAPILAVDITGSINGWNNKAAELTGLPVMEAIGKPLVDLVIDDSVEVVKQILNSALQGIEEQNLQIKLKTFNHQENNGPVILMVNACCSRDLSEKVVGVCFVAQDMTGQNIIMDKYTRIQGDYVAIVKNPSELIPPIFMINDLGSCLEWNEAMQKITGIKREDAVDKLLIGEVFTHHEYGCRVKDHGTLTKLSILMNTVISGQDPEKLLFGFFNTDGKYIESLMTATKRTDAEGKITGALCFLHVASPELQHALQVQKMSEQAAMNSFKELTYIRQELRNPLNGMQFTRNLLEPSDLTEEQRKLLASNVLCQEQLKKILHDTDLESIEQCYTEMSTVDFNLEEALNTVLMQAMPQSKEKQISIDRDWPAEVSCMHLCGDNLRLQQVLADFLACMLQFTQPAEGPIVLQVIPRMENIGSGMQIAHLEFRLVHPAPGVPEALIQEMFRHSPGASREGLGLYISQKLVKTMSGTVQYLRESESSSFIVLVEFPVAQLSTKRCKASTSKF

SEQ ID NO: 6279 - protein, 158 aa, Staphylococcus epidermidis ATCC 12228
MSIYDIAVENYDGSTYLLKRYKGKVLIIVNTATNCTLNDQFNKLEMLYKKYHKYGLEILSFPCNDFNNQEPELIKDIYRVYKYKFGITFPIHAKINVNGEHEHPLYTLLKCKQPGLFGSQIKWNFTKFVVDQQGNIVKRFLPCDNPNQMEKLIRQLLK

SEQ ID NO: 6280 - protein, 275 aa, Triticum aestivum
VPANVVESSRRFPEQSRFSCDDRRLLRPAETQEAKKPSSTRAKELPRLSLDSRKESLSPSSRLKSCSYRRTDDSLLDALKPQDSPGHRRSNTVIAKLMGLEEAPDAMGMLVADSYEPARSPRTAAQATRSERPSRSPRRDCQDACGSLPKNEPSALKTRPPPRILTEPAPWRQQERGVSVTNSKASQCRDAEARPRTASLYADIERRLGGLEFSECNKDFRALRILGALHAKDAKHQNNDGDAASVAFQSQEEDSATTSSRSFQSPIVVMKPART

SEQ ID NO: 6281 - protein, 345 aa, Pseudomonas syringae pv. syringae B728a
MTYIAAENRYEDMPYRRTGRSGLVLPALSLGLWHNFGDSTPIDTQRAMLRTAFDLGINHFDLANNYGPPYGSAEINFGRLLREDFKHYRDELIISSKAGWDMWPGPYGQGGGSRKYVLASLDQSLQRMGLDYVDIFYSHRFDPDTPLEETASALATAVQQGKALYIGISSYSGAKTREIAALLKEWKVPLLIHQPAYNLLNRWVEKDLLDATEELGAGVIAFTALAQGLLSDKYLNGVPKDARVNRPGGGSLQASHLSEQNIAHVRALNEIAQRRGQSLAQMALAWTLRDPRVTSALIGASRPEQIIENVGALKNLAFSPEELTEIDSFAVEGGINLWEKPSLAE

SEQ ID NO: 6282 - protein, 308 aa, Triticum aestivum
SCGCIRRYASGDNSVCIWGGSWSLWKVLADMLGDLRVLDTPIGENSFTGMGIGAGMKGLRPVVEGMNMGFLLLAYNQISNNCGMLHYTSGGQFKIPLVIRGPGGVGRQLGAEHSQRLESYFQSIPGLQMVACSTPYNAKGLMKAAIRSENPVVLFEHVLLYNLKEKIPDEEYTLCLEEAEMVRPGEHVTILTYSRMRYHVMQAAKTLVNKGYDPEVIDIRSLKPFDLHTIGNSIKKTHRVLIVEECMRTGGIGASLRSAIIDNFWDYLDAPIMCLSSQDVPTPYAATLEDATVVQPAQIVAAVEQICQ

SEQ ID NO: 6283 - protein, 364 aa, Raphanus raphanistrum subsp. raphanistrum
SSNKTLVSPGGVFEFGFFKLASSSCWYLGIWYKNIPERSYVWVANMRQPSPQFHWNSQNLQALTSVLLDQSKNTVWSTNLTRRCVKSPVVAELFDNGNFVMRYSNNSDPSGYLWQSFDFPTDTLLPQMKLGFDLKTGPHRFLRSWRSPDDPASGNYTYKLETRGLSRVFSTSEDFLLYRTGPWNGIGLTAYRRCHGVDNILTENKEEIRYTFRMTNHSIYSKFIITHSGFFQLLTWTPKVQLWNVLWSIPNDQCDLYVLCGPYGYCDTKTSMCNCIKGFKPKGSQAWALGDMSQGCVRKTSLSCGGDGFIRLTKMKLPDTTYAIVDKLVGIKECKKRCLKDCNSYAFANADIRKGGSGMCDVDP

SEQ ID NO: 6284 - protein, 357 aa, Agrobacterium tumefaciens str. C58 (U. Washington)
MRALRFHAAKDLRIEDIAEPKRPGPGQVLVRNRFVGICGTDLHEYSYGPIFIPTEPHPFTGAHGPQILGHEFGGVVEAIGDGVTSVNVGDRVSIQPLIMPRSGDYFADRGLFHLSTQLALVGLSWDGGGMAEAALVNEYNVQKIPDEMTDEEAALVEPSAVAVYACDRGGVTAGNSVLVTGAGPIGMLTLLAARAAGATQLFVSDLNDARLELARNVIRDVITINPKRDNVGDVVRSATEGKVGCDVAIECVGNEHALKACVDAVRKQGVVVQTGLHPHENPIDWFQVTFRDLEIKGSWAYPTHYWPRVIRLIASGLLPATKIVTKRITLDTAVTEGFDALLDPAGTHLKILIDLSK

SEQ ID NO: 6285 - protein, 392 aa, Acridocarpus macrocalyx
DLEPVNPADVPVTAAGALKSYKLAAKAISRLQSLPSGNISLLCDVLVKEVRDLTGYDRVMVYKFHEDEHGEVVSECRRSDLEAYLGLHYPATDIPQASRFLFMKNKVRMICDCLAPPVKVIQDERLPQPLSLCGSTLRSPHGCHAQYMANMGTIASLVMSVTVNEDDDMMDGDQQQMARKLWGLVVCHHTSPRFVPFPLRYACEFLIQVFGVQINKEVELAAQVREKHILQIQTLLCDMLLRDAPVAIITQSPNVMDLVKCDGAALYYKKKFWLLGITPTEAQIRDIVEWLLEYHSGNTGLSTDSLMEAGYPGVSVLGDAVCGMAAVSITSKDFLFWFRSHTAKEIKWGGAKHDPDDKDDGRKMHPRSSFKAFLEVVKWRSLPWEDMEMDAI

SEQ ID NO: 6286 - protein, 303 aa, Symplocarpus foetidus
MGDHGPRTEISFAGSSRAAFAACFAELCTIPLDTAKVRLQLQKKAVTGDVVALPKYRGMLGTVATIAREEGLSALWKGIVPGLHRQCLFGGLRIGLYEPVKSFYVGDNFVGDIPLSKKILAGLTTGALAIIVANPTDLVKVRLQSEGKLPPGVPRRYSGALNAYSTIVKKEGLGALWTGLGPNIARNAIINAAELASYDQVKQTILKLPGFSDNIFTHILAGLGAGFFAVCIGSPVDVMKSRMMGDSAYKSTFDCFIKTLKNDGLLAFYKGFIPNFGRLGSWNVIMFLTLEQVKKFFIKEVPN

SEQ ID NO: 6287 - protein, 262 aa, Hordeum vulgare subsp. spontaneum
SAESNMCDLLRINTDRGVMIGDGKSRFSIGGKPIYHFVGTSTFSEYTVMHVGCVAKINPEAPLDKVCVLSCGISTGLGASINVAKPPKGSTVAIFGLGAVGLAAAEGARIAGASRIIGVDLNASRFEEARKFGCTEFVNPKDHTKPVQQVLADMTNGGVDRSVECTGNVNAMIQAFECVHDGWGVAVLVGVPHKDAEFKTHPMNFLNERTLKGTFFGNFKPRTDLPNVVEMYMKKELEVEKFITHSVPFLEINKAFDLMAKG

SEQ ID NO: 6288 - protein, 238 aa, Methanocaldococcus jannaschii
MEVDTMETLIRLFVSILIICVLALMIKKSRCLDNEGVIGSSIMGFILLYFCGFKYLILLLSFFILGVLVSRVGLEKKKAKKMDETCRSLKNVLANGLIPILFAILAIFGFNWALIGYISSIAAATSDTFSSELGILSNEKPRLITTFEVVEKGTDGAITIFGTLAGVLGAFLIGLFGYLLFGDIKIVLCGTAGGIAGNLADSLVGALFERKGILNNEHVNLIATIVGGIIGVLIYCTL

SEQ ID NO: 6289 - protein, 343 aa, Prochlorococcus marinus subsp. pastoris str. CCMP1378
MKAAILVNQKKKLIVDELDLPTSLKVGQVLVKLEYSGICGTQIGEIDGVKGEDKFLPHLLGHEGSGIVEKVGPGVKTVREGDSVVLHWRQGNGIQSEPPKYNWNGKTVNAGWVTTFNTKAIISENRCTKIPANISKEDAALFGCAVTTGFGVIENNAKLKMGESIVVFGAGGIGLNIIQAARLTSAWPIIAVDLFDNRLDLAKKLGATHSVNSSNKSYLDEIENILKDRELDVFIDNTGNTSIIEMGYNLISDQGRLILVGVPKTGENINIFSLPLHFGKKITGSFGGECNPAKDIPRFIKMMQNGLWDLKGLITESYDLENINEAIFSMRTGKTSGRVIIKL

SEQ ID NO: 6290 - protein, 374 aa, Pristimera andina
ALSIAGAVQSQKLAVRAISRLQSLPGGDIKLLCDTAVESVRDLTGYDRVMVYKFHEDEHGEVVAGSKRPDLEPYIGLHYPATDIPQASRFLFKQNRVRIIVDCHASPVNVIQDDGLMQPLCLVGSTLRAPHGCHAQYMENMGSIASLAMAVVINGNDEDGIGGRNPTRLWGLVVCHHTSARCIPFPLRYACEFLMQAFGLQLNMELQLAAQLLEKHVLKTQTLLCDMLLRESPTGIVTQSPSIMDLVKCDGAALYYQANYYPLGVTPTEAQIKDIVEWLLVFHGDSTGLSTDSLADAGYPGATLLGDAVCGMAVAYITNRDFLFWFRSHTAKEIKWGGAKHHPEDKDDGLRMHPRSSFKAFLEVVKSRSLPWEN

SEQ ID NO: 6291 - protein, 212 aa, Brucella suis 1330
MKDLFDNLNTREIMAPGAVLLRGFALACEESILSAVARVCAAAPFRHMTTPGGYRMSVAMTNCGPVGWVTDRTGYRYSPADPETGKPWPSMPDTFLALAQDAARQAGYPDFTPDACLINRYEPGARLSLHQDKDERNFSNPIVSVSLGLPATFQFGGMKRTDPITKYILHHGDVVVWGGPSRLFYHGILPLKSGEHERLGPFRLNLTFRKAF

SEQ ID NO: 6292 - protein, 465 aa, Candida albicans
MFPNSPDAFHQVRMMQSLIKASNFKLQSMEFRCHSNNVCEYQMEMLHHLLSVEAKTLPSLSLIEQQPEIKLGMRPLLLDFLMEVITILNLSRSTFPLTVNLIDRYCSTRIVKKQHYQLLGLTSLWISCKNLDSKFKVPTLNDLRKICVDSYYKELFVEMEKHILKSLEWVVNAPTFDAFIDLYSNLLISNSSNFEVANIIKKSSHKIKLFSNYIGELFQFYPNIYYDYTSSQIALIAILITVLTLKIPVDLISLLNFYNGLVKTEMFKSNVEQGAEDQFEEILSVDSFKSLFNKSFFKNLIKIIDNPPSSLKIKYFAENGKYSVLMKQLVTTASNTLKCILDPVPTTPKANSFVKHQQQQHHYHPRPPMSINTSMIPLTPVSNSTSPNRFSPDQIFSENESTPGIAFGTMTPDSQSTSPGEKRSYECIDELEIGTSTIAGYTLKNHDTLKRSKSANYGTLFYLQQ

SEQ ID NO: 6293 - protein, 254 aa, Zea mays
MVLCQGVSVGNAQLLAFPGRSSSLKSTQFLVKTNHFPARALRVGTDSIHHAMPTSSPRENSVRGIPSLSRQHNQHPRSVSCQASSLASFSYPELTSKPRWWWRTLACVPYLLPLHNMWSYADVIYQLHTYLQGFSLLYTFIDTMTLCPGWLFLVIFMTVYFFVVRRKWSPHFLRFHVILAILLDTGSQAVATMCTWMPSIVYQGKPMQYLWMSIAFIQIFTVLECLRCALCGMYPNVPFISHTAFIHSDLNLFR

SEQ ID NO: 6294 - protein, 90 aa, Triticum aestivum
RTRLFAVPLVAHTFDLVDGDRDSFRFLWLVLPLAFAQEFDKRYGVGWQCVVGASFGCFFTHTSGTFIYFSLERLSFLLFKAAAAVAVAAS

SEQ ID NO: 6295 - protein, 375 aa, Methanosarcina acetivorans C2A
MTQYKVPVLPGDGIGPEIIAEGKKVIDAAGERFGFDVEWIEYPHGADHYLKTGELISEETLKELSGYPAIYLGSIGDPRIAPGVLEKGILLTARFYFDQYINLRPIKLLEGVWTPIKDKTAKDIDFVVVRENTEDFYIGVGGRAKKGESKDLLEVKRTLYSAKFGLDIETDSEEIGYQIGLISKEGTKRVIEYAFDLAENRKKHVSSVDKANVLSDIYGFWREEFNAVAAAHPDITTDFNFVDAITMWFVKNPEWFDVVVTPNMFGDIITDLGAMIQGGLGLAPGGNINPKGTSMFEPIHGSAPKYKGQNKVNPIATIWAGAMLIEQLGEKEAADTIVNAIQKNILEGKVKTYDMGGKNTTSDVGDDIARIVKGE

SEQ ID NO: 6296 - protein, 310 aa, Glycine max
  unsure (1)..(310): unsure at all Xaa locations
MSTPALSGGTGLFSGFTRLCKGLAVVLVCGHIAVQFIPSAVNYLALIPARTIPFAWNLITAGYVEQSIYGVVVSTLSLLFIGKLLEPIWGSREFFKFIFVVNLLTSVCLFITAIALYYITRLETYLYMPLSGFHGSCIWCXLVGIKQIIPDQKLNLKVIXSEDFAYLSLFLAFLLPLIFPTAAGYSIMXAKITGTYISWXYLRYWQRKPRNSKHRCNLSEDFAFSTFFPEFLRPVIDPIASIFHRMLCGRYDASNDGQGNSLESEPLPGSDSIEASRRRERGARALEERLAAERLAVARRELQREAEENV

SEQ ID NO: 6297 - protein, 506 aa, Candida tropicalis
MIEQVLHYWYYVLPAFIIHWIVSAIHTNSLRRKLGAKPFTHTQLDGFYGFKFGRDFLKAKRIGRQVDLINSRFPDDIDTFSSYTFGNHVIFTRDPENIKALLATQFNDFSLGGRIKFFKPLLGYGIFTLDGEGWKHSRAMLRPQFAREQLPMSPSLEPHFNVKAYPQEQRWVFDIQELFFRFTVDSATEFLFGESVNSLKSASIGCDEETELEERKKFAEAFNKAQEYISTRVALQQLYWFVNNSEFKECNEIVHKFTNYYVQKALDATPEELEKQSGYVFLYELVKQTRDPNVLRDHHSISLLAGRDTTAGLLSFAVFELARNPHIWAKLREDVESQFGLGEESRIEEITFESLKRCEYLKAVMNETLRLHPSVPRNARFALKDTTLPRGGGPDGKDPILVRKMSCSIFISGTQIDPKHYGKDAKLFRPERWFESSTRNLGWAYLPFNGGPRICLGQQFALTEAGYILVRLAQSFDTLELKPDTEYLTKISHLTMCLFGAFVKMD

SEQ ID NO: 6298 - protein, 563 aa, Clostridium acetobutylicum
MSKVIYKISIDLGGIVKRNFEKETKNCGKVNEEVLFKILKSNDKSEIGIKFKFKDIKSIRQFKDSVPITEYKDYEKYINRMADGEGNVLMSEKVEYFGHTSGTTGKQKLVPCTKNSRRRASKYMALLVNRFCYDNFKENWNYARGMMIADIVMTTYTKGKIPICSATSGGMKGIKHLLPYLYTSPIEVMEIKDKETALYLHLLFGLEEEELLYISGVFISNILDLFRTLEKNNKALVRDIQKGSISEELNIDEGLRKVLNKKLKPNNKRAMELEKEFKKGFKGIAKRIWPNLLYIASVTGANFSIYNDKVYYYIDSIPIYSAAYGSTEAMIGINPYASKVLYVITPSAVFYEFIPIGEKGEESFDTLLLSELKLGGRYEVVITNYAGLYRYKIGDVVKVVGFYNKCPEIEFLYRKNQVLNMAAEKTNEEHLTYAIKNTIKKLNLDLVDYTTEPDNSITPGRYIFYFEFRNNMYGFSTEKLQNILDDELRVSNLAYNRARNNKKLGMLKVEVLAPNTFDLIKEALFNKGISKNQIKIPRVIINNKIVMDIINRNKIKFVKKSVI

SEQ ID NO: 6299 - protein, 249 aa, Triticum aestivum
MSAMPLPPPPPADGPAALPPPPGTDMTGICFRDQLWLNTYPLDRNLVFDYFALSPFYDITCNNESLRSRQIHPLDMSQLTKMTGLEYVLSEVMEPHLFVMRKQKRTNSEKSDALLAYYILDGSIYQAPLLGSVFASRISRAMHHISKAFSTACSKLEKIGNAETEADAAASESKAQKETIDLKELKRVDHILMSLQRKLPPAPPPPPFPDGYVPSEQEKGPDDLLASEALPPAIDPIIDQGPAKRPRFQ

SEQ ID NO: 6300 - protein, 453 aa, Pseudomonas putida KT2440
MQDQSTPERLQRGLKNRHIQLIALGGAIGTGLFLGIAQTIQLAGPSVLLGYAIAGLMAFLIMRQLGEMVVEEPVAGSFSHFAHQYWSEFAGFVSGWNYWVVYVLVGMAELTAVGIYVQYWWPDFPTWATAAIFFVVINLINLTQVKVYGEMEFWFALVKVVAIVSMIGFGAWLLGSGHGGPDASVANLWQYGGFFPNGVTGLVMALAVIMFSFGGLELVGITAAEADNPRESIPKATNQVVYRILIFYIGALAVLLSLYPWQKVVQGGSPFVMIFHELDSDLVATILNIVVLTAALSVYNSCVYANSRMLFGLASQGDAPRQLLKVSRSGVPLTALAVSAFATGLCVLINYLMPGGAFGLLMALAVSALVINWASISITHLKFRKAKLAAGITPFYKSLGHPLTNYLCLAFIVLILVVMYLTPPIRISVMLIPAWIAVLWVAFKLKKARQAKG

SEQ ID NO: 6301 - protein, 414 aa, Triticum aestivum
MAFDAFTDKTAVFRRLKAKPENKMCFDCNAKNPTWASVTYGIFLCLDCSAFHRSLGVHITFVRSTNLDSWTPDQLKMMAFGGNNRAHAFFKQHGWTEGSGKVDSKYTSRAAELYRQILQKEVAKSSTVNVLPSSPVAASQPPNPTDDFPDFKLADAPEETTNGKHEPVVANPPREPAQAPKAPTHPTYVSSVKKPLGAKKLGAKTGGLGVKKLTTKSNESLYDQKPEEPKPALPTMTTTTSAAKSGPSSHSRFQYMENEPSTESKTGGGNKTGHVAAPKTSDFFHEYGMDNGFQRKTSTAASKTQIEETDEARKKFSNAKAISSSQYFGNTDREQKEAQLSLQKFSGSSSISSADLFGRDTNDSDLDASAADLINRISFQASQDLSSLKNMAGETGKKLTSFASNFITDLDRIL

SEQ ID NO: 6302 - protein, 478 aa, Candida albicans
MYQELPFDELKVDPRKRRVAYFYDQDVGNYFYGTGHCMKPHRIRMAHSLIMNYELYKKMEIYRAQPATNLELTQFHTDEYIDFIDRVTPDNLHIIEREQVIFNVGDDCPVFDGLGEFCKISCGGSMEGAARLNRGQADIAINYAGGLHHAKKSEASGFCYTNDIVLGIIELLRYHPRVLYIDTDVHHGDGVEEAFYTNDRVMTCSFHKFGEFFPGTGNLTDIGIGKGKYHAINIPLRDGIDDASYKSIFEPIITKIMEWYQPSAIVLQCGGDSLSGDRLGPFNLSMRGHANCVNFVRSLGVPMMVLGGGGYTIRNVARTWALETGVCNGEILPKELPYNGYYEYYAPTYELDVRSANMTNANSKEYLDKILTQVISNLDNTKHTPSVQMNEVPLDMEDLGDVDEDMPDAIDTKGGSQFAKDKLVQADGEFYDDDEKDKGEKNIQENGNVNTNANGNGNGNVIITEEEQAELDKLNNNV

SEQ ID NO: 6303 - protein, 1112 aa, Lycopersicon pimpinellifolium
MMMVSRKVVSSLQFFTLFYLFTVAFASTEEATALLKWKATFKNQNNSFLASWIPSSNACKDWYGVVCFNGRVNTLNITNASVIGTLYAFPFSSLPSLENLDLSKNNIYGTIPPEIGNLTNLVYLDLNNNQISGTIPPQIGLLAKLQIIRIFHNQLNGFIPKEIGYLRSLTKLSLGINFLSGSIPASVGNLNNLSFLYLYNNQLSGSIPEEISYLRSLTELDLSDNALNGSIPASLGNMNNLSFLFLYGNQLSGSIPEEICYLRSLTYLDLSENALNGSIPASLGNLNNLSFLFLYGNQLSGSIPEEIGYLRSLNVLGLSENALNGSIPASLGNLKNLSRLNLVNNQLSGSIPASLGNLNNLSMLYLYNNQLSGSIPASLGNLNNLSMLYLYNNQLSGSIPASLGNLNNLSRLYLYNNQLSGSIPEEIGYLSSLTYLDLSNNSINGFIPASFGNMSNLAFLFLYENQLASSVPEEIGYLRSLNVLDLSENALNGSIPASFGNLNNLSRLNLVNNQLSGSIPEEIGYLRSLNVLDLSENALNGSIPASFGNLNNLSRLNLVNNQLSGSIPEEIGYLRSLNDLGLSENALNGSIPASLGNLNNLSMLYLYNNQLSGSIPEEIGYLSSLTYLSLGNNSLNGLIPASFGNMRNLQALILNDNNLIGEIPSSVCNLTSLEVLYMPRNNLKGKVPQCLGNISNLQVLSMSSNSFSGELPSSISNLTSLQILDFGRNNLEGAIPQCFGNISSLEVFDMQNNKLSGTLPTNFSIGCSLISLNLHGNELEDEIPRSLDNCKKLQVLDLGDNQLNDTFPMWLGTLPELRVLRLTSNKLHGPIRSSRAEIMFPDLRIIDLSRNAFSQDLPTSLFEHLKGMRTVDKTMEEPSYESYYDDSVVVVTKGLELEIVRILSLYTVIDLSSNKFEGHIPSVLGDLIAIRILNVSHNALQGYIPSSLGSLSILESLDLSFNQLSGEIPQQLASLTFLEFLNLSHNYLQGCIPQGPQFRTFESNSYEGNDGLRGYPVSKGCGKDPVSEKNYTVSALEDQESNSEFFNDFWKAALMGYGSGLCIGISIIYILISTGNLRWLARIIEELEHKIIMQRRKKQRGQRNYRRRNNRF

SEQ ID NO: 6304 - protein, 176 aa, Neurospora crassa
MPPRHQTLPPAQTSSAREALQSFYCQLCQKGYSRMNDYEAHLSSYDHSHKQRLKDMKQMVRDPQAAARARRQEQKNEGVISIKLGEAAAGGAGAAGGGGGGFKKGGFKKSGFKSAFVPVGENKLATSETAAPAPGTSGDTAPDGQPGIKRAPRSELVESDTEDEGYEVYDPRKPTD

SEQ ID NO: 6305 - protein, 169 aa, Nostoc sp. PCC 7120
MTTIETSRLLLRPLKLTDLEDLAQIYSNPEVMKYRLFPKPTSLLETQAFLESYIAHWQRYGFGRWATIYKANEQLIGHCGLEHIEFLNKVEVNYLLASQYWGQGLATESAIAVVNYGFEVQQFERLVALAKPDNLASLRVMEKIGMSYQTKIRLHNVEWVLYEIERQLH

SEQ ID NO: 6306 - protein, 341 aa, Actinoplanes sp. 50/110
MKILVTGGAGFIGSHFVTSLISGDIATPQPVTQVTVVDKLGYGGNLRNLAEASADPRFSFVRGDICDEGLIEGLMARHDTVAHFAAETHVDRSVVASGPFVASNLVGTQVLLDAALRHHIGRFLHVSTDEVYGSIDTGSWAEGHPLAPNSPYAASKAGSDLLALAYHQTHGMDVVVTRCSNNYGPRQFPEKMIPLFVTRLLDGLDVPVYGDGRNIRDWLHVSDHCRGLALALGAGRAGEVYHIGGGWEATNLELTEILLEACGARRSRISFVTDRKGHDRRYSLDYSKIAGELGYRPRVDFTDGIAETVAWYRANRSWWTDGNRWADGRRSLPAIGVRGPS

SEQ ID NO: 6307 - protein, 308 aa, Listeria monocytogenes
GSITQPTAINVIFPDPALANAIKIAAGKSNVTDTVTQADLDGITTLSAFGTGVTTIEGVQYLNNLIGLELKDNQITDLAPLKNLTKITELELSGNPLKNVSAIAGLQSIKTLDLTSTQITDVTPLAGLSNLQVLYLDLNQITNISPLAGLTNLQYLSIGNAQVSDLTPLANLSKLTTLKADDNKISDISPLASLPNLIEVHLKNNQISDVSPLANTSNLFIVTLTNQTITNQPVFYNNNLVVPNVVKGPSGAPIAPATISDNGTYASPNLTWNLTSFINNVSYTFNQSVTFKNTTVPFSGTVTQPLTE

SEQ ID NO: 6308 - protein, 536 aa, Glycine max
  unsure (1)..(536): unsure at all Xaa locations
MGSIPDPGELSELTQPSFDEFQRQTSLMTSCTLLWKELSDHFSSLEQDLNHKSEALKRKIHTLDNSTSDSLRLLDHRETSLDATLQIALRTLDTRRTAALSALLHDADDTSPDGEVDDTAGLVLKLKSFCLRMDAFGFFAFVSAKKKELDGLRAEMPVALAECVDPAKFVLEAISEVFPVXKRGEKAGHDLGWACVLVLESLIPVVVDPVIGKSRLLVTPTVKEHATEIAETWKSSLEDRGGVENLKTPDVHTFLQHVVTFGIVKNDDSDLYRKLVIASAWRKQMPKLALSLGLAQQMPDMIEELISKGQQLDAVHFTYEVGLVEKFPPVPLLKSFLKDAKKVAASILEDPNNAGRAAYLAARKEQSALRAVIKCIEEYKLEDEFPPENLKKRLDQLEKVKTEKRKPVAVPANKRTRASNGNGGPMPPAXKAGRLTNAYVSSFPAAPTFVRSPSHGQYPAALPPYPSPPHMYGSRSPPANPYAAYSPEPAPAIAGSYPAAPMNYPHAYGGYGNVLAPTYAAGLLPIEMTTFEDGNH

SEQ ID NO: 6309 - protein, 636 aa, Vigna radiata
MMESCDCIDTQYPPDELLVKYQYISDVLIALAYFSIPVELIYFVQKSAFFPYRWVLMQFGAFIVLCGATHFINLWTFSPHSKAVAVVMTIAKVSCAIVSCATALMLVHIIPDLLSVKTRELFLKNKAEELDREMGLILTQEETGRHVRMLTHEIRSTLDRHTILKTTLVELGRTLGLEECALWMPSRNGLNLQLSHTLTYHVQVGSTVQTNNPIVNEVFNSPRAMRIPPTCPLARIRPLVGRYVPPEVVAVRVPLLNLSNFQINDWPDISAKNYAIMVLILPTDSVRRWRDHELELVDVVADQVAVALSHAAILEESMRARDQLMEQNVALDLARREAEMAIHARNDFLAVMNHEMRTPMHAIIALSSLLLETELTPEQRVMIETVLKSSNVLATLINDVLDLSRLEDGSLELEMGKFNLHGVLGEIVELIKPIASVKKLPITLILAPDLPTHAIGDEKRLTQTLLNVVGNAVKFTKEGYVSIRASVAKPESLQDWRPPEFYPTSSDGHFYIRVQVKDSGCGIPPQDIPHLFTKFAQSRSGPARPSSGAGLGLAICKRFVNLMGGHIWIESEGPGKGSTATFIVKLGICGNPDPSDHQATTRSQAYSGSGGLARFKPFIKDEDDSGFSTRRNQRSF

SEQ ID NO: 6310 - protein, 408 aa, Oryza sativa
  unsure (1)..(408): unsure at all Xaa locations
MASGAGELCYKRAPMASLTPPRPPFPLSPTHTPRSTAILPPPPPPSPSPRTPTATVSSSEVRKALDLSDFERLQGKVFSKPSSSSSSSGSPTCSSTVSWLGCLQRARDPGXLLDPGLPDLLFFXXSSSLCSSVRLVAKRGSFSTPHLLDLPPKSHLPTSPFSFPHAFAYGGGLAQQPELSPAQMHYIQARLHLQRQAAXXAGPLGPRAQPMKASSSSASAAGAAATPPGPQKLYRGVRQRHWGKWVAEIRLPRNRTRLWLGTFDTAEEAALAYDQAAYRLRGDAARLNFPDNAASRGPLHASVDAKLQTLCQNIAAAKNAKKSSVSASAAATSSAPTSNCSSPSSDDASSCLESADSSPSLSPSSAATTAETPATVPDSEAPWDEAAAFALTKYPSYEIDWDSLLAAN

SEQ ID NO: 6311 - protein, 376 aa, Gnetum gnemon
LFEHFLHPYPKDADKHYLARQTGLTRNQVSNWFINARVRLWKPMVEEMYMEEIKEAESQASAADSKATAENEQNKKETEPSNARNADNVGQDDKTLKGMNGGGGVYLNQTDTPTANLKTNHASLSNGVPPLSMVNLSESTLYHHPHVEDGDDDLRQVQNKKIRNLIHRESSAILPTTTTMATPDMGLRAEEHDHEYILGGASSSSSKFATADGKHVGEDYSFAGNKIIPLDDVTGDFGSYQIDGLSRYGQEPYTHQHHHHHHHHKFGGIGGVSLTLGLQHCDDLSLSAAAAAAQHPYAGNQLPRRSDLGIESSSQFHPHQHIHSTSDVGSAATTPNYDTLNLHNQKRFATHLLHDLCGLSLTQKKGKRKRQQLCTL

SEQ ID NO: 6312 - protein, 261 aa, Streptomyces murayamaensis
MTENTARVALVTGATSGIGLSVARLLGSQGHKVFIGARNADNVAETVKQLQGEGLEADGSALDVTDAASVKAFVQAAVDRFGTVDVLVNNAGRSGGGVTADIEDELWDAVIDTNLNSVFRVTREVLNTGGMRHKDRGRIINIASTAGKQGVVLGAPYSASKHGVVGFTKALGNELAPTGITVNAVCPGYVETPMAQRVRQGYAAAYSTSEDAILEKFQSKIPLGRYSTPDEVAGLVGYLASDTAASITAQALNVCGGLGNF

SEQ ID NO: 6313 - protein, 361 aa, Carica papaya
MATMSSISKIIFLATCLIIHMGLSSADFYTVGYSQDDLTSIERLIQLFDSWMLKHNKIYESIDEKIYRFEIFRDNLMYIDETNKKNNSYWLGLNGFADLSNDEFKKKYVGFVAEDFTGLEHFDNEDFTYKHVTNYPQSIDWRAKGAVTPVKNQGACGSCWAFSTIATVEGINKIVTGNLLELSEQELVDCDKHSYGCKGGYQTTSLQYVANNGVHTSKVYPCQAKQYKCRATDKPGPKVKITGYKRVPSNCETSFLGALANQPLSFLVEAGGKPFQLYKSGVFDGPCGTKLDHAVTAVGYGTSDGKNYIIIKNSWGPNWGEKGYMRLKRQSGNSQGTCGVYKSSYYPFKGFAKDLGFHTYI

SEQ ID NO: 6314 - protein, 329 aa, Streptomyces glaucescens
MATRLLVTGGAGFIGSHYVRTLLGPDGPPDAVVTVLDALSYAGNLANLDPVRDHPPVRFVHGDICDADLVRVMAGQDQVVHLAAESHVDRSLLDAAAFVRTNAGGTQTLLDAALRHGVAPFVQVSTDEVYGSLETGSWTEDEAVRPNSPYAASKASGDLLALAMHVSHGLDVRITRCSNNYGPYQFPEKLVPRFVTLLLEGRKVPLYGDGLHVRDWLHVDDHVRGIEAVRARGRAGRVYNIGGGTSLANRDLVDLLLKACGAGWDRVEHVPDRKGHDRRYSVDASRIRRELGHVPATDLSTGLAATVAWYRDNRAWWEPLCAGRAPQTA

SEQ ID NO: 6315 - protein, 135 aa, Zea mays
MAGIGPITQDWEPVVIRKKPANAAAKRDEKTVNAARRSGADIETVRKFNAGTNKAASSGTSLNTKMLDDDTENLTHERVPTELKKAIMQARTDKKLTQSQLAQIINEKPQVIQEYESGKAIPNQQILSKLERALG

SEQ ID NO: 6316 - protein, 197 aa, Zea mays
MSVPEAGQSAGRDEQEMDNYEQHQTRVLMALMQGLCAARYRKADNTPCLVDQGLYLGSVGAALNNEALKSLNITHILVVARSLNPAFPAEFTYKKIEVLDSPDTDLGKHFGECFTFIDEGICTGGNVLVHCFAGRSRSVTVVLAYLMKKHQMSLQSAMSLVRSKRPQIAPNAGFISQLVNFEKSLQVEQGQRTLQSN

SEQ ID NO: 6317 - protein, 411 aa, Oryza sativa (japonica cultivar-group)
MHSKLEFFKDESTDHPSKLRIRNEIRLSKRGRVVTDTRTRTREGDAVTGRAAPPPPAAAAAAAAAVREEGTHHHRHRHARHATKRGGGVRRRRSERRRNRKKGGGGEGEELEELEEEEISFLFPLDGAGGGEEGRLLRASELCGIIELPHWVRKKRTRRKSDGPDSIAETIKWWKEQNQKLQEENSSRKAPAKGSKKGCMAGKGGPENSNCAYRGVRQRTWGKWVAEIREPNRGRRLWLGSFPTALEAAHAYDEAARAMYGPTARVNFADNSTDANSGCTSAPSLMMSNGPATIPSDEKDELESPPFIVANGPAVLYQPDKKDVLERVVPEVQDVKTEGSNGLKRVCQERKNMEVCESEGIVLHKEVNISYDYFNVHEVVEMIIVELSADQKTEVHEEYQEGDDGFSLFSY

SEQ ID NO: 6318 - protein, 205 aa, Oryza sativa
  unsure (1)..(205): unsure at all Xaa locations
XLVDGGGRKVSPWHDVPLRAGDGVFHFVVEIPKESSAKMEVATDESFTPIKQDTKKGNLRYYPYNINWNYGLFPQTWEDPTLANTDVEGAFGDNDPVDVVEIGERRANIGDVLKVKPLAALAMIDEGELDWKIVAISLDDPKASLVNDVDDVEKHFPGTLTAIRDWFRDYKIPDGXYALKVIEETNESWEKLVKRNIPAGELSLA

SEQ ID NO: 6319 - protein, 272 aa, Oryza sativa (indica cultivar-group)
MGRRACCAKEGMKRGAWTSKEDDVLASYIKSHGEGKWREVPQRAGLRRCGKSCRLRWLNYLRPNIKRGNIDDDEEELIVRLHTLLGNRWSLIAGRLPGRTDNEIKNYWNSTLSRKIGTAATAAAGSRGGSTPDTARATDAASSSSVVPPGQQQQPASRADTDTATAAAAAAATTTTVWAPKAVRCTRGFFFHDRETAPLAAAAPAPAGELGDGDDVDCDYYCSGSSSAATTTSSSSLPAVVEPCFSAGDDWMDDVRALASFLDTDDAWNLCA

SEQ ID NO: 6320 - protein, 182 aa, Oryza sativa (japonica cultivar-group)
MATGNGEAAVVEKEGEGTMVPEALEKKVVLDAAEKEEEEKDSEAEAEAEARISKLVGDMIDNVCADHGIPLPKVDIKTVRKMAEYMNKHFAITNKEELKIWDEGFINELDGDEDKYSLFKIIRASERVGFYGLLDLASDMVARKIKAGKAIDEIRKFLGVEKDFTKEEEEKIRRENAWAFEE

SEQ ID NO: 6321 - protein, 218 aa, Triticum aestivum
  unsure (1)..(218): unsure at all Xaa locations
MVSLKLQKRLASSVLKCGKGKVWLDPNEVNEISMANSRQNIRKLVKDGFIIRNPQKIHSRSRARRAHEAKQKGRHSGCVFVIXLGKRRGTREARLPTKILWMRRMRVLRRLLRKYREAKKIDKHMYHDMYLKVKGNMFKNKLVLMESIRKSKGEKAREKTLSDQFEAKRVSXAKSKASRERKIARREERLAQGPRDHSAPAAAAAPAQPAATPKKAKK

SEQ ID NO: 6322 - protein, 343 aa, Artemisia annua
MSSIDLKSKFLKVYDTLKSELINDPAFEFDDDSRQWIEKMLDYNVPGGKLNRGLSVVDSYQLLKGGELSDDEIFLSSALGWCIEWLQAYFLVLDDIMDESHTRRGQPCWFRLLKVGMIAANDGILLRNHVPRILKKHFRGKPYYVDLVDLFNEVEFQTASGQMIDLITTLVGEKDLSKYSLSIHRRIVQYKTAYYSFYLPVACALLMFGEDLDKHVEVKNMLVEMGTYFQVQDDYLDCFGAPEVIGKIGTDIEDFKCSWLVVKALELANEEQKKVLHENYGKKDPASVAKVKEVYHTLNLQAVFEDYEATSYKKLITSIENRPSKAVQAVLKSFLGKIYKRQK

SEQ ID NO: 6323 - protein, 255 aa, Halobacterium sp. NRC-1
MLLSVPGWYQVVMFNPNNGSEFARNRARLDDTPNPYEPEVGSLPEGDRSQAGSDTVNKTGTTIVGLTTQDGVLMASDMRASLGGRVISNKNVQKVEEIQPNAALSISGSVGGAQSFIRSLRAEANLYEARRGEYMSIDALSTMASNLLRGGPFFRVVPILGGVDDDGGHVFSLDPAGSSMSDTYTAQGSGMPYALGVLEQEYSEDLTMADAEQVAAHAVKSASERDTASGNGIHITKITHDGLTTVGHKEFDALL

SEQ ID NO: 6324 - protein, 373 aa, Saccharomyces cerevisiae
MTVNDKKRLAIIGGGPGGLAAARVFSQSLPNFEIEIFVKDYDIGGVWHYPEQKSDGRVMYDHLETNISKKLMQFSGFPFEENVPLYPSRRNIWEYLKAYYKTFIANKDAISIHFSTEVTYLKKKNSQWEITSKDELRTTKSDFDFVIVASGHYSVPKLPTNIAGLDLWFDNKGAFHSKDFKNCEFAREKVVIVVGNGSSGQDIANQLTTVAKKVYNSIKEPASNQLKAKLIETVQTIDSADWKNRSVTLSDGRVLQNIDYIIFATGYYYSFPFIEPSVRLEVLGEGVTGDKHSSVNLHNLWEHMIYVKDPTLSFILTPQLVIPFPLSELQAAIMVEVFCKSLPITTTFDSNACGTHNFPKERTWNTMQNYRNY

SEQ ID NO: 6325 - protein, 207 aa, Glycine max
FGSRAMCEPLSVGVHACRRANIGPETYVLIMGAGPIGLVTMLAARAFGAPRTVIVDVDDYRLSVAKSLGADDIVKVSTNIQDVAEEVVQIQKVMGADIDVTFDCAGFDKTMSTALSATQPGGKVCLVGMGHSEMTVPLTPAAAREVDVLGVFRYMNTWPLCLEFLRSGKIDVKPLITHRFGFSQKEVEEAFETSARGGNAIKVMFNL

SEQ ID NO: 6326 - protein, 208 aa, Zea mays
  unsure (1)..(208): unsure at all Xaa locations
MVSLKLQKRLAASYLKCGKGKVWLDPNEVSEISMANSRQNIRKLVKDGFIIKKPHKIHSRSRARRAHDAKQKGRHSGYGKRRGTREARXLPTKVLWMRRMRVLRRLLRKYREAKKIDKHMYHDMYMKVKGNAFKNKRVLMESIHKSKAEKAREKTLSDQFEAKRAKSKASRERKIARREERLAQGPREITPPVSSTAPATGAPKKAKK

SEQ ID NO: 6327 - protein, 394 aa, Methanosarcina barkeri
MSMTIGLAGKPNAGKSTFFKAATLADVEIANYPFTTINANHGVTYVRVECPCKEKEKRCGKCVDGVRLVPIDIIDVAGLVPDAYKGRGLGNTFLDELRQAQAIIHVVDASGGTDAEGNPVDIGDHDPLEDVAFLNREITMWLYGILERNWVKLARKIQAEGLKLEVVIAEQLAGAGIRESHVNAALIKTGLSRLDHVKWSEEDMIRLCDTMREISKPLLIAANKADIASRENLDRLKDLDRIVVPASAAAELALKSAAKNGLIKYSPGDRKFEVLGGDLTKAQKKGLEAIHKVIERLGSTGVQECINRTVFELLDLIVVYPVEDEGKWSDKSGNILPDAYLMKRGSTCHDLAYQIHTEIGDRFLYAVDARTRLRLGEKHELKNGDVIKIVSTAK

SEQ ID NO: 6328 - protein, 1128 aa, Oryza sativa (japonica cultivar-group)
MSSSRPTQCSSSSSRTRQSSRARILAQTTLDAELNAEYEEYGDSFDYSKLVEAQRTTGPEQQARSEKVIAYLHHIQRAKLIQPFGCLLALDEKTFNVIALSENAPEMLTTVSHAVPSVDDPPKLRIGTNVWSLFTDPGATALQKALGFADVSLLNPILVQCKTSGKPFYAIVHRATGCLVVDFEPVKPTEFPATAAGALQSYKLAAKAISKIQSLPGGSMEVLCNTVVKELFDLTGYDRVMAYKFHEDDHGEVFAEITKPGLEPYLGLHYPATDIPQAARFLFMKNKVRMICDCRARSIKIIEDESLHLDISLCGSTLRAPHSCHLQYMENMNSIASLVMAVVVNENEDDDEVGADQPAQQQKRKKLWGLLVCHHESPRYVPFPLRYACEFLAQVFAVHVNKEFELERQVREKSILRMQTMLSDMLLRESSPLSIVSGTPNIMDLVKCDGAALLYGGKVWRLQNAPTESQIRDIAFWLSDVHRDSTGLSTDSLHDAGYPGAAALGDMICGMAVAKINSKDILFWFRSHTAAEIRWGGAKHDPSDKDDSRRMHPRLSFKAFLEVVKMKSLPWNDYEMDAIHSLQLILRGTLNDDIKPTRAASLDNQVGDLKLDGLAELQAVTSEMVRLMETATVPILAVDSNGLVNGWNQKVAELTGLRVDEAIGRHILTVVEESSVPVVQRMLYLALQGKEEKEVKFEVKTHGSKRDDGPVILVVNACASRDLHDHVVGVCFVAQDMTVHKLVMDKFTRVEGDYKAIIHNPSPLIPPIFGADEFGWCSEWNAAMTKLTGWHRDEVINKMLLGEVFDSTNASCLVKNKDAFVSLCILINSALAGDETEKAPFSFFDRNGKYIECLLSVNRKVNADGVITGVFCFIQVPSHELQHALHVQQASQQNALTKLKAYSYMRHAINNPLSGMLYSRKALKNTGLNEEQMKEVNVADSCHRQLNKILSDLDQDSVMNKSSCLDLEMVEFVLQDVFVAAVSQVLITCQGKGIRVSCNLPERYMKQTVYGDGVRLQQILSDFLFVSVKFSPVGGSVEISCSLTKNSIGENLHLIDLELRIKHQGKGVPADLLSQMYEDDNKEQSDEGMSLAVSRNLLRLMNGDVRHMREAGMSTFILSVELASAPAK

SEQ ID NO: 6329 - protein, 218 aa, Picea mariana
KIEIKRIENTTNRQVTFCKRRNGLLKKAYELSVLCDAEVALIVFSSRGRLYEFANHSVKRTIERYKKTCVDNNHGGAISESNSQYWQQEAGKLRQQIEILQNANRHLMGDGLTALNIKELKQLEVRLEKGIGRVRSKKNEMLLEEIDIMQRREHILIQENEILRSKIAECQNSHNTNMLSAPEYDALPAFDSRNFLHANLIDAAHHYAHQEQTTLQLG

SEQ ID NO: 6330 - protein, 290 aa, Solanum berthaultii
LNSSYRVPFESFRVPFVDLQEATNNFDEKFHIGLGGFGKVYRGVLRDGTKVALKRCKRESSQGIEEFQTEIEILSFCSHPHLVSLIGYCDERNEMILVYDYIENGNLRSHLYGSDLPSMSWEQRLEICIGAARGLHYLHTSAVIHRDVKSINMLLDENFVAKITDFGLSKKGTELDQTHLSTLVQGTIGYLDPEYFIRGQLTEKSDVYSFGVVLFEVLCARPAIVQSLPREMVNLAEWAVDSHNKGQLEQIIDLNLAAKIRPESLRKFGETAVKCLALSSGDRPSMGDVL

SEQ ID NO: 6331 - protein, 579 aa, Brassica napus
MNNNWLGFSLSPYEQNHHRKDVCSSTTTTAVDVAGEYCYDPTAASDESSAIQTSFPSPFGVVLDAFTRDNNSHSRDWDINGSACNNIHNDEQDGPKLENFLGRTTTIYNTNENVGDIDGSGCYGGGDGGGGSLGLSMIKTWLRNQPVDNVDNQENGNGAKGLSLSMNSSTSCDNNNYSSNNLVAQGKTIDDSVEATPKKTIESFGQRTSIYRGVTRHRWTGRYEAHLWDNSCKREGQTRKGRQVYLGGYDKEEKAARAYDLAALKYWGTTTTTNFPMSEYEKEIEEMKHMTRQEYVASLRRKSSGFSRGASIYRGVTRHHQHGRWQARIGRVAGNKDLYLGTFGTQEEAAEAYDIAAIKFRGLTAVTNFDMNRYNVKAILESPSLPIGSAAKRLKEANRPVPSMMMISNNVSESENNASGWQNAAVQHHQGVDLSLLQQHQERYNGYYYNGGNLSSESARACFKQEDDQHHFLSNTQSLMTNIDHQSSVSDDSVTVCGNVVGYGGYQGFAAPVNCDAYAASEFDYNARNHYYFAQQQQTQHSPGGDFPAAMTNNVGSNMYYHGEGGGEVAPTFTVWNDN

SEQ ID NO: 6332 - protein, 522 aa, Candida tropicalis
MSIQDIVETYSTKWYVVVLVALIVYKVFDFFYARYLMYKLGAKPFLQSQTDGYLGFRVPFELMGKKSEGTLIDFTYQRTLELDNPDIPTFTFPIFSVLIISTLEPDNIKAILATQFNDFSLGTRHSHFAPLLGDGIFTLDGAGWKHSRSMLRPQFAREQVSHVKLLEPHMQVFFKHIRKHHGQTFDIQELFFRLTVDSATEFLFGESVESLRDESIGMLNDALDFDGKAGFADAFNYSQNYLASRALMQQMYWILNGKKFKECNAKVHKFADYYVEKALELTPDQLEKQDGYVFLYELVKQTRDRQVLRDQLLNILVAGRDTTAGLLSFVFFELARTPRVANKLREEIEDKFGLGQDARVEEISFESLKSCEYLKAVLNECLRLYPSVPQNFRVATRNTTLPRGGGKDGLSPVLVRKGQTVMYSVYAAHRNKQIYGEDALEFRPERWFEPETKKLGWAFLPFNGGPRICLGQQFALTEASYVTVRLLQEFSHLTMDPNTEYSPKKMSHLTMSLFDGANIQMY

SEQ ID NO: 6333 - protein, 1037 aa, Saccharomyces cerevisiae
MTVANTETHSAAKPSSTIGPWKLGETLGFGSTGKVQLAQHERTGHRTAVKVISKSIFNNNGNHSNDDSVLPYNIEREIVIMKLLSHPNVLSLYDVWETNNNLYLILEYAEKGELFNLLVDHGPLPEREAINCFRQIIIGISYCHALGIVHRDLKPENLLLDSFYNIKIADFGMAALQTDADLLETSCGSPHYAAPEIVSGLPYEGFASDVWSCGVILFALLTGRLPFDEENGNVRDLLLKVQKGQFEMPNDTEISRDAQDLIGKILVVDPRQRIKIRDILSHPLLKKYQTIKDSKSIKDLPRENTYLYPLADSNNHTSASIDDSILQNLVVLWHGRHADDIVSKLKENGTNKEKILYALLYRFKLDSVRGSNKKNRNKIKKTKKNKRSSTLSSSSSLLLNNRSIQSTPRRRTSKRHSREFSSSRKRSSFLLSSNPTDSSPIPLRSSKRITHINVASANTQATPSGVPNPHKRNSKKRSSKRLSYMPNTKRSSLTSKSLSNFTNLIDDDDWEYIEKDAKRTSSNFATLIDEIFEPEKFELAKREKAELQRKVQEAKRQSVNAQKINEDEFGSEVSDGMKELKKINDKVSSPLINYEFSQQELLQDIDTLLTNRYQLSSYTRPISRLDPGLTPVTETLPNNLKEKTALLQDTEKKIIETIRRSKFLGSLLNVRGGLSPGKSELAPIEESPIVSTTPLIYNDRMEPRRISDVEVPHFTRKSKHFTTANNRRSVLSLYAKDSIKDLNEFLIKEDPDLPPQGSTDNESRSEDPEIAESITDSRNIQYDEDDSKDGDNVNNDNILSDFPQGVGISQEYDMKDKNPNQSPISKSAEPTLVVKLPSLSSFQGKNASGLGLYQREPSKVTLPSLTSNNSSVGENIEDGAEKGTESEKIAASLSDDDLKEDNDKKDNDTVNAPTTVKKPPNSVLLKKFSKGKILELEIHAKIPEKRLYEGLHKLLEGWKQYGLKNLVFNITNMIITGKLVNDSILFLRSTLFEIMVLPNGDGRSLIKFNKKTGSTKTLTKLATEIQIILQKEGVLDK

SEQ ID NO: 6334 - protein, 142 aa, Zea mays; identical to SEQ ID NO: 790

SEQ ID NO: 6335 - protein, 363 aa, Oryza sativa; identical to SEQ ID NO: 2538

SEQ ID NO: 6336 - protein, 346 aa, Oryza sativa
  unsure (1)..(346): unsure at all Xaa locations
MAPSSTSSEGASDEWLPPSRRPELADVVPVTQDDGPHPVVAIAYRDEFREVMDYFRALYFAGERSVRALHLTAEVIDLNPGNYTVWHFRRLVLEALDADLREEMDFVDRIAECNPKNYQIWHHKRWLAEKLGPDIANKEHEFTRKILSMDAKNYHAWSHRQWVLQALGGWETELQYCNQLLEEDVFNNSAWNQRYLVITSSPLLGGLAAMRDSEVDYTVGAILANPQNESPWRYLKGLYKGENNLLMADERISDVCLKVLKHDSTCVFALSLLLDLLQIGLQPSDELKGTIEAIKNSDPEADEAVDADLATAICSILQRCDPLRINYWSWYRTTISSQTXSMQWPP

SEQ ID NO: 6337 - protein, 274 aa, Mycoplasma gallisepticum
MNHSKINWFPGHMKKTLDDINKIKKHIDLVIQVLDARAINLTSNPDLLEIFKQKKIINVALKSDLADLSYQYDPETIVTNIRDHQFSNFLLNKLHQILSDKIKRLQAKGLVTPHFNIMVIGLPNIGKSSLINKLIKKNHNKVENKAGVTKRQTFVKLNKNFTLYDTPGVLYKRIDDFILGAKLSLLNVINLEVIPMQEVLSFAYSYLNQHYHNQLLEWAKQEIIPEQFHEFIEQYAHKKGFLNKNNAIDLNATYMNFYQDISLAKIAKVNYEKN

SEQ ID NO: 6338 - protein, 629 aa, Oryza sativa (japonica cultivar-group)
MAAAAATSRLLRRHPPPLPLLLRSSISSSRPLLQQPELSPAAAADAAPATDAAPLPPKPSTGSPFYGENWRNPAAAANPSSSSLLPAVVGGGAHARAAAYSASPGAAELKETFAEWMAEQRWEEMKQLFEFWVRSLDPASGKPNRPDVDLFNHYLRAQLMSGALPIEMLDLAEQMREFEITPNTASHNLILKSMVQAQEADGAEKLIERMLQTGTQPDDESYNLVVNLLIKLNRVDSTLKYLDLMLKSGYTISSSVFVEYVRACVRSGRLDTLASVIEKCKATDQNKVLCPPWSWCVEIAEAAFEANNSKLGLFALEYLARWIARSERVIPPLHLSVDEGLVLSALSAAARTCSTDLLNAAWSILRKSLHQKRAPTPEAYLAKIYAHSSIGHLQRAFGTLREFENTYGNFEDIDSELFSPFTSLRPLVVACCKDGYTTLDSVYVQLENLSSADSPYKSVAALNCVILGCANIWDLERAYETFEAIKEKFGLTPDIHSYNALLHAFGKRKKTEEACNVFQHLVSLGVKPNATTYGLLVDTHLVNRDAKAALAVIAEMVDAGFTPSKETLKKVRRRCSRESDFDSDEKVQSLAKQFNYRMGGENRREMLFNIEYSAEFTSTPSPRYWANLF

SEQ ID NO: 6339 - protein, 432 aa, Tropheryma whipplei TW08/27
MSKIKLVTAIPGPESERLHRIRQATVARGVSSTFPIYIKESHGSILIDEDGNHLIDMGCGIGVTTLGHSHPAVVDAARAQINSVWHTLFSITPYESYVEVCKLLAKNTPGDFPKKSLLLNSGAEAVENAVKISRAYTGRPTVAVLDRSFHGRTNLTSSMTYRGSLYSSDFGPTASNIVSAPNSYPLHDRLSGKEAAARTISYLETRVAARNIACLFYEPIQGEGGVIVPADGFLPALQDWCRENDIVFVADEIQSGFGRTGCFFASETDGLEPDIVCSAKGIANGLPLSAVTGRSDIVDAARPGTLGGTFTGNHVSCAAALEVFEQYKDNAPLDSASRLGDILKELLLNLQSKHPQIAEVRGRGAMFGAEFSGNHAGEMVSRVITRAAELGVIFLSSGVEGNVVRFLPNVFMDKETIEEAIGVLDSAISSVV

SEQ ID NO: 6340 - protein, 180 aa, Azotobacter vinelandii
MYNKEMPMKKRLIAAMIASCALPLQAAPLSVALNAVGADGIGAALGTVSIEQSEYGLVFTPNLSGLQPGIHGFHIHASGDCGTTEKEGQKVAAGAAGGHWDPQNATRHGQPWGEGHLGDLPALYVDANGKATQPVLAPRLKDLEAIKGRALMVHAGGDNHADSPAPLGGGGARVACGVIK

SEQ ID NO: 6341 - protein, 486 aa, Chlamydophila caviae GPIC
MFLNRGKSKKNLGAIALAGMVISSMIGGGIFSLPQNMAASAGAGAIILAWLLTGIGMFFIANTFKILSLVRPDLTTGIYMYSREGFGPYVGFTIGWGYWLCQIFGNVGYAVMTMDALNYFFPPYFKGGNTIPAIIGGSILIWVFNFIVLKGIRQASFINIIGTVCKLVPLIVFIIITAFAFKLAIFKTDFWGDAVTKTQPALGSVTSQLKSTMLVTLWAFIGIEGAVVMSARAKSPSAVGKATLLGFVGCLTVYILLSILPFGSLFQYQLAGIPNPSTAGVLGMLVGRWGEILMNVGLLIAILSSWLSWTIIVAEIPYTAATNGTFPEIFAIENAQHSPKLSLYITSALMQITMLFVYFSTNAWNTMLSITGVMVLPAYLASAAFLFQFSKNKKYPNKGPVKSYIAKYTGFFAVIYSLWLIYAGGLNYLLMSVILLALGIPFYIDAGKKSKREKTFFAKKEVTKIIIIALLALLAIFLFSTEKIRL

SEQ ID NO: 6342 - protein, 194 aa, Magnetospirillum magnetotacticum
MSRLLPTNPLGSFVASVVAAIGLAGGVAWGATGDHLDWSSLPLPAIAGGQVPADAFKGKVVLVVNTASQCGFTPQYQGLEALWREYRGRGLVVLGVPSNDFGAQEPGSNPEVASFCEINYGVDFPLLEKQVVTGTGAHPFYRWAAERTGALGVPRWNFHKILVGRDGQLVDWFASTTAPDSARLRAAIDKALTP

SEQ ID NO: 6343 - protein, 214 aa, Paeonia lutea
IVESVGEGITDLKPGDHVLPVFTGECKECRHCKSEESNMCDLLRINTDRGVMLSDGKSRFSINGQPIFHFIGTSTFSEYTVVHVGCVAKINPEAPLDKVCVLSCGISTGLGATLNVAKPKKGSSVAIFGLGAVGLAAAEGARIAGASRIIGVDLNPKRFEEAKKFGVTEFVNPKDYDKPAQEVIAEMTDGGVDRSVGCTGSIMAMVSAFECVHD

SEQ ID NO: 6344 - protein, 559 aa, Pirellula sp.
MSPHPMTLLRRSMLRYKIGRLQRYLADAERARDIQRENLLHRIHQNADTAFGRDHGFSEIRTLEDFRRRVPIAGYEAARPYVDRVIQGETTALFPENTKVVMFATTSGTTDHPKMIPVTEDFYRQYKAGWQYWGTGVYRDYPHLLQMKSLQFSSHWNVTQTPSGAPCGNISGLAAETRPFYIGSLFVLPACVIQITEHLAKHYTALRLSLACDRVGKIVTANPSTLVEVAKFADTMKETLIRDIHDGTLTGDQPIPDAIRQQLRSRLRPNPRRARQLQQIVDRTGHLYPKDAWPDLTLLAVWTGGSVGLYLNQLPEYYGDAAIRDHGLSASEGRMTVPLQNGSPSGMLDYSSHHFEFIPESERDSKTPHVLEAWELTEGENYFIVLTTASGLYRYDIHDLVRCDGFCGQTPMLSFLNKGKNFCSFTGEKLSEHQVMQAMQQTLQSINAPSCTFTLAPTLGERPRYHLVLDDSSLPNLCERIGQELQNQLAQVNCEYADKCASGRIEPIQVTRVPAGTWEKLRASKTSKRGNFEEYKHPCLTNDPNFLQNLSKLDSASPS

SEQ ID NO: 6345 - protein, 293 aa, Nostoc sp. PCC 7120
MGLTDNYKLNLIQWYPGHIAKAEKNLKEQLSRVDVVFEVRDARIPLATHHPQIDEWVGNKARILVLNRLDMIPPQVRSLWIDYFQNRGEVPYCTNAQHGQGVVGVAKAAQAAGVELNQRRRDRGMLPRAVRAVVIGFPNVGKSALINRLLGKRVVESAARPGVTRQLRWVRISDQLELLDAPGVIPVKLGNQEAAVKLAICDDIGQASYDNQLVAAALIDLVNSLQEQAGELLPKSPLYTRYELDPTPHTGEGYLHALAEYRHKGDVERTARQLLTDYRKGLLGTLPLELPPM

SEQ ID NO: 6346 - protein, 505 aa, Neurospora crassa
MGIIHEKAHYVVAVALVAFLIRAFVLSQWNTIKRNGERLKKPPNTLPLVGNGLQFLQSRWKLFSWFDACQRKFGYETVAISVPTLPPGVLIHDPRNLDYVFKNEGIFTKGNFVKGRTWDLFGNGIINAEGDFWKTQRKAGLSFLNTANLRVLTDVALPQYLSESISQLRSSTNGTVVDLQHMAMHADDEFTVSFDYASGGTAERFQNPLWFVTEIFLGAELRKSIAVVKNFGRHIVTKAVQDRQEKEFGEEEGKLDQISGSLIQSLLDAIQDEQMVADAALTYLSAGRDTTGQALTWTFYLLMRHPRVVAKIREEATQLLKEKNVTLTPDQFDSSLFNPVTMPYSMAVFYEVLRLYPPIPFEIRQCNEDVTLPDGTFLPKSSILVWCLWAMQRSKLTWGDDADEFRPERFLDGNKLISRSPSEFPVFYGGPRTCLGRKMAEAIAAQVIPTMACLFDFVPTSDEERTSKTSLTLPMEGGLPVTVKTLTGEEREKLVRIPEIRFSEH

SEQ ID NO: 6347 - protein, 152 aa, Streptomyces coelicolor A3(2)
MQPSEPTARVVVGVDGSPSSYAALRWADRYARAVGGVVEAVHVWDTPSAVGFAGPAIDPDFDLEQARERFAAELEATFPGERPPGLKEILVEGDPSETLIRASQGAELLVVGRRGRGAFARAMLGSVSQRCAQHAACPVVVVRQETESDPVH

SEQ ID NO: 6348 - protein, 245 aa, Gymnosporia mossambicensis
ALSIAGAVQSQKLAVRAISQLQSLPGGDIKLLCDTVVESIRNLTGYDRVMVYKFHEDEHGEVVAESKRSDLEPYIGLHYPASDIPQASRFLFKQNRVRMIVDCHASPVRVIQDDGLMQPLCLVGSTLRAPHGCHAQYMENMGSLASLAMAVIINGNEEEAIGGRSPTRLWGLVVCHHTSARCIPFPLRYACEFLMQAFGLQLNMELQLAAQLLEKHVLKTQTLLCDMLLRDSPTGIVTQSPSIMD

SEQ ID NO: 6349 - protein, 352 aa, Myxococcus xanthus
MANMAQAIRMALHYAEEHLGVTDIFGEDVGAPLGGVFTCTQGLKTTWNSPLDERGIIGAAMGIAMAGGRPVAEIQFCDYVYNTIDLLKLAGNTSWSTFGDWNLPMVVRTPVGSGIRGSIYHSHSFDATMTHIAGWKVVMPSTPLDAYGLLITACQEKNPVMFLEPKALLRVKGEERIPGEPEDDRALSKLIDAPLGDRSQWKPQWPTGLEAYAVPFGKGKIVREGTQLTVVSYGRTLPLCTKAAETLAADGISAEVIDLRSLWPYDWELIKASVQKTGRVLFVNEDTEVTNFGEHLVRRTVEELFYSLLAPPRLLAGKFLPGIGLADALEMASVPQLGDITTAIRSLAGEQP

SEQ ID NO: 6350 - protein, 1092 aa, Adiantum capillus-veneris
MSTSSSMNDQRRDAYSLRAPPNEGKLHPLARDSRGSLEVFNPGNPSSLTAASIGAGMQYTPSWQQQQPPEDENYDLPLNQREKEENIYNQTHGGPERERGPDKGTSPSDHKRGMSTGTSPPTRSKYSEIFTSHDTIDKEGKFQAYQTNEESTHDWLSSTPAGQGPMLGGGFGGGEGARGSYLLGTREHPKARCDSLAERAAGWGLVLKTDGDSGRVDGVRTRTSEEEREFRRLSEERRSLNSSTVRTSDDSGFTSDTSNASRIPRVSKDVLQALEGFQQTFVIADGTKPDLPIMYASAGFFKMTGYTSSEVIGRNCRFLQGKETDPEEIDRIRECISKGSGYCGRLLNYKKDGSAFWNLLTISPIKDVDGSVLKYIGMQVEVSQFTEGTKENAMRPNGLSESLIKYDARQKERASFQVTELVEAIKDPKQVGDDKKTSISLGVVRPVAPSGPRKGPDLRELLTAQQYTPRSATSVQPKGSNLTEPGSHRESISKRNRSSGFFSFLGLDKLAGKGPGNQHDAAEFIEPEILMTKDEDSSEASFELDKARLKEIRRGIDLATTLERIEKNFVITDPRLPDNPIIFASDNFLELTEYSREEILGRNCRFLQGPDTNRETVKLIRDAIDNEKEVTVQLLNYTKTGRTFWNLFHLQPMRDHKGELQYFTGVQLDGTEYLEPLTKRLSQQIASEGAKIIRETAANVNEALRELPDANLKVEDLWRIHSRLVLPKPHKLNHDSWGVIRKIHASGEKVKLKHFRPLRPLGYGDTGSVHLVELRGTGKLFAMKAMEKNVMVKRNKVHRVCAEREILGMMDHPFLPTLYASFETQTHVCLITDFCAGGELFLLLERQPTKIFREETARFYTSEVVVALEYLHCQGVIYRDLKPENILLQQDGHVMLSDFDLSYLSSSNPRLVVPPRLHKKRSKRKNFPPPIFRAEPIGACNSFVGTEEYIAPEVITGSGHNSSVDWWALGILMYEMLYGRTPFRGKTRQKTFGNILHKDLVFPRRIPTSLAARQLINGLLQKDPENRLGSQGGANEIKGHPFFQGVNWTLIRCMRPPTFDAPVCFAGSELDVEGDEALDWDDVEASNPIEYF

SEQ ID NO: 6351 - protein, 152 aa, Zea mays
LVKRHQQEIFTSIAIASTFSLYSTAVIGRLIGLEPSLPISILPRCITVALALSIVSFFEGVNSSLTAAVVVVTGLIGANFVQVAMDKLGLNDPIARGIGTASSAHGLGTAALSAKEPEALPFCAIAYGLTGIFGSLVCSVPVVRQSLVFIAG

SEQ ID NO: 6352 - protein, 250 aa, Brassica napus
MTKNYPAVSEEYQKAIEKCKRKLRGLIAEKNCAPIMVRLAWHSAGTFDCASRTGVPFGTMRFDGELAHGANSGLHIALRLLEPIREQFPTISHADFHQLAGVVAVEVTGGPEIPFHPGREDKPQPPPEGRLPDATKACDHLRQVFLKQMVLTDQDIVALSGAHTLGRCHKDRSGFEGAWTSNPLIFDNSYFKELLSGEKEGLLQLPSDKALLDEPVFRPLVEKYAADEEAFFADYAEAHLKLSELGFADA

SEQ ID NO: 6353 - protein, 420 aa, Sinapis alba
YHHSCTIFFVVLLQFHHHVFSINTLSSNEALTITSNKTLVSPGDVFELGFFKTPTSNSQDGTDRWYLGLWYKTTSDQRTYVWVANRDNPLHSSTGTLKISHANLVLLDQSDTPVWSTNLTGVVQLPVTAELLDNGNFVLRDSKTKDLNQFMWQSFDFPVDTLLPEMKLGRKLNSPENEKILTSWKSPTDPSSGDYSFILETEGFIHEFYLLKNEFTVYRSGPWNGVRFNGIPKMQNWSYIVNSFTDNKEEVAYTFRVNNHNIHTRFRMSSTGYLQVITWTKTVPQRNMFWSFPEDTCDVYKMCGPYAYCDMHTTPMCNCIKGFVPKNAGRWDLRDTSGGCVRSSRLSCGEGDGFLRMSQMKLPETSEAAVDKMIGLKECKEKCVRDCNCTGFANMDIMNGGGSGCVTWTGELVDMRNYVA

SEQ ID NO: 6354 - protein, 363 aa, Ralstonia solanacearum
MHNKDKRMTKIAVLPGDGIGTEIVAEAVKVLKTLGETFEMETAPVGGAGYEAKGHPLPEDTLKLAKEADAILFGAVGDWKYDTLPRELRPEQAILGLRKHLQLFANFRPAICYPELAGASSMKPEIVAGLDILIVRELTGDIYFGQPRGVRAAPDGLFAGAREGFDTMRYSEPEIRRIAHVAFQAAAKRGKKLCSVDKANVLETFQFWKDIVTDVHKEYPEVELSHMYVDNAAMQLVKAPKNFDVVVTGNMFGDILSDEAAMLTGSIGMLPSASLDANNKGLYEPSHGSAPDIAGKGIANPLATILSAAMMLRYTLGKAEQADRIENAVKKVLAQGYRTGDILTPGCKQVGTVEMGDAVVAAL

SEQ ID NO: 6355 - protein, 266 aa, Glycine max
  unsure (1)..(266): unsure at all Xaa locations
QFESDVFLICSNAMQYNAPETIYHKQARSIQELGRKKFEKLRIGFEHSQIELKSEQKAGSNYLVKKQPKKPLARASQEPVGSDFSSGATLATIADVQPTSHLMQGGRCERSGNLDGILEANAFWIDANQEKAEDVLLGKGLLSKWGRKSFALDESRRASYNMSNQPIVKPDSIFMTFERGMKHLVTVGLHAEYSYARSLAXRFSASLGPIAWKIASHRIQHALXAGCKFGRGWVGEYEPLPTPILMGNNGVQKEARWGMKGGGSTG

SEQ ID NO: 6356 - protein, 183 aa, Oryza sativa
  unsure (1)..(183): unsure at all Xaa locations
MSSLESARADLALLILYLNKAEARDKICRAIQYGSKFVSNGQPGPAQNVDKSTSLARKVFRLFKFVNDLHALISPPAKGTPLPLILLGKVAELQRLSKSMKKLEKELKHQELLKNEQYQMKLQKCNERRLALIKSSLDIVVAIGLLQLAPKKVTPRVTGAFGFASSLIACYQXCSQPQPNPSX

SEQ ID NO: 6357 - protein, 426 aa, Raphanus sativus
NNSYTLSFLLAFFVFILFRLAFSINTLSSTESLTISSNRTLVSPGDVFELGFFRTNSRWYLGIWYKKLSERTYVWVANRDNPLSNSIGTLKISGNKLVILGHSNKSVWWTNITRGNESSPVVAELLANGNFVMRDSNNNSASGFLWQSFDYPTDTLLPEMKLGYDLRKGLNRFLASWRSSDDPSSGDFLYKLETGRIPEFYLSSGIFRLHRSGLWNGIRFSGIPEDQKLSYVVYNFTENREEVAYTFRMTNNNIYSRLTLSYSGYIERQTWNPSLGIWNVVWSFPLDSQCDVYRMCGPYSYCDVNTSPICNCIQGFNPSNVEQWDLKSWSGGCIRRTPLSCSRDGFNRMKNVKLPETTMAIVDRSIGVKECEKRCLSDCNCTAFANADIRNGGTGCVIWTGALEDIRTYFAEGQDLYVRLAAADLV

SEQ ID NO: 6358 - protein, 155 aa, Zea mays; identical to SEQ ID NO: 5953

SEQ ID NO: 6359 - protein, 776 aa, Schizosaccharomyces pombe
MIGSINESPIEEHMNDSPSTKEKADSVDISDYIVSHSDDSLSKDIKKDTKSFLDVEHGEISTVDEFEEDSPYPEVRAAVPPTDDPSMPCNTIRMWTIGLIYSTVGAAVNMFFSLRNPTVTLSVLISELLAYPALQIWDLIFPDREFRIGRLKFNFKPGPFNVKEHALIVVMSSVSFGNAYSTDIILAQRVHYKQRFGFGYEICLTLATQLIGYGLAGLSRRLLVRPASMLWPVNLVQCTLIKTLHRKDLRNAVANGWRISPFRFFLYVFIASFIWNWFPSYIFQALSLFAWVTWIRPNSPTVNQIFGESTGISILPMTFDWNQISAYILSPLMAPADALMNILLGVILFFWIVTPALNFTNTWYGDYLPISSSGIIDHFGNSYNVTRILTKDATFDLDAYQNYSPIFMSTTYALAFGLSFASITSVIFHVILYHGKEIYDRLRDPPAPDIHEKLMKAYDEVPFYWYLSVFLAFFGMMMGTIYGWKTETPWWVIIVGVIFSAVWFIPIGIVQAITNIQLGLNVFTEFIVGYMYPGRPLAMMIFKTVGYITMTQGLAFAADLKFGHYMKLPPRIMFYTQMIATIWSCFVQIGVLDWALGNIDNVCQADQPDNYTCPNATVFFNSSVIWGVIGPKRMFSGKNTYTGLQYFWLAGVLGTILFWALWKKWPQKWWGQLNGPLIFGGTGYIPPATPVNYLAWSGIGLFFNYYLKKIFADWWQKYNFTLSALDTGTQLSVIILFFCLQLPMVNFPDWWGNDGAFNTLDATGAAVRKLVNESAR

SEQ ID NO: 6360 - protein, 159 aa, Clostridium acetobutylicum
MSVYDFKAKDISGEEISLSKYEGKVLLIVNTASKCGFTPQYKELEDIYKKLGNEKFEILGFPCNQFANQEPGGSGDIKNFCEINYGVTFPLFEKIDVKGENAHPLFKYLASQAGGILGKEIKWNFTKFLIDKKGDVVDRFAPVTKPSKIKDKIVKLMEE

SEQ ID NO: 6361 - protein, 430 aa, Pisum sativum
MAQILAPSTQWQMRITKTSPCATPITSKMWSSLVMKQTKKVAHSAKFRVMAVNSENGTINRVEDLLNLDITPFTDSIIAEYIWIGGTGIDVRSKSRTISKPVSHPSEVPKWNYDGSSTGQAPGEDSEVILYPQAIFKDPFRGGNNILVVCDAYTPAGEPIPTNKRHRAAEIFSNPKVEAEIPWYGIEQEYTLLQTNVKWPLGWPVGGYPGPQGPYYCAAGADKSFGRDISDAHYKACIYAGINISGTNGEVMPGQWEYQVGPSVGIEAGDHIWASRYILERITEQAGVVLTLDPKPIEGDWNGAGCHTNYSTKSMREDGGFEVIKKAILNLSLRHKIHIEAYGEGNERRLTGKHETASINDFSWGVANRGCSIRVGRDTEKNGKGYLEDRRPASNMDPYVVTALLAESTLLWEPTLEAEALAAQKIALKV

SEQ ID NO: 6362 - protein, 164 aa, Triticum aestivum
FLCSYRRIVEYKTAYYSFYLPVGCALLLSGGSLDDYVQVKHILVEMGIYFQIQDDYLDCFGDPEVMGKIGTDIEDFKCSWLFVQALVRVDERQKDILFENYGKSDPACVAKVKALYKELNLEAVFSEYEREIYEKLISDIEAQPNEAVQAVLKSFLHKIYRRMK

SEQ ID NO: 6363 - protein, 343 aa, Mesorhizobium loti
MSQPAILVTGGAGFIGSHTCKLLAAAGYLPVAFDNLCRGNRKSVAWGPLVVGDIRDRDALRAAIGTYRPISVIHFAALAYVGESVQEPADYYSTNVTGTIAVLDAARAHAIDNIIFSSSCATYGVPEALPVRETSLQNPISPYGRTKLMGEQIIGDYASAYGMKFAILRYFNACGADPDGELGEWHSPETHLVPRVLMAASGIIDEIEVFGTDYDTPDGTCVRDYIHVSDLARAHLKALQHLEGGGQNLAVNLGTGRGVSIREIIQAVGRITSRPVPAVFRDRRPGDPAELYADPGKARAHLGFVPQLSDIDTIVRTAAPFFGLRTKPMELPPSKAAASLAAG

SEQ ID NO: 6364 - protein, 374 aa, Zea mays
  unsure (1)..(374): unsure at all Xaa locations
RTRGLRELEALTNEIDEESQIVGEVLRIKELLLHXEDHSDATLFDSLRRLQLMQLSVSTLKATEIGRAVNRLRKHNSRKIRHLVCTLIEGWKVLVDEWVSTTNAALTENSPGSSNPSVVDEEEEGLPSPPLDEGAFFATQTTSIQLSEFFDEMDEDGNLRHSNDPSLGNKRGNNGGRLASHSTVARQDPPRSYPGVVERVQPRRLELARQEPPMRQANPQTLQSSSLQAKPHGALNKQSNNPSSYESGPGRPVKAAQQRPFGDMKPKQTREHVAIERKPMASQTDKSRPGARPSAGAKLELAKPKVYDDGLDNNRKLEAAKRRLQERYQEAENAKRQRTIQVMELGDIPKPKNQNRQPVVKSRNSLRNWANGRR

SEQ ID NO: 6365 - protein, 198 aa, Gossypium hirsutum
MAPKKAGVSKRVFNKGSWTAEEDRRLAKYIEIHGAKRWKTIAIKSGLNRCGKSCRLRWLNYLRPNIKRGNISDEEEDLIIRLHKLLGNRWSLIAGRLPGRTDNEIKNYWNSHLSKKMINHDVRTEQTSSSEQIVPHKAWETVQMEEEEVVKGSDEIENSEFSIDVDEFFDFSTEGCFGLDWVNKFLELDDQQDPLAMV

SEQ ID NO: 6366 - protein, 159 aa, Listeria monocytogenes EGD-e
MNVHDFSEKAMNGKEIALSDYKGKVLLIVNTASKCGLTPQLEGLEAMYKKLGGDNFEILGFPCNQFLRQDPGSDEEILEFCQMNYGVTFQMFSKIKVKGKDASPLYKYLTEQTGGKKVEWNFAKFLIDENGEVIERFPSKMKPEDFEDKVEALVAKVNN

SEQ ID NO: 6367 - protein, 394 aa, Methanosarcina mazei Goe1
MSMTIGLAGKPNAGKSTFFKAATLADVEIANYPFTTINANHGVTYVRAECPCKEKGKTCGKCVDGVRLVPIDIIDVAGLVPDACKGRGLGNTFLDELRQAQAIIHVVDASGGTDAEGNPVDIGDHNPLDDVAFLNREITMWLYGILERNWVKLSRKIQAEGLKLEVVISEQLAGAGIKESHVNAALIETGLSRIDHIKWTEEDMIRLCDTMREISKPMLIAANKTDIAPRENLEKLRELDRIVVSTSAAAELVLRSAAKAGVIKYTPGDRDFELLTEEITKAQKKGLEAIHKVLERFGTTGIQECINRTVFELLDLIVVYPVEDEGKWSDKLGNMLPDAYLMKKGSTCHDLAYQIHTEIGDRFLYAVDARTRLRLGEKHELKNGDVIKIVSTAK

SEQ ID NO: 6368 - protein, 244 aa, Escherichia coli O157:H7
MKCFTLSSQRRRIIGIPIFCTSTFLIFFSVCCFFTLFAAFAHKTVLFCILKDLHKANNAPKVISKSFIAEVSMSDVLRPYRDLFPQIGQRVMIDDSSVVIGDVRLADDVGIWPLVVIRGDVHYVQIGARTNIQDGSMLHVTHKSSYNPDGNPLTIGEDVTVGHKVMLHGCTIGNRVLVGMGSILLDGAIVEDDVMIGAGSLVPQNKRLESGYLYLGSPVKQIRPLSDEEKAGLRYSANNYVKWK

SEQ ID NO: 6369 - protein, 407 aa, Lycopersicon esculentum
MATLASSSSLLHSSSSSFNSSSTPSISPVSRISLKFPSSSLSSSLSISPYFVAFSLNSRRVSPKSYSSTSVVQASGAVEKKKVLIVNTNSGGHAVIGFYFAKELLGSGHDVTVLTVGEESSDKMKKTPFTRFSEITGAGGRTVWGNPADVGKILEGEVFDAVLDNNGKDLDSVSPVADWAKSSGVKQFLFISSAGIYKPTDEPPHVEGDAVKADAGHVLVEKYISEIFGSWASFRPQYMIGSGNNKDCEEWFFDRIVRGRPVLIPGSGMQLTNISHVRDLSSMLTLAVQNPAAASGRIFNCVSDRAVTLDGMARLCAKAAGSSVEIVHYDPKAVGVDAKKAFPFRNMHFYAEPRAPNEILGWSATTNLPEDLKERYEEYVKIGRDKKEMKFELDDKILESLKVPVAA

SEQ ID NO: 6370 - protein, 295 aa, Chryseobacterium meningosepticum
TTNKPIVLSTFNFGLHANVEAWKVLSKGGKALDAVEKGVRLVEDDPTERSVGYGGRPDRDGRVTLDACIMDENYNIGSVACMEHIKNPISVARAVMEKTPHVMLVGDGALEFALSQGFKKENLLTAESEKEWKEWLKTSQYKPIVNIENHDTIGMIALDAQGNLSGACTTSGMAYKMHGRVGDSPIIGAGLFVDNEIGAATATGHGEEVIRTVGTHLVVELMNQGRTPQQACKEAVERIVKIVNRRGKNLKDIQVGFIALNKKGEYGAYCIQDGFNFAVHDQKGNRLETPGFALK

SEQ ID NO: 6371 - protein, 473 aa, Saccharomyces cerevisiae
MAKDNSEKLQVQGEEKKSKQPVNFLPQGKWLKPNEIEYEFGGTTGVIGMLIGFPLLMYYMWICAEFYHGKVALPKAGESWMHFIKHLYQLVLENGIPEKYDWTIFLTFWVFQIIFYYTLPGIWTKGQPLSHLKGKQLPYFCNAMWTLYVTTTLVLVLHFTNLFRLYVIIDRFGRIMTCAIISGFAFSIILYLWTLFISHDYHRMTGNHLYDFFMGAPLNPRWGILDLKMFFEVRLPWFTLYFITLGACLKQWETYGYVTPQLGVVMLAHWLYANACAKGEELIVPTWDMAYEKFGFMLIFWNIAGVPYTYCHCTLYLYYHDPSEYHWSTLYNVSLYVVLLCAYYFFDTANAQKNAFRKQMSGDKTGRKTFPFLPYQILKNPKYMVTSNGSYLLIDGWYTLARKIHYTADWTQSLVWALSCGFNSVFPWFFPVFFLVVLIHRAFRDQAKCKRKYGKDWDEYCKHCPYVFIPYVF

SEQ ID NO: 6372 - protein, 250 aa, Fragaria x ananassa
MGKCYPTVSEEYKKAIDKAKRKLRGLIAEKNCAPLMLRLAWHSAGTYDVKTKTGGPFGTMKQPAELAHGANNGLDIAVRLLEPIKEQFPILSYADFYQLAGVVAVEVTGGPDVPFHPGREDKPEPPPEGRLPDAGKGSDHLREVFGKTMGLSDQDIVALSGGHTLGRAHKERSGFEGPWTPNPLIFDNSYFTVLLSGEKEGLLQLPTDKALLSDPVFRPLVEKYAADEDAFFADYALAHQRLSELGFAEA

SEQ ID NO: 6373 - protein, 168 aa, Zea mays
MAAASSATSVHDFTVKDASGKDVDLSVYKGKVLLIVNVASQCGLTNSNYTELSQLYPKYKDQGFEILAFPCNQFGGQEPGTNDEIVQFACTRFKAEYPIFDKVDVNGSNVSPLYKFLKSSKGGLFGDSIKWNFSKFLVDKEGRVVDRYAPTTSPLSIEKDIKKLLGSS

SEQ ID NO: 6374 - protein, 387 aa, Gaeumannomyces graminis var. graminis
MLRSSAFALLAWASLSEAQFGIKHTQYGTSEPVYPSPEILGSGGWEAGLAKAKDFVAQLTPEEKANMVTGTPGPCVSNIAPVPRLNFTGLCLQDGPATLRQATYVTVFPGGVSAASSWDKDLIYKHGVLMAREFRDKGSHIILGPVIGPLGRSPYAGRNWEGFSPDSYLAGVLAEQTVKGMQSVGVQTCTKHFIGNEQEEQRNPTTVDGKGVEAISSNIDDRTMHETYLWPFYNAVRAGTTSIMCSYQRINGSYGCQNSKTLNGLLKTELGFQGFVVSDWAATHSGVASIEAGLDMNMPGPLNFFAPTLESYFGKNITTAVNNGTLSSRRVDDMIERIMTPYFALGQDKDYPPVDGSTVPIGYLQPDAWNHEFPLGPTVDVRRNHHE

SEQ ID NO: 6375 - protein, 140 aa, Zea mays
MASGSMKREISETHDTLRFGLNAGVKADLAPPHPLQSSIQSEAKFWADKKKFGTEAIYGSALNIRKDLDAQILSRFQRPPGALPSSLLGYEALTGSLDDFGFEDYLNMPQGSEGFRQPDMHHGMEVRLGLSKGPICPSFS

SEQ ID NO: 6376 - protein, 278 aa, Zea mays
PDLRLCLLLPLFSHLPSPEAQTRRDATPRERDGSEPPESTRPRAAVTPGRFSPPDPILRTAEHPAVVRCHGVGEQAGELQILLEYMDGGSLENRRIAAERFLAHVARQVLSGIAYLHRRHIVHRDIKPSNLLIDSGRRVKIADFGVGRILNQTMDPCNSSVGTIAYMSPERINTDLNDGAYDGYAGDIWSFGLSILEFYLGRFPLGENLGKQGDWAALMFAICYSDSPQAPCNASPDFKNFISLCLQKNPVNRPSAMRLLQHPFVAQPQPQPLAAPPS

SEQ ID NO: 6377 - protein, 366 aa, Bacillus caldotenax
MGNYRIAVLPGDGIGKEVTSGAVEVLKAVGIRFGHEFTFEYGLIGGAAIDEAGTPLPEETVRLCRESDAVLLGAVGGPKWDDNPPHLRPEKGLLAIRKQLDLYANLRPVVCYDSLVSRSPLKPDLVQGVDFVIVRELTGGIYFGQPSAVVENGEEKAVDTLLYKKEEIERIVRMAFELARGRRKKVTSVDKANVLSSSRLWREVAEEVANEFPDVTLEHMLVDMRMQLIRAPKQFDVIVTENMFGDILSDEASMLSGSLGMLPSASLSASGPSLYEPVHGSAPDIAGMNKANPIAAILSAAMMLRLSFGLTAEAGGRARVWQALALGSGSRLGQRRPHLSTNEMVEEIKAAVLDYTAIAQIMTVYA

SEQ ID NO: 6378 - protein, 384 aa, Nicotiana tabacum
MKKQEKEAIMADLENCGRVTRLAKKRAAEAMASHQQQHPSKKRVVLGEIQNFSNLGVSQIKGLNTEPKKQPKSKQQQSKRKLKRAVTSKIDKEELNVDNVDANYDDPQMCSAYVSDIYDYLRKMEIEEKRRPLPDYLEKVQKDLSPNMRGVLVDWLVEVAEEYKLLSDTLYLAVSYIDRFLSTNVITRQKLQLLGVSSMLISAKYEEISPPHVEDFCYITDNTYTKEEVVKMEADVLKTLNFEMGNPTVKTFLRRFTGVAQEDYKTPNLQLEFLGYYLAELSILDYSCVKYVPSLLAAAVVFLSRFTLQPNTHPWSLALQQYSGYKAADLKECILILHDLQLSRRGGSLAAVRDKYKQHKFKCVSSLTSPVEIPASFFEDMRQL

SEQ ID NO: 6379 - protein, 123 aa, Triticum aestivum
LIGLEPTLTISILPRCITVALALSIVSFFEGANTSLTAAVVVLTGLIGANFVQAAMDKLGLNDPIARGIGAASSAHGLGTAALSAKEPEALPFCAIAYALTGIFGSLICSSPAVRQSLVFIAG

SEQ ID NO: 6380 - protein, 154 aa, Cryptococcus bacillisporus
MVKAVAVLKGDSPVTGVITFTQEKEGAPVTVSGDIKNLDANAERGFHVHEFGDNTNGCTSAGPHFNPHGKNHGAPSDSERHVGDLGNVKTDGNGVASVNISDKSLSLFGPYSIIGRTIVVHAGTDDFGKGGNAESLKTGNAGARAACGVIGISN

SEQ ID NO: 6381 - protein, 123 aa, Zea mays
MAAADVEYRCFVGGLAWATSNGSLENAFASYGEILDSKVITDRETGRSRGFGFVTFSSENSMLDAIENMNGKELDGRNITVNQAQSRGGGGGGGGYGGGRGGGGGYGGGRRDGGYGGGGGWRD

SEQ ID NO: 6382 - protein, 180 aa, Triticum aestivum
MADVEYRCFVGGLAWATDDQSLQNAFSKYGDVIDSKIITDRETGRSRGFGFVTFASDEAMRQAIEAMNGQDLDGRNITVNEAQSRRSGGGGGGFSGGGGGGYGGQRREGGGGGYGGGGGGYGGGRSGGGGGYGSREGGGGYGGGGGGYGGSRGGGGGGGGGGGGSRGGSRGGSGGGNWRE

SEQ ID NO: 6383 - protein, 204 aa, Glycine max
MLYTAQHFVNKRHASVTLPTNFAAMATHSAATERTYKESFDSAANKRYADHIIPHILHLYGSSATSRDFEIYAANASFEDPLMCAHGVKQIKSAFYTLPKVFKKSKIVEYSIKENMVSPGKGEILIDNKQYYKFLGKDINMVSLIKLYIEEGKVVRHEDWWDKKPISNRETAKLPLLGRIAEMTRRGSMLATHVLMRFGKDPNV

SEQ ID NO: 6384 - protein, 313 aa, Triticum aestivum
MPSCSAAHTIVLSRGLRARGIISFFSILPSSLVGFTVPSIGMARKCSSCGHNGHNSRTCGGHRGVESGGGGGLRLFGVQLQVGAAPLKKSFSMECLSSTASAYYAAAAAVGVAASNSSSSVSSSSSLVSVEESPEKMGHGYLSDGLMGRAQERKKGVPWTEDEHRRFLAGLEKLGKGDWRGISRHFVTTRTPTQVASHAQKYFLRQAGLAQKKRRSSLFDVVEKNGDRGATERRHRLKTRCHQLRGRDGVNVPCSFPGRQPAEAGRGATAVPDSDAELLAAVVDDRRTVSEPCTEAPSFPGPGGKCESSSAGA

SEQ ID NO: 6385 - protein, 438 aa, Clostridium acetobutylicum
MAKELKKTLSTFQLWAIIVGMVISGMYCGWNNALTFTSPMGFVVATLIVTVFYGTFMFSYAELATAMPKADGSSEFASRTMGRLGGFFAGFSCILEFLFATPAIAISIGAYVNFIIPSVPVTVAALVFYALFVIVNCFGVKTAAIIETVVTIVAIIGLIIFAGASATHIDPIKIFGGNIYKGGATGIFNAIPFAIWFYLAAEGGAMSAEECKNPKKDISKGFIIAIITLMVLALGTFLCTAGVLDNKTLGITNSPIPDTLNVIFGKGNFLSKFMSFIGLFGLIASLHGIIIGYSRQVFAMSRSKYLPEFLSKVNSKGSPVPAIVVPSLIGMIFVLTNNTATIIVISSFGAIALHAISMIAFFLLRKKEPKLERPYKVSIILPIIALVLNAVFLITTIYSSMSTISWVILSFVLAFVYYFVYSKLNSKKDIEEEQKEAV

SEQ ID NO: 6386 - protein, 157 aa, Gossypium hirsutum
NKGSWTAEEDRRLAKYIEIHGAKRWKTIAIKSGLNRCGKSCRLRWLNYLRPNIKRGNISDEEEDLIIRLHKLLGNRWSLIAGRLPGRTDNEIKNYWNSHLSKKMINHDVRTEQTSSSEQIVPHKAWETVQMEEEEVVKGSDEIENSEFSIDVDEFFD

SEQ ID NO: 6387 - protein, 158 aa, Zea mays
MSILWEKSAGWRWLVRRTRDSKPFFFTFAALCGVVPGVIGYGVMQLTGSRNEQLEAHLRSTARPETTMFTFVTIPWSPPTDETRGKQMMGQVNRERLAEFLGELQRKEDTNDRYVAALRGETLTRKRYERIQPLPAANAQASQETAGASAEEERPKAK

SEQ ID NO: 6388 - protein, 199 aa, Schizosaccharomyces pombe
MAFFNVFKAVLCAYFISVVFGHGITLKPHQRECFYENLRNNDQMSVTYQTNVGGDQLVSMSIYNPAGQIMHQEVPNSMAQYSFTVKNPGKYMYCFYNDALDGESKEVLFNVHGVIYISDEDLDANNPLLGKVRQLHDTISKVKHEQEYFVARERIHRNTAESTNDRVKWWSILQTVILVSVCVFQIFYLKRLFEVKRVV

SEQ ID NO: 6389 - protein, 612 aa, Oryza sativa
MSSAAGGGGYGGGQGGGAEHHHHHHGHAGHLLLHHHPQHVAGAAVAAAAAAAGGQMYHVPQHSRREKLRFPPDAGDSPPPHGHGHGHAPQQQQQHGSWPPPPAFYSYASSSSSYSPHSPTLAQAQLVAHGLAPPLPQIPTQNFSLSLSSASSNPPPPQAQPRRQLGGLAQATGPFGPFTGYAAVLGRSRFLGPAEKLFEEICDVGGAASHVDRTISDEGLLDADPMDGVDHDVVDHDLGGADRAAADAGPISGAEQQWKKTKLISMMEEVCKRYRQYYQQVQAVMASFETVAGFSNAAPFAALALRAMAKHFKCLKSMILNQLRNTSNKVAVKDGLNKEIAVFGLAGGSSGGAGLQRANSASAFGQPHNIWRPQRGLPERAVSVLRAWLFEHFLHPYPTDGDKQMLAKQTGLTRNQVSNWFINARVRLWKPMVEEIHNLEMRQMHKHSVVDKGQHSVHHQAQHSSQCSGNPSVPSDSHPGQSSSITRNHNTAASQGFPDELSQMSQSIQGQVSFAYNGLTSQHNIASPHHQHQQVGGVGIGGGNGGVSLTLGLHQNNRVCIAEPLPAALPANLAHRFGLEEVSDAYVMSSFGGQDRHFGKEIGGHLLHDFVG

SEQ ID NO: 6390 - protein, 329 aa, Chlorobium tepidum TLS
MKILVIGGAGYIGSHVAREFLDRGYQVTVFDNLSTGREENLFDDAEFVRGDIFDAEMLAEVMNRGFDGCVHLAALKAAGESMQKPEEYSVHNICGTIGTINQAVASGIKCLLFSSSAAIFGSPAYLPIDENHPKKPENYYGFTKLEIERILEWYDRLKGLKFAAVRYFNAAGYDVRGRIRGLERNPANLLPVIMEVASGVRPMLSVFGTDYPTRDGTCIRDYVHVNDLATAHVLAFEQVIESGESLSVNLGSETGVTVLEMLEAARRLTGKEIMAEFAPRRAGDPANLVATSAMARELLGWVPQYSDLDTLVESTWNVYRDVNAGSGRQ

SEQ ID NO: 6391 - protein, 241 aa, Populus balsamifera subsp. trichocarpa
MEYQNESLESSPLRKLGRGKVEIKRIENTTNRQVTFCKRRSGLLKKAYELSVLCDAEVALIVFSSRGRLYEYSNDSVKSTIERYKKASADSSNTGSVSEANAQYYQQEAAKLRSQIGNLQNSNRHMLGEALSSLSVKELKSLEIRLEKGISRIRSKKNELLFAEIEYMQKREVDLHNNNQLLRAKISENERKRQSMNLMPGGADFEIVQSQPYDSRNYSQVNGLQPASHYSHQDQMALQLV

SEQ ID NO: 6392 - protein, 183 aa, Fusobacterium nucleatum subsp. vincentii ATCC 49256
MKIYDFSVKNRKDEDISLKSYKGKVLLIVNTATRCGFTPQYDELENLYEKYNKEGFEVLDFPCNQFGNQAPESDEEIHTFCQLNYKVKFDQFAKVEVNGENALPLFQYLKEQKGFSGFDPKHKLTSVLTEMLSKNDPDFAKKSDIKWNFTKFLVDKSGNVVARFEPTTSVKVIEQEIKKLLEK

SEQ ID NO: 6393 - protein, 398 aa, Puccinia triticina
MCGTSSAMDPVFQSINPSLYDPQRVLDSEEFEILTDMNKVKAYSDDNKNIACCYNDKQQLNMVKKPMPEVHPGQVLVRVRATGICGSDIHFWKHSRVGEKMVVKHECGAGHESAGEVIALGEGVTDLEVGDRVAIETGIPCSKPTCEMCRTGQYNACPEIMFWFTSPYHGLMTRYHAHPSCWLHKLPPNVSYEEGSLLEPLAVALAGIERAGVRLGDPVLICGAGPIGLVTLLACHAAGACPIAITDLSEGRLDCAKRLVPSVSTFKISLGESETDVAGQIQAAMGCKPRVAMECTGFESSIATAIFSVKFGGKVFVIGVGKDKQTLPFMHMAENEIDLQFQFRYANQYPKAIRLVSTGLIDVKPLITHRFVLEKAIEAFNTAADPKSGSMKVQVVDY

SEQ ID NO: 6394 - protein, 217 aa, Hordeum vulgare subsp. vulgare
MDVGALSSDYSSGTPSPVGADGGNSEGFSTYMTVSSAPPKRRAGRTKFKETRHPVYKGVRRRNPGRWVCEVREPHSKQRIWLGTFETAEMAARAHDVAALALRGRAACLNFADSPRRLRVPAVGASPDEIRRAAVEAAEAFLPAPDQSNAPAEEVAAAPTMQFAGDPYYGMDDGMDFGMQGYLDMAQGMLIAPPPLVGPSATAGDGDDDGEVSLWSY

SEQ ID NO: 6395 - protein, 233 aa, Zea mays
MASLDTVRGDLGLVVLYLSKAEARDKICRAIQYGSKFLSNGQPGPAQNVDKSTSLARKVFRLFKFVNDLQALISPPAKGTPLPLILLGKSKNAMLSTFLFLDQIVWAGRTGVYKNKERAEFLGRIAFYCFLGSNTCTTIIELAELQRLSKSMKKLEKDLKHQELYKNEQYRMKLKKSNERLLALIKSSLDIVVAVGLLQLAPKKVTPRVTGAFGFASSLIACYQLLPAPAKSK

SEQ ID NO: 6396 - protein, 173 aa, Oryza sativa
MAGVGRNMLAPLLVLNLIMYLIVIGFASWNLNHFINGQTNYPGVAGNGATFYFLVFAILAGVVGAASKLAGVHHVRAWRHDSLATNAASSLIAWAITALAFGLACKEIHIGGHRGWRLRVLEAFVIILAFTQLLYVLMLHTGLFGGGDGAYRDHDYGVGAGAAAGEPKGTARV

SEQ ID NO: 6397 - protein, 375 aa, Paracoccus denitrificans
MRTRAAVALEAGKPLEVMEVNLEGPKAGEVMVEIKATGICHTDEFTLSGADPEGLFPSILGHEGAGVVVEVGPGVTSVKPGNHVIPLYTPECRQCASCLSGKTNLCTAIRATQGQGLMPDGTSRFSMLDGTPIFHYMGCSTFSNYTVLPEIAVAKVREDAPFDKICYIGCGVTTGIGAVINTAKVEIGAKAVVFGLGGIGLNVLQGLRLAGADMIIGVDLNDDKKPMAEHFGMTHFINPKNCENVVQEIVNLTKTPFDQIGGADYSFDCTGNVKVMRDALECTHRGWGQSIIIGVAPAGAEISTRPFQLVTGRVWKGTAFGGARGRTDVPQIVDWYMDGKIEIDPMITHTLSLDDINKGFDLMHAGESIRSVVLY

SEQ ID NO: 6398 - protein, 330 aa, Bacillus cereus ATCC 14579
MNSILICGGAGYIGSHAVKKLVDEGLSVVVVDNLQTGHEDAITEGAKFYNGDLRDKSFLRDVFKQENIEAVMHFAADSLVGVSMEKPLQYYNNNVYGALCLLEVMDEFKVDKFIFSSTAATYGEVDVDLITEETMTNPTNTYGETKLAIEKMLHWYSQASNLRYKIFRYFNVAGATPNGIIGEDHRPETHLIPLVLQVALGQREKIMMFGDDYNTPDGTCIRDYIHVEDLVAAHFLGLKDLQNGGESDFYNLGNGNGFSVKEIVDAVREVTNHEIPAEVAPRRAGDPARLVASSKKAKEKLGWDPKYVNVKTIIEHAWNWHQKQPNGYAK

SEQ ID NO: 6399 - protein, 481 aa, Oryza sativa
  unsure (1)..(481): unsure at all Xaa locations
MQRLASSRRLLQAXXLAPVRAQSSLSAAGGAAAPAPENAFAAAPKMPXFDYTPPPYDGPRAEEIFRXRAEFLSPCLVHFYDRPLNIVDGKMQYLFDEDGRRYLDAFGGIATVCCGHCHPDVVEAMVNQAKRIQHSTVLYLNHAIADFAEALAAKMPGDLKVVFFTNSGTEANELALMIARLYTGCHDIISLRNGYHGNAAGTMGATAQCNWKFNVVQTGVHHALNPDPYRGAFGSDGEKYARDVQEIIDFGTTGRVGGFISEAIQGVGGIVELAPGYLPAVYNMVRKAGGLCIADEVQAGVARTGSHFWGFESHGVIPDIVTMAKGIGNGIPIGAVVTTPEIAQVLTRRSYFNTFNGNPVSTAGGHAVLKVLEKEKLQENAFVVGSYLKERLNKLKEKHDIIGDVRGKGFLLGVELVTDRQKKTPAKVEIGHVMNHMKDMGVLVGKGGFYGNVFRVTPPLCFTKEDSDFFIEAMDISLSKL

SEQ ID NO: 6400 - protein, 253 aa, Oryza sativa (japonica cultivar-group)
MASSGDTNTVMKYVANGAFDFLLKPVRIEELSNIWQHIFRKQMQDHKNNNMVGNLEKPGHPPSILAMARATPATTRSTATEASLAPLENEVRDDMVNYNGEITDIRDLGKSRLTWTTQLHRQFIAAVNHLGEDKAVPKKILGIMKVKHLTREQVASHLQKYRMQLKKSIPTTSKHGATLSSTALDKTQDHPSRSQYFNQDGCKEIMDYSLPRDDLSSGSECMLEELNDYSSEGFQDFRWDSDKQEYGPCFWNF

SEQ ID NO: 6401 - protein, 359 aa, Pseudomonas syringae pv. tomato str. DC3000
MSQWPDTRILELFDIELPVLQAPMAGASSSPMAIAVAKAGGLASLPCALLTLDQINEQVTVFRQHAGSAPLNLNFFCHTPPEYNADRAERWKQALKPYYEELGADFDAPTPVSNRAPFDSATCALVERLKPEVVSFHFGLPEQALLERVRATGAKIISSATTVEEAVWLEQQGCDAVIAMGYEAGGHRGLFLSDQLHTQVGTFALVPQIADAVKIPVIAAGGIADGRGVAAAFVLGASAVQVGTAYLFCPQASVSALHRQALLDATDSQTALTNLFTGRPARGIVNRIMREAGPISALAPAFPLAGGALMPLRAIAEKQHSSDFTSLWAGQAVGIKHQLDATGLTRQLAENALKILSPL

SEQ ID NO: 6402 - protein, 401 aa, Trochodendron aralioides
GKPFYAIVHRVTGSLIIDFEPVKPYEVPMTAAGALQSYKLAAKAIARLQSLPSGSIERLCDTLVQELFELTGYDRAMVYKFHEDDHGEVVSEITKPGLEPYLGLHYPATDIPQAARFLFMKNKVRMICDCRAKNVKVLQDEKLPFDLTLCGSTLRAPHSCHLQYMENMNSIASLVMAVVVQEGDEQARALVPHSLRRRKRLWGLLVCHHSTPRFVPFPLRYACEFLAQVFAIHVNKELELENQILEKNILRTQTLLCDMLMRDAPLGIVSQSPNIMDLVKCDGAVLLYKNRTWRFGSTPSELQIHDIALWLSEYHMDSTGLSTDSLYDAGFPGALTLGDGVCGMAAVRITSKDMLFWFRSHTAAEVRWGGAKHEPGEKDDGRRMHPRSSFKAFLEVVKSRS

SEQ ID NO: 6403 - protein, 313 aa, Triticum aestivum
  unsure (1)..(313): unsure at all Xaa locations
MAASAAPLRAALARSPAPAAAARTPPAFLPLPPRARGIRLNPVVLASGRGRRIRAEATARTRQEKEQQEAEVSAVEDSFPVREAAATPAPEEEGGFDDELTLAGEDGDWVVRFEQSFNVFLTDTVIFILDILYRDRDYARFFVLEDHRQXVPYFAFISVLHLYETFGWSRRADNIKVHFAESMNEFHHLLIMEALGGNSVWLDRFLARFSAFFYYFVTVAMYMLSPRMAYHFSECVERHAYSTYDKFLKLNGEELKKLPAPEVAVNYYMNEDLYMFDEFQTSRAPNSRRPKVDNLYDVFVNVRDDEXRSIARQ

SEQ ID NO: 6404 - protein, 640 aa, Oryza sativa (japonica cultivar-group)
MMGGGLVMDQGMMFPGVHNFVDLLQQNGGDKNLGFGALVPQTSSGEQCVMGEGDLVDPPPESFPDAGEDDSDDDVEDIEELERRMWRDRMKLKRLKELQLSRGKDPAGGVVGDPSKPRQSQEQARRKKMSRAQDGILKYMLKMMEVCRAQGFVYGIIPEKGKPVSGASDNLRGWWKEKVRFDRNGPAAIAKYQADNAVPGFESELASGTGSPHSLQELQDTTLGSLLSALMQHCDPRSAYPLEKGVPPPWWPTGDEEWWPELGIPKDQGPPPYKKPHDLKKAWKVSVLTAVIKHMSPDIEKIRRLVRQSKCLQDKMTAKEISTWLAVVKQEEELYLKLNPGARPPAPTGGITSAISFNASSSEYDVDDCKGDEAGNQKAVVVADPTAFNLGAAMLNDKFLMPASMKEEATDVEFIQKRSASGAEPELMLNNRVYTCHNVQCPHSDYGYGFLDRNARNSHQYTCKYNDPLQQSTENKPSPPAIFPATYNTPNQALNNLDFGLPMDGQRSITELMNMYDNNFVANKNLSNDNATIMERPNAVNPRIQIEEGFFGQGSGIGGSNGGVFEDVNGMMQQPQQTTPAQQQFFIRDDTPFGNQMGDINGASEFRFGSGFNMSGAVEYPGAMQGQQKNDGASEFEELE

SEQ ID NO: 6405 - protein, 334 aa, Triticum aestivum
  unsure (1)..(334): unsure at all Xaa locations
MARWAIAIHGGAGVDPNLPEHRQEEAKRVLARCLQVGVDLLRAGATALDVVEAVVRELETDPCFNSGRGSALTRAGTVEMEASIMDGNGRRCGAVSGVSTVRNPVSLARRVMDKXPHSYLAFDGAEDFAREQGXLEVVDNSYFITEENIGMLKLAKEANSILFDYRIPLAGTDTCSAQAAAVEGHGSNGMVMNGLPISIYAQETVGCAVVDSNGFTAAATSTGGLMNKMTGRIGDSPLIGAGTYACGHCAVSCTGEGEAIIRSTLARDVAAVMEYKGLPLQEAVDFCVKERLDEGFAGLIAVSGTGEVAYGFNCTGMFRGCATEDGFMEVGIWD

SEQ ID NO: 6406 - protein, 428 aa, Brassica napus
MAQILAASPTCQMRLTKPSSIASSKLWNSVVLKQKKQSSSKVRSFKVMAIQSDNSTINRVESLLNLDTKPFTDRIIAEYIWYGGSGIDLRSKSRTLEKPVEDPSELPKWNYDGSSTGQAPGEDSEVILYPQAIFRDPFRGGNNILVICDTYTPAGEPIPTNKRARAAEIFSNKKVNEEIPWFGIEQEYTLLQPNVNWPLGWPVGAYPGPQGPYYCGVGAEKSWGRDISDAHYKACLYAGINISGTNGEVMPGQWEFQVGPSVRIEAGDHVWCARYLLERITEQAGVVLTLDPKPIEGDWNGAGCHTNYSTKSMREDGGFEVIKKAILNLSLRHMEHIIAYGEGNERRLTGKHETASIDQFSWGVANRGCSIRVGRDTEKKGKGYLEDRRPASNMDPYIVTSLLAETTLLWEPTLEAEALAAQKLSLKV

SEQ ID NO: 6407 - protein, 366 aa, Caulobacter crescentus CB15
MQVTAAVTRSPSGPFSLEALDIEPPRAGEILVRVVATGVCHTDMVMRDQHLPTPQPVVLGHEGAGVVEQVGPGVAKVAVGDHVVMTFNSCGRCPSCSDHAPTYCHEFFPRNFMGAREDGSSGLSKGSEVIHANIFGQSSFATYALCHERNAVKVDKTAPLERLGPLGCGVMTGAGAVMNALKVPAGRSLVVFGAGAVGLSAVLAAKAIGAGPIIAIDINPERLALALELGADHALNGAEGGVVEKIQAITGTGAHFSIDTTANLKVMRQAVDCLGARGVCGLVGASKMGDELPLDAVSVMSGGKVVRGVVEGDADPDVFIPELIALHLAGRFPFDRLIQFYPLAEINQAVSDGETGRVIKPVVRMS

SEQ ID NO: 6408 - protein, 143 aa, Zea mays
VTSPYGNTVHHNENATTGQFAFTTSEAGNYLACFWIDSVEKGSGTSLNLDWKIGIAAKDWDTIAKKEKIEGVELELRKLEAAVESIHHNLLYLKAREADMRTVSERTNSRVAWFSILSLGVCVAVSVLQLWHLQGFFRKKKLI

SEQ ID NO: 6409 - protein, 160 aa, Zea mays
WTVRHVAAPGGGVAGGTTDLVIVHAKPSPSSIVSFGGPGAGEAIRHVDAGLRKTAEAVVARARRVCAASSARALVEVVEGEPRTVLCSAAEKHRADLLVLGSHGYGAVKRALLGSVSDYCAHHAPCSVMIPAADDEGGDPAAANPCYPVSDYRQQPAHRP

SEQ ID NO: 6410 - protein, 215 aa, Gossypium lobatum
IYYWECKGYTPLFPRILGHEASGIVESVGEGVNDLKPGDHVLPIFTGECKECRHCLSEESNNMCELLRINCDRGVMLADGKTRFSINGKPIYHFVGTSTFSQYTVVHVGQVAKISPTAPLDKVCPISCGICTGFGATVNVAKPKKGQTVAVFGLGAVGLAAAEGARVCGASRIIAVDVNPRRFEEAKRFGITEFVNPKDYDKPVQEVIVEMTGGG

SEQ ID NO: 6411 - protein, 392 aa, Dinemandra ericoides
DLEPVNPADVPVTAAGALKSYKLAAKAISRLQSLPSGNIPLLCDVLVKEVRDLTGYDRVMVYKFHEDEHGEVVSECRRSDMESYLGLHYPATDIPQASRFLFMKNKVRMICDCLSPPVEVIQDERLPQPLSLCGSTLRSPHGCHAQYMANMGTIASLVMSVTVNEDDDMMDGDQQRMARKLWGLVVCHHTSPRFVPFPLRYACEFLIQVFGVQINKEVDLAAQVREKHILRIQTMLCDMLLRDAPVAIITQSPNVMDLVKCDGAALYYKNKFWLLGVTPTEAQIRDIAEWLLEYHRGNTGLSTDSLMEAGYPGASVLGDAVCRMAAVSITSRDFLFWFRSHTAKEIKWGGAKHDPGDKDDGRKMHPRSSFKAFLEVVKWRSLPWEDMEMDAI

SEQ ID NO: 6412 - protein, 327 aa, Chloroflexus aurantiacus
MRILVTGGAGYIGSITSAELIRAGHEVIVIDNLYQGHRAAVPPEATFIQADLANRQELSEIFAAYPGIDGIMHFASYTLVGESMEKPMLYLRDNVTNAGNLLEVAIAAGVRRFILSSTANLFDQPERIPIAEHERIVPGSPYGESKFFIERMLHWMARIYGMRYACLRYFNACGDTPERGEDHDPETHLIPIVLQVALGQRPHVTIFGDDYPTRDGTCVRDYIHVLDLASAHILAMEALDRLGERRYNLGNGQGFTVREVIETARKVTGHPIPAVVGPRRPGDPAVLVASSETIRAELGWQPRFPDLESIIASAWEWHRTHPHGYDD

SEQ ID NO: 6413 - protein, 457 aa, Arabidopsis thaliana
MASLGQITLPRAPSSEIGLLRRRFERPIIRTRIGFNGRIASVLTNAGDQAVSVKASVSQKVIEEEAKVIVGTYARAPVVLSSGKGCKLFDPEGKEYLDCASGIAVNALGHGDPDWLRAVTEQAGVLAHVSNVYYTIPQIELAKRLVASSFADRVFFCNSGTEANEAAIKFSRKFQRFTHPEDKEVATGFIAFTNSFHGRTLGALALTSKEQYRTPFEPIMPGVTFLEYGNIQAATDLIRSGKIAAVFVEPIQGEGGIYSATKEFLQSLRSACDAAGSLLVFDEVQCGLGRTGLMWAYEAFGVTPDIMTVAKPLAGGLPIGAVLVTEKVAETINYGDHGSTFAGSPLVCSAAIAVMDKVSKPSFLSSVSNKGRYFRDLLVKKLGGNSYVKEVRGEGLIIGVELDVPASSLVDACRDSGLLILTAGKGNVVRIVPPLVISEEEIERAVEIMAQNLTALD

SEQ ID NO: 6414 - protein, 305 aa, Miscanthus transmorrisonensis
IESVGEGVTDVAPGDHVLPVFTGECKECPHCKSAESNMCDLLRINTDRGVMIGDGKSRFSINGRPIYHFVGTSTFSEYTVMQVGCVAKINPQAPLDKVCVLSCGISTGLGASINVAKPPKGSTVAIFGLGAVGLAAAEGARIAGASRIIGVDLNPSRFEEARKFGCTEFVNPKDHKKPVQEVLAEMTNGGVDRSVECTGNINAMIQAFECVHDGWGVAVLVGVPHKDAESKTHPMNFLNERTLKGTFFGNFKPRTGLPNVVELYMKKELEVEKFVTHSVPFAEINKAFDLMAEGEGIRCIIRMEN

SEQ ID NO: 6415 - protein, 192 aa, Triticum aestivum
KRGRKPANGREEPLNHVEAERQRREKLNQRFYALRAVVPNVSKMDKASLLGDAISYINELRGKMTALESDKETLHSQIEALKKERDARPAAPSSGMHDNGARCHAVEIEAKILGLEAMIRVQCHKRNHPAAKLMTALRELDLDVYHASVSVVKDIMIQQVAVKMATRVYSQDQLNAALYGRLAEPGTAMQIR

SEQ ID NO: 6416 - protein, 392 aa, Janusia linearis
DLEPVNPADVPVTAAGALKSYKLAAKAISRLQSLPSGNISLLCDVLVKEVRDLTGYDRVMVYKFHEDEHGEVVSECRRSDLESHLGLHYPATDIPQASRFLFMKNKVRMICDCLAPPVKVIQDERLPQPLSLCGSTLRSPHGCHAQYMTNMGTIASLVMSVTVNEDDDTMDGDQQQMTRKLWGLVVCHHTSPQFVPFPLRYACEFLIQVFGVQINKEVELAAQVREKHILQIQTMLCDMLLRDAPVAIITQSPNVMDLVKCDGAALYFKNKTWLLGVTPTEEQIRGIAEWLLKYHSGNTGLSTDSLMEAGYPGASGLGDAVCGMAAVSITSRDFLFWFRSHTAKEIKWGGAKHDPDDKDDLRKMHPRSSFKAFLEVVKWRSMPWEDMEMDAI

SEQ ID NO: 6417 - protein, 203 aa, Kokia drynarioides
GYTPLFPRILGHEASGIVESVGEGVDDLKPGDHVLPIFTGECKECRYCLSEESNNMCELLRINCDRGVMLADGKTRFSINGKPIYHFVGTSTFSQYTVVHVGQVAKISPTAPLDKVCPISCGICTGFGATVNVAKPKKGQTVTVFGLGAVGLAAAEGARVCGASRIIAVDLNPRRFEEAKRFGITEFVNPKDYDKPVQEVIVE

SEQ ID NO: 6418 - protein, 173 aa, Helicobacter pylori
MNLDQLEVSHDADSLCVVIEISKHSNIKYELDKESGALMVDRVLYGAQNYPANYGFVPNTLGSDGDPVDALVLSDVAFQAGSVVKARLVGVLNMEDESGVDEKLLALPIDKIDPTHSYVKDIDDLSKHTLDKIKHFFETYKDLEPNKWVKVKGFENKESAIKVLEKAIKAYQG

SEQ ID NO: 6419 - protein, 775 aa, Rhodopseudomonas palustris
MSSRSDPGQPMASATDPSGRLALDLTECDREPIHIPGAIQPHGYLFVVSETDLRIASVSANVEDLLRQPPASLLNVPIAHYLTAASAARLTHALHGGDPAAINPIRLDVVTPDGERAFNGILHRHDSIVILELEPRDESRYTNEFFRSVRVAIRRLQTAADLPTACWIAASEVRRITGFDRIKVYQFAADWSGQVIAEDRDSGIPSLLDFHFPSSDIPAQSRALYTINPVRIIPDIGYRPSPLVPDINPRLGGPIDLSFSVLRSVSPTHLEYMVNMGMHAAMSISIVRDNRLWGMISCHNLTPRFVSYEVRQACELIAQVLTWQIGVLEEAEIVRHSVRMRAIQNRLLHELGDEQGLTAGLSRVSEEMLALMGASGFALCSFDGVAAFGRTPSDDEIQALASWLSHRESRGIFQTQQLSASFPEAEVYSDIASGLLAVPLGRASTTLMLWFRPEVAQTVTWGGDPHKPVQIGPRGRRLQTRASFEAWREEVRDRSRPWRSHEIVAAEEIRDLVVDVILGRAEELENANRELSRSNDELESFAYVAAHDLKEPLRHIEAFAGLLNDLLLPEARSRLSLMVNGIEASSRRLRALINDLAEYSRIGRQARPLQPVDLNQILTEVLSDLKPMLQDARAEVVSEPLPTVLCDGSQIRQLLQNLISNAVKYRDAERLPHVTIAATIDSPPPAAPAGANVRRARITIADNGIGFDEQYREQIFEPFQRLHGPDEYQGTGIGLAICRKIVHRHGGTISATSRVGEGSVFTFTLPLCDQDAAES

SEQ ID NO: 6420 - protein, 452 aa, Arabidopsis thaliana
MNSLTVEQVLKEKKTNDPDSVKELNLGHKALTDVSCLSKFKNLEKLDLRFNNLTDLQGLKSCVNLKWLSVVENKLQSLNGIEALTKLTVLNAGKNKLKSMNEISSLVNLRALILNDNEISSICKLDLLKDLNSLVLSRNPISEIGDSLSKLKNLSKISLSDCRIKAIGSSLKSCSDLKELRLANNEIKALPAELAVNKRLLNLDVGNNVITQLSGLEVLGTLSCLRNLNIRGNPISDNDKSAKKVRTLLLPSVNVFNAQPLEKSSRNAKHIRLDTDDETFDAYHNKSAEEEQSKEDRKRKKSSKRNKSEEEEVNNEDHKSKKKKSKSNTNVDQVETKKKEEHKEKTIPSNNDDDDDAEKKQKRATPKEELDAIDDAETSFAEIFSRENVPKGSEDGIEKKKKSSVQETGLVKVIDTKANKKKKKSEKKQSKSVVIDLPMEVEIGLGGESKWE

SEQ ID NO: 6421 - protein, 225 aa, Triticum aestivum
TFGGWFATLTVAGYTVLAVRNLVKTELIPDTEPVSKPSPFSTSEIWSWTAIFVASFGVAYFNPTALGTTAKTCLPFLLAANVLGYMVGSGLPAGVKKVLHPVISCALSADLAAAAYGYLSGSGFDAVLGDYLTKAASNPGAGDILMGFLGSVIISFAFSIFKQRKLVKRHAAEIFTSVAIGATFSLYSTAIIGRLVGLEPSLTISMLPRCITLALALSIVSFFEG

SEQ ID NO: 6422 - protein, 348 aa, Schizophyllum commune
TSNDLLQPFLALDQGDKVQAEYVWIDGDGGLRSKTTTVSKKVTDIGQLRIWDFDGSSTNQAPGNDSDVYLRPAAIFKDPFRGGDNILLLAECYNNDGTPNRTNHRHNAKKTMDLAKDEHPWFGIEQEYTLFGEDGRPYGWPKGGFPGPQGPYYCGAGAGKVFARDLIEAHYRCCLYAGINISGINAEVMPSQWEFQVGPCEGITMGDHLWMARYLLIRVAEQWGITVSFHPKPLAGDWNGAGGHTNYSTEGMRNPGGIQAISAAIEKLAKKHNEHIAVYGEDNDLRLTGRHETGHIGSFSSGVANRGASIRIPRNVAAQGFGYLEDRRPASNIDPYRVTDMIVQTTCL

SEQ ID NO: 6423 - protein, 234 aa, Dunaliella salina
KAQEPWFGIEQEYTLLNSVTKWPLGWPKGGYPAGQGPYYCSVGAGRSIGRDIPEVHYRCCLHAGIQISGVNGEVLPSQWEYQVGPVEGIAMGDQMWMSRYLMYRVAELFNVEVTFDPKPIPGDWNGSGGHVNFSNRQPESPPAGKQSRSSAKKLGKRHRWHIAAYGEGNERRLTGKHETSSMNDFSWGVANRGCSIRVGRMVPVEKCGYYEDRRPSSNLDPYVVTRLLVETTLL

SEQ ID NO: 6424 - protein, 538 aa, Phanerochaete chrysosporium
MLVSVDALALRTLVYELTYLLYPAVPTAAALILLQRFGNVWLPTWTIVLLSLCNVPVAHRILVWLKDGRRWPGSIDLLRQLTQTFETGFLSEMLWGYMHVLGQTFEVYILWDSNYVTSDANVIKTILATDFDNFVKGEKLDVCVRPVLGTGVFNSDGEMWKFHRSMTRPFFTRERISHFDLFDRHADATMAKMKARLAEGFAVDFQDLISRFTLDSATEFLFGQCTTGASRTEDFARAFAEAQDAVSFRLRMGWLWPDAVARADKIKRENGGRVPEVKGEIEEDETLLDHLVNVVQTKILHDEVLNIMIAGRDTTGGTLTSAVYFLSQYPEVLRRLREEILEKVGPTRRPTYDDIREMKYLRAFINETLRLYPAVPWNVRYPVKDTTIPGPHPDKPYFIPANTPVSYSVHCMHRRTDYWGPDAEAFDPDRFLDARVQRYLTPNPFIFLPFNAGPRICLGQQFAYNEMSFFVIRLLQHFDEVQLCEDALAPDCRVPDAWRGAPGRKGVERFWPKAHLTLYAKGGLWVKMREASTSEAVV

SEQ ID NO: 6425 - protein, 186 aa, Desulfitobacterium hafniense
MTLHAGIVGLPNVGKSTLFNAITQAGAEAANYPFCTIDPNVGMVQVPDARLQVLAEMVHPDKIVPATVEFVDIAGLVKGASKGEGLGNKFLSHIREVDAVVHVVRCFEDSNVVHVEGSVDPKRDIDIIQLELILADMESVEKRLERSAKLLKSGDKKAQVEVALLNRLKETWMPVCSPFLGFSDES

SEQ ID NO: 6426 - protein, 351 aa, Agrobacterium tumefaciens str. C58 (Cereon)
MVDYRYLGRSALKVSPLSLGTMMFGGPTPDDVAYRIIDKAREQGINFIDTADVYHDGKSEEVVGRGIKASRDHWVLATKFVNSHTKGPNLGGHSRKWVIETVENSLRRLNTDYIDILYFHRAVFDAPLEEPVRAIADLIRAGKLRYFGVSNFRGWRIAEISHLADQLGIDRPVASQPLYNIVNRTAEAEQLPAANHYGLGVVSYSPLARGVLTGKYQPGEQPGADTRVGRGDKRVLETEWRPESVEIAQKVAAHAASKGVSAADFALAWVLNNKFVTAAITGPRTEEHWNSYVRALDVKIDAEDEALVDSLVTTGHPSTPGFNDPSHPVEGRVPRNVEPAPRPALKPRAVA

SEQ ID NO: 6427 - protein, 421 aa, Halomonas elongata
MQTQILERMESDVRTYSRSFPVVFTKARNARLTDEEGREYIDFLAGAGTLNYGHNNPHLKQALLDYIDSDGIVHGLDFWTAAKRDYLETLEEVILKPRGLDYKVHLPGPTGTNAVEAAIRLARVAKGRHNIVSFTNGFHGVTMGALATTGNRKFREATGGVPTQAASFMPFDGYLGSSTDTLDYFEKLLGDKSGGLDVPAAVIVETVQGEGGINVAGLEWLKRLESICRANDILLIIDDIQAGCGRTGKFFSFEHAGITPDIVTNSKSLSGYGLPFAHVLMRPELDKWKPGQYNGTFRGFNLAFATAAAAMRKYWSDDTFERDVQRKARIVEERFGKIAAWLSENGIEASERGRGLMRGIDVGSGDIADKITHQAFENGLIIETSGQDGEVVKCLCPLTIPDEDLVEGLDILETSTKQAFS

SEQ ID NO: 6428 - protein, 249 aa, Glycine max
  unsure (1)..(249): unsure at all Xaa locations
MSTLDATRAELGLLVLYLGKAEARDKICRAIQYGSKFLSNGEPGTAQNVDKTTSLARKVFRLFKFVNDLHALISPTPQGTPLPLILLGKSKNALLSTFLFLDQFVWLGRTGIYQNKERTELIGRISLYCWLGSSVCTTLVEXGRLGRLSSSMKKLEKXFKNQNKYDNEQYRAKLNKSNEENFLSTFQSKELNPVVSXGLLQLAPXQVLPRVTGAXFGFVSSLIXSCYKLLPCPTQVQNFVKCGRIKWFP

SEQ ID NO: 6429 - protein, 590 aa, Zea mays
  unsure (1)..(590): unsure at all Xaa locations
MSSAAGGYGGGGGAGSGAEPHGHADFLLHHHAQHVAAQQLYHVPQHSRREKLRFPQDDAPPHASASVPQQHGGAVAWPPPPPPPAFYSYASSSTSSYSPHSPTXLAQAQLVVAHGLAPPLSSQIPXTRTCALSLSSSSSNPPPPPPQPRRPHAAPFGPFTGYAAVLGRSRFLLPAEKLLEEICDVGGAASRVDRSASDEGLLDADPMESIDHEMDGADRVANDAGPISGAEQQWKKTRLISMMEEVCKRYRLYYQQVHTVINSFETVAGFSNAAPFAAMALRAMAKHFKCLKGMILSQLRNITKAPAGKEGLSKDIAMFGLAGGSAAALQRGSSVGAFGQXPHNIWRPQRGLPERAVSVLRAWLFEHFLHPYPTDGDKQMLAKQTGLTRNQVSNWFINARVRLWKPMVEEIHNLEMRQVHKHPVLDKGQHVLHHQTQHSFESSGKPSDPSDSQLGQSSSITRNHNIPASQGFADELSEMSHSIQQGQVTFAYNGMSAPHHSLASSQHHQQAGPMSGIGGAGNGGVSLTLGLHQNNRVCIAEPLPASVPPNLAHRFGLEEVSDPYMMGSFGNQDRHFGKEIGGHLVHDFVG

SEQ ID NO: 6430 - protein, 380 aa, Pichia angusta
MSTVGKTITCKAAVAWEAGKDLTIETIEVAPPKAHEVRVKIAYTGVCHTDGYTLSGNDPEGQFPVIFGHEGAGVVESVGEGVTSVKVGDHVVCLYTPECRECKFCKSGKTNLCGKIRATQGKGVMPDGTSRFTCKGKTLLHYMGCSTFSQYTVLADISVVAVDPKAPMDRTCLLGCGITTGYGAAINTAKISEGDNIGVFGAGCIGLSVIQGAVKKKAGKIIVIDVNDAKKDWAFKFGATDFVNPTKLPEGQSIVDKLIEMTDGGCDFTFDCTGNVQVMRNALEACHKGWGESIIIGVAPAGKEISTRPFQLVTGRVWRGCAFGGIKGRTQMPDLVQDYMDGEIKVDEFITHRHPLNDINQAFHDMHKGDCIRAVVTMDE

SEQ ID NO: 6431 - protein, 376 aa, Zea mays
MGVKLRLPPHQLAKSLPVQRRAPTLGSTSAASAPGCLLRGAPLVRAPRRRRRRRRRRRRRRDARPSPEAQPSPPTLGYILCWRQSIAPQFATQSSSAPPRLTPARAAHLWIRPASLRPGGGARFRQAWVRASGSGAEDDGVAGAERAGDGRPEGDPGGARRPAATPFRARGESILSPRSWCPRGFATPSQFTTHRRLPQHGPLTLATASARLIPAGSSSSAKRAYRRPDPGPKMTESLVRNKPGMASIKEMPVVQDGPPPGGFAPVRFARRIPTSGPSATAIFLTTFGAFAYGMYQVGQGNKVRRALKEEKIAARSAILPMLQAEEDERFVKEWKKYLEEEARIMKDVPGWKVGESVYNSGKWMPPATGELRPEVW

SEQ ID NO: 6432 - protein, 386 aa, Chasmanthium latifolium
PALSIAGAVQSQKLAVRAISRLQALPGGDVKLLCDTVVEHVRELTGYDRVMVYRFHEEEHGEVVAESRRDGLEPYLGLHYPATDIPQASRFLFRQNRVRMIADCHATAVRVIQDPGLSQPLCLVGSTLRAPHGCHAQYMANMGSIASLVMAVIISSGGDDEQTSRGGMSSAMKLWGLVVCHHTSPRFIPFPLRYACEFLMQAFGLQLNMELQLAHQLSEKHILRTQTLLCDMLLRDSPTGIVTQSPSIMDLVKCEGAALYYHGKYYPLGVTPTESQIKDIIEWLMLCHRDSTGLSTDSLADAGYVSAAALGDAVCGMAVAYITPSDYLFWFRSHTAKEIKWGGAKHHPEDKDDGQRMHPRSSFKASLEVVKSRSLPWENAEMDAIH

SEQ ID NO: 6433 - protein, 463 aa, Listeria innocua
MTKVNSFFRKKSFHNPATDKHHLNKTLGAFDLTMLGVGAVVGGGIFILPGQVASVIAGPGIIISFIIAGIACCLAALCYSEFASKLPVAGSAYTYSYHVFGEGVAWILGWSLILEYGLAVAAIASGWSSYMKSLLAGFDLHIPTAISSAYNPSAGTYFDLLAFVVVMVIGILLSFGIRESTRVNNIMVLVKIAVVVLFIIVGAFYVKPDNWTPFLPFGVQGVITGASTVFFAYIGFDAVSSAAEEVKNPQKNMPIGIIASLAVCTLLYILLSAVLTGVVPYTDLVGVSAPVAFALQAINQNWIAGLLSVGAIVGMTTVVLVMSYGGTRLLFAMGRDGLLPKSFSKISKNDTPVRNTMIFATVMGLIASTVPMEDLAQLINIGTLFAFAMVSVGIFFLRRNPELNQKGFKTPFYPVVPALSFLLCVYLMLNLSKTTWIAFGVWFVLGIIVYTFYGRKHSALRLK

SEQ ID NO: 6434 - protein, 246 aa, Gerbera hybrid cv. 'Terra Regina'
MSFPNDSGEMSPQRKLGRGKIEIKRIENTTNRQVTFCKRRNGLLKKAYELSVLCDAEVALIVFSSRGRLYEYANNSVKGTIDRYKKACLDPPSSGSVAEANAQFYQQEAAKLRQQIANLQNQNRQFYRNIMGESLGNMPAKDLKNLESKLEKGIGKIRSKKNEILFAEIEYMQKRENELHNSNQFLRSKIAENERAQQHMSLMPGSSDYELVAPHQPFDGRNYLQVNDLQPNNNYSCQDQTPLQLV

SEQ ID NO: 6435 - protein, 459 aa, Xanthomonas campestris pv. campestris str. ATCC 33913
MSDPSAPDHLQRSLSNRHLQLIAIGGAIGTGLFMGSGRTISLAGPSILFVYLIIGVMLFFVMRAMGELLLSNLDYKSFIDFSTDLLGPWAGFFCGWTYWFCWIITAIADVIAIAAYAQFWFPELAPWVPAVLCVLLLLALNLVTVKLFGEMEFWFALIKIIAICALIITGAGLVMWGFRSPSGHVASLSNLWNDGGMFPMGIGGFFAGFQIAVFAFVGIELVGTTAAETADPQRNLPKAINSIPVRILIFYVLALIAIMAVTPWRQVVADKSPFVELFVLAGVPAAASLINFVVLTSATSSANSGIFSTSRMLYGLAEERNAPRGFAKLTRAAVPARGLLFSCICLLLGAMLVYLIPDLVTAFTLVTTLSAVLFMFVWSLILCAYIAYRRKRPEQHAASAFKMPGGVLMCYVCLAFFAFIIVLLTLQPDTLHALLVSPLWFLVLAIAYWVRRNQSPTAR

SEQ ID NO: 6436 - protein, 352 aa, Emericella nidulans
MSVPEVQWAQVVEKAGTPPVYKQVPVPKPGPDEILVKMRYSGVCHTDLHAMKGDWPLPSKMPLIGGHEGAGVVVAKGELVKDEDFKIGDRAGIKWLNGSCLSCEMCMQADEPLCPHASLSGYTVDGTFQQYTIGKAALASKIPDNVPLDAAAPILCAGITVYKGLKESGARPGQTVAIVGAGGGLGSLAQQYAKAMGLRTIAIDSGDEKKAMCEQLGAEVFIDFSKSADVVADVKAATPGGLGAHAVILLAVAEKPFQQATEYVRSHGSVVAIGLPANAFLKAPVFTTVVRMINIKGSYVGNRQDGVEALDFFARGLIKAPFKKAPLQDLPQIFELMGQGKIAGRYVLEIPE

SEQ ID NO: 6437 - protein, 81 aa, Brassica rapa
  unsure (1)..(81): unsure at all Xaa locations
PKELRNLEGRLDRSINRIRSKKNELLFAEIDYMQKREVDLHSENQRLRAKIAENERXNPSMNLMPGGYEQTMQPPQTQSQP

SEQ ID NO: 6438 - protein, 463 aa, Glycine max
MGAVYFSQSCYKPRQIFNLERESTLVGRCPVVQIRCRRVVSACLNVDVDAPNTGNTTSEKKKTKDVIEMEGMYLVGTYARTPVVLERGEGCKLYDVEGNEYLDLSAGIAVNALGHGDADWLKAVVEQAGTLTHTSNIFHTIPQVELAKRLVASSFADRVFFANSGTEANEAAIKFARKYQRHTTSNGKVPATEFIAFSNCFHGRTLGALALTSKVQYRMPFEPVMPGVTFLEYGNAQAAVELIKQGKIAAVFVEPIQGEGGIYSATKEFLQSLHSACDEAGALLVFDEVQCGLGRSGFLWAHEAFGVFPDMMTLAKPLAGGLPIGAVLVTERVASSINYGDHGSTFAGNPLVCSAALAVFDKISKPDFLSSVSKKGLYFKELLKQKLGGNQHVKEIRGVGLIIGIDLDVPASPFVDACRNSGLLVLTAGKGNVVRLVPPLIITEKELELAADILCKTLPVLDN

SEQ ID NO: 6439 - protein, 325 aa, Scutellaria baicalensis
MACMATSFRPIFSIAALVLLLTLVPSEAQLSATFYDSTCPNAVSTIRTSIRQAVSAERRMAASLIRLHFHDCFVQGCDASILLDETSTIQSEKTAGPNAGSVRGFQVIDAAKTAVERLCPGVVSCADILTLAARDASVAVGGPSWTVRLGRRDSTTANRAQANTDLPGPTSTLTQLITRFDAKGLNAREMVALSGAHTLGQSQCGNFRARIYSNGSDIEANFASTRRRQCPQDGSGDSNLAPLDLVTPNSFDNNYYRNLVARRGLLQSDQVLLSGGETDAIVTSYSSNPATFASDFANAMIKMGEIQPLQLGQNGIIRRTCGAVN

SEQ ID NO: 6440 - protein, 136 aa, Oryza sativa
MSSPFPSHLPTVARRTTHGRHAGRRTGGRGEGCGTAHRRDGIQGDTGGKRARYYCPTCPYVCPVKNKIVKKASLVKKEVEPIFSDSDVKNAPKTTTTCPRCQNGEAYYRQMQIRSADEPMSTFYKCCKCQFDWRED

SEQ ID NO: 6441 - protein, 138 aa, Enterococcus faecalis
AYEVPLDKAAVTREGTDVSIITYGAMVREAIKAADSLAKDNISAEIIDLRTVAPLDVETIINSVEKTGRVVVVQEAQKQAGVGAMVVSEISERAVLSLEAPIGRVSAPDTIFPFGQAENIWLPNAKDIEAKAREIVEF

SEQ ID NO: 6442 - protein, 245 aa, Putterlickia verrucosa
ALSIAGAVQSQKLAVRAISQLQSLPGGDIELLCDTVVESVRDLTGYDRVMVYKFHEDEHGEVVAESKRSDLEPYIGLHYPASDIPQASRFLFKQNRVRMIVDCHASPVRVIQDDGLMQPLCLVGSTLRAPHGCHAQYMENMGSLASLAMAVIINGNEEEAIGGRSPTRLWGLVVCHHTSARCIPFPLRYACEFLMQAFGLQLNMELQLAAQLLEKHVLKTQTLLCDMLLRDSPTGIVTQSPSIMD

SEQ ID NO: 6443 - protein, 393 aa, Eupomatia laurina
DLEPVNPADVPVTAAGALKSYKLAAKAISRLQSLPSGNISLLCDVLVRELSELTGYDRVMAYKFHEDEHGEVIAECRRLDLEPYLGLHYPATDIPQASRFLFMKNKVRMICDCSAPPVKVIQDKRLEQPLSLCGSTLRAPHGCHAQYMANMGTIASLVISVTINEDDDETPGEQQQKGRKLWGLVVCHHMSPRFVPFPLRYACEFLIQVFGIQLNKEVELAAQTREKHILRMQTMLCDMLLRDTPIGIVTQSPNVMDLVKCDGAALYYQNQFWLLRTTPTETQIRDIIGWLLEYHGDTTGLSTDSLTEAGYPGAADLGDDVCGMAAVKISSKDFLFWFRSHTAKEIMWGGAKHGPVDKDDDGRKMHPRSSFKAFLEVVKRQSLPWEDMEMDAI

SEQ ID NO: 6444 - protein, 108 aa, Zea mays
  unsure (1)..(108): unsure at all Xaa locations
MSHEQPRRPSGHDETSGXDSMXAVRYCDLFPAVSGGLAEKPVAPQDASTMQSAENLVFGQTLNGGPAAAMQFAVTANERMGAVGHDQATDATAVQGFTVFXTRVPGGG

SEQ ID NO: 6445 - protein, 505 aa, Emericella nidulans
MPSFSLLTGHFGALKQTIDGMPPNATLHSIMLKLSQKFRSGMFYINMWPFSGTWLVVATPSGAAQIQSLNLSKPNILRRPLETITGGPSLMSMHGETWKRWRALFNPGFNPNYLIGLAPLIADEVVVFCEQLRQKARTGTVFQLEPLTLRLTVDTICSVTLYVVTPVGRWPFLTPDLEIHSSTTKLRTTPLPQRCNGRSNGPRLELPSTPLRRYLTVRPLVMWYNNRLMNRFIDQEVDRAYREQSGRQSKSVISLALRDYMKEKDGSLEDFKRRVAPQLRVFLFAGRDTTSSTLLYAFYLLSRHPEALAKVRLEHDQVFGPYHQQVHEKIHQDAKLLNQLPYTTAVLKETLRLFPPSASMREGGPGVEITDDNGQVYPTAGCNVWTLTVALHHNSAHWAEAESFIPERWLVGSDHPLYPAKGAWRAFEFGPRSCIGQTLAMLELRVALAMTLREFDIAPAYDKWDHIYPNDAVKEFNGHRAYQAEKGGGGAHPADGMPCLVTFRV

SEQ ID NO: 6446 - protein, 365 aa, Yersinia pestis KIM
MRLAMKKTYRIAAIPGDGIGHEVMPEGINVLQAAALRWDLDISFENIEWASCEYYQHHGQMMPNDWQRQLQCFDAIYFGAVGWPATVPNHISLWGSLLKFRRDFQQYVNLRPVRLFPGIPCPLVGKQPGDIDFYVVRENTEGEYSSVGGRLFEGTEQEMVLQASIFTRRGVDRILKYAFELAQMRPRKRLTSATKSNGLAFSMPYWDERFEVMAAQYPQISADKQHIDILCARFVLNPERFDVVVASNLFGDILSDLGPACAGTIGIAPSANLNPERDFPSLFEPVHGSAPDIYKRNIANPIAMIWAGAMMLDFLGQGDERYHAAHNGILNAIEQVIAQGPKTPDMCGDASTQQVGSAIVQVLSH

SEQ ID NO: 6447 - protein, 281 aa, Oryza sativa
  unsure (1)..(281): unsure at all Xaa locations
ARAELGEEPGDAPRGITVHPSGDELVCATAKGCRLFKLIFEEFTVRLISRDAPPLESVGPQKCLAFSTDGSKFAIGGEXRXGDEKIECCRFSRDGMKPFLFCTVAKGNKVVTVVWNISDWSRIGYKRLLGKPISTLSVSMDGKYLALGSHDGDFCAVDVKKMDVSHWSKKAALHNVLSGMAVISTSHQWGAELTKLNVPADWKEWQVWLILLSLFLVSAILFYMFYERSDSFWNFPMGQHQPAKPWSVMKESPPVPEDQNPCRSTAPVCIGRGGARAHAAQ

SEQ ID NO: 6448 - protein, 135 aa, Zea mays
EALRKRNVAGPLLLFNLALYVSMLGFASWALNAFVDNIGDHQYYAGDKAMLHFLQFALLAAVLGSAAKAAAAFHARALWRPQGLAAAAALGTVAWAATALALGLACKEMRAAAAAARGWQMRTLEAVTAVLAVTQ

SEQ ID NO: 6449 - protein, 430 aa, Glycine max
  unsure (1)..(430): unsure at all Xaa locations
MSARSEHQSVPLSVLLKRELANEKIEKPEVVILHGQASENKKGEDFTLLKTECQRVLGDGXVSTYSVFGLFDGHNGSAAAIYAKENLLNNVLSAIPSDLNRDEWVAALPRALVAGFVKTDKDFQEKAQTSGTTVTFMIVEGWVLTVASVGDSRCILEPSEGGIFYLSADHRLESNEEERVRITSSGGEVGRLNTGGGTEVGPLRCWPGGLCLSRSIGDMDVGEFIVPVPHVKQVKLSTAGGRIILSSDGVWDALSAEMALDCCRGMPPEAAATHIVKESVQAKGLRDDTTCIVIDILPLEKPPTSVPTQKKPVKGMLKSIFRKKSSESSTFIEKEYLEPDVVQELYEEGSAMLSERLETKYPLCNMFKLFICAVCQVEIKPGEGISIHEGLTNPGRLRPWDGPFLCSSCQEKKEAMEGKRTSDRLSSGSD

SEQ ID NO: 6450 - protein, 160 aa, Zea mays; identical to SEQ ID NO: 5864

SEQ ID NO: 6451 - protein, 305 aa, Miscanthus sinensis var. sinensis
IESVGEGVTDVAPGDHVLPVFTGECKECPHCKSAESNMCDLLRINTDRGVMIGDGKSRFSINGKPIYHFVGTSTFSEYTVMHVGCVAKINPQAPLDKVCVLSCGISTGLGASINVAKPLKGSTVAIFGLGAVGLAAAEGARIAGASRIIGVDLNPSRFEEARKFGCTEFANPKDHKKPVQEVLAEMTNGGVDRSVECTGNINAMIQAFECVHDGWGVAVLVGVPHKDAEFKTHPMNFLNERTLKGTFFGNFKPHTDLPNVVELYMKKELEVEKFITHSIPFAEINKAFDLMAKGEGIRCIIRMEN

SEQ ID NO: 6452 - protein, 491 aa, Spinacia oleracea
MTSKPVPTTTVQPERIRVLKPGSNPNGAVVYWMFRDQRVRDNWALIHAVDEANKRNAPVAVAFNLFDGFKGANARQLGFMLRGLKLLQASLHNSLHIPFFLFQGEVVETIPKFLVECGASLLVTDFTPLREIRGFKEELCKRVGDSVSIHEVDAHNVVPVWEASSKLEYGARTIRTKINKLLPTYLTDYPILQPPNCSWESSSPVIQWDQLIEDRLKKGAEVPEIDWCKPGETAALEVLKGSQNGFLTKRLKSYATDRNIPLKPGALSGLSPYLHFGQISAQRCAFEARNVRKVAPEAVDAFTEELIVRRELADNFCYYQPNYDSLMGAWEWARKTLMDHASDKREHLYTREQLEKAQTADPLWNASQLEMVHFGKMHGFMRMYWAKKILEWTSGPEEALAIAIYLNDKYEMDGRDPNGYVGCMWSICGLHDQGWRERPVFGKIRYMNYAGCKRKFNVDGYIAYVRKLVVDTKKRKAEADISSEKKKEPRC

SEQ ID NO: 6453 - protein, 174 aa, Pseudomonas putida KT2440
MKYRLGDLRVESHPTSWAAPNATLIGNVRLQAHSSVWFGAVLRGDNELIDIGEGSNVQDGTVMHTDMGSPLTLGKGVTVGHNAMLHGCTVGDFSLVGINAVILNGARIGKHCIIGANALIAEGKEIPDGSLVMGSPGKVVRELTEQQKRMLEASAAHYVHNAQRYARDLVVDDE

SEQ ID NO: 6454 - protein, 353 aa, Xylella fastidiosa 9a5c
MRGYVLEAKGTAKWKDVPMPVLGPNDALVRPTAVATCTTDVHMIATAALPKTVGKVIGHEAVGVVEKVGENVKAFRPGDRVVLPCGNSDWRHPRAQRGEAKYYQTNSPYYSDDPSIGGVFSEYVRTLDADLNLARIPDKVSDLQAVMLPDMAATGFTGVERLGIQFGETVLVMGLGPVGLMAVAGAALRGAGRIIGVDSRPNTVELARAYGVTDIVDFTGGQTLEKVMALTAGQPVDSVLIASGGTASEVFTTALKAVKFGGRVACVSGFLHDESVTIPLEVWNYGFMEKFLTGVHVQDGRDWIERLLAMLECGRFDTRPLVSHVLHGWDSLEQGIELMRSRDPAVIKPVIVI

SEQ ID NO: 6455 - protein, 432 aa, Daucus carota
MAQILAPSVQWQMRFTKNSTEVSSMTSKMWGSLFLKQNKKAPARSSTKYRALAVKSEDGTINRMEDLLNLDVTPYTDKIIAEYIWIGGTGIDVRSKSRTISKPVEHPSELPKWNYDGSSTGQAPGDDSEVILYPQAIFKDPFRGGNNILVICDTYTPQGEPIPTNKRHKAAQIFSDAKVLGEVPWFGIEQEYTLMQQDVNWPLGWNVGGYPGPQGPYYCAAGADKSFGRDISDAHYKACLYAGINISGTNGEVMPGQWEFQVGPSVGIEAGDHIWCARYLLERITEQAGVVLTLDPKPIDGDWNGAGCHTNYSTKSMREEGGFEVIKKAILNLSLRHKEHISAYGEGNERRLTGKHETASIDSFSWGVADRGCSIRVGRDTEKEGKGYLEDRRPASNMDPYVVTGLLAETTLLWEPTLEAEALAAQKLSLNV

SEQ ID NO: 6456 - protein, 367 aa, Hyacinthus orientalis
MGDPVTFQFFPVGEPEEEESPGGESTVAAGGAPRGHWAEVKFVEKEADVSPAIKKSRRGPRSRSSQYRGVTFYRRTGRWESHIWDCGKQVYLGGFDTAHAAARAYDRAAIKFRGVDADINFNLSDYNEDLKQMMNLAKEEFVHILRRQSTGFSRGSSKYRGVTLHKCGHWEARMGQFLGKKAYDKAAIKSSGREAVTNFEPSSYEREVLTEADSDAIGHDIDLNLRISQPNVSSPKRRDNPVGVQFHLGSFESSDAKKAMIDTHSSILVGQPHTAAMTSEASRVWSALYPGFYPPIELRAKDKMSMVGSAALPNWTWQLHGPMPSPMFTSAASSGFATTHATSSITPPASHHLQFPPPPNTNYYSRS

SEQ ID NO: 6457 - protein, 892 aa, Methanosarcina barkeri
MTNERVVQLISVAKEKNLTNLNLSGNQLTQVPQEIGELKNLTMLDLSENTLTILPQEIGELKNLKTLDLSGNQLIQLPSEIGRLKNLTILNLYDNQLTQLPPEIKELKNLTALTLFNNKLTQIPPEIGKLKNLETLYIYCNQLTQLPPEIGELKNLSILALNKNKLTQLPSEIGNLKNLETLSLYRNQLIELPPEIGKLENLKTLYIDNNKLTILPPEISELKNLITLNLSANPLTSPPPEIVSRGLEAIFTYLNQSKTTENNEAKLVLVGNGEVGKTCLAYRLIYDNFLEDSKITEGINISKWKIPAPDSGNSEIKLNIWDFGGQEIYHATHQFFLTKRSLYLLLWNARKTKDYDNIYYWLHTIEAFGEDSPVILVMSKMNESNDDLNLKDLKNKFPQIVDYLKIDSKDGKGISILKEKISETAWDLPLMKAKWVDSWFKVRQKLEDLNENWINYYRFYDICKSEGLDEKNITVLDDYLNDLGVTLHFKDRLTLKNIVILKPEWATGAFYKILSTKSVLDNEGALPQSELSQIWNTKTYPPSVHPQLMELMNKFELSYELPDKSNYLIPELLPKNEPDNFEWNKEDDLCFYYCYDYFLPSGIITRFIVRMHENLVIKENGMPLCWREGAVLKFQNSSALVKMKPDERQIEIRIKGNNKRWVLGAICSHLDEINASIKKIKVSKQIPCNCSENCPQRYLYEDLLKAEVANLGNLICYKSFKSVPVSLLLDGYSRKEERLREYDYELYGNRPIFVITQKAEAQSKSLSTIKAEQRTNISVDVNIDLKIDLPEIQKEFNKLKKEIKTLNPELGSELDEIQDSLDEVSANSDTDKLNKPLNKVRRILEELNDPDSDYNKVIKGTEKGIEYAQKLGRTYNKFAPWIGIPKVPDPLL

SEQ ID NO: 6458 - protein, 348 aa, Leptospira interrogans serovar lai str. 56601
MGIMGMKAAVLESGKKILEIRDVSVPQLRAEQVKVRIKACGICGSDVHLVVHGTLKCKHFPRVPGHESSGIIEEVGENVRRFRKGDRVVIAAGTSCGVCSYCKEGKENLCKDLGVFGFDRDGSFAEFNIVEERYLYSLPDEIPFDQGAILADAVSTPYHAIRYRGNIQESDTVAIFGCGGLGIHAVAIARAMTKGKVIALDVDSGALENATKYGADEVVNLKEVRNSGKVLKEVSKGVDLLADFSGYMSNVEDSIRAMNPGGRIVLVGIGRQPLKFQIPFILIEKMISVSGSYGSDRRAIPELIELYLKGKINLSHSITSHHPLEELNECLEALDQRKGNPIRFIVEP

SEQ ID NO: 6459 - protein, 253 aa, Rhizobium sp. NGR234
MLLKGKTAVISGAASKRGIGRATAELFASHGARVAILDINADEAKAAAGDLPPVEHGAHIGLRCDVADRASCTSASDEVLSAFGVANILINNAGITQPVKTLDISDADWQRIVAVNMTGVLNLSQVFIPNMRQNGGGSIACMSSVSAQRGGGIFGGPHYSAAKAGVLGLAKAMAREFGPDSIRVNCVTPGLIQTDITGDKLSAEMRADIVKGIPLSRLGDARDVANIYLFLASDLSAYVTGAVIDVNGGMLIH

SEQ ID NO: 6460 - protein, 185 aa, Zea mays
  unsure (1)..(185): unsure at all Xaa locations
LEAGRTLRAFSEVGWLLLPHRFVFRFWFVGEREEMAASDVEYRCFVGGLAWXATDDHSLNNAXFSTYGEVLESKIILDRETQRSRGFGFVTFXSTEDAMRSAIEGMNGKELDGRNITVNEAQSRGGXRGGGGGGYGGRAXRDGGGYGGGGGGYGGGRGGYGGGGGYXGGANRGGGYGNNDGNWRN

SEQ ID NO: 6461 - protein, 158 aa, Glycine max
  unsure (1)..(158): unsure at all Xaa locations
MASADVEYRCFVGXLAWATDDHALERAFSQYGEIVETKIINDRETGRSRGFGFVTFASEXQSMKDAIGAMNGQNLDGRNITVNEAQSRGGGGGGGGGGYNRGGGGYGGRSGGGGGGYRSRDGGYGGGYGGGGGGGYGXGGRDRGYSRGGDGGDGGWRN

SEQ ID NO: 6462 - protein, 240 aa, Triticum aestivum
SQGSSCSQHCQKDESEEIVDSINPVTVAGYREEKGTAGSTSAITAVRAPGSRSSCFHGVTRHRWSGKYEAHLWDSTCRVEGRRRKGKQVYLGSYDTEQKAARAYDVAALKFFGLNTKLNFSISEYEKELADIQDMSPEECVTYLRRRSSCFSRGASIYRGVTRRQKDGRWQARIGLIAGTRDIYLGTFKTEEEAAEAYDIAAIEIRGKNAVTNFDRSNYMDRGMHCIEGAGLKLLATKPE

SEQ ID NO: 6463 - protein, 177 aa, Salmonella typhimurium
MKYTILSLVAGALISCSAMAENTLTVKMNDALSSGTGENIGEITVSETTYGLLFTPHLNGLTPGIHGFHVHTNPSCMPGMKDGKEVPALMAGGHLDPEKTGKHLGPYNDKGHLGDLPGLVVNADGTATYPLLAPRLKSLSELKGHSLTIHKGGDNYSDKPAPLGGGGARFACGVIEK

SEQ ID NO: 6464 - protein, 393 aa, Danthoniopsis dinteri
EPASTEDPALSIAGAVQSQKLAVRAISRLQALPGGDVKLLCDTVVEHVRELTGYDRVMVYRFHEDEHGEVVAESRRDDLEPYIGLHYPATDIPQASRFLFRQNRVRMIADCHATPVKVIQDTGLSQPLCLVGSTLRAPHGCHAQYMANMGSIASLVMAVIISSGGDDEQTARGGISSAMKLLGLVVCHHTSPRFIPFPLRYACEFLMQAFGLQLNMELQLAHQLSEKHILRTQTLLCDMLLRDSPTGIVTQSPSIMDLVKCDGAALYYHGKYYPLGVTPTESQIKDIIEWLTLCHGDSTGLSTDSLADAGYLGAAALGDAVCGMAVAYITPSDYLFWFRSHTAKEIKWGGAKHHPEDKDDGQRMHPRSSFKAFLEVVKSRSLPWENAEMDAIH

SEQ ID NO: 6465 - protein, 120 aa, Oryza sativa
  unsure (1)..(120): unsure at all Xaa locations
MSRSGGAXPSPVNAMGFLEDFQASVXSIASYAQRNYSLMRDXDKSLQGVQTGNEQXCQQEIEDIKHGLAGSITYDPAKLKFSDEAIEEQKHCVRIADEKVALXVQTYDLVDAHIQQLDQX

SEQ ID NO: 6466 - protein, 175 aa, Zea mays
MSEQDGQHVGGSPPDAAIESFSQLPFVRPKPPQPASSSSPSSIRLFGFEVPPDAATSSTATSDATAASATVAGQAAASGAAGAGAGASDGTGGGRKFECHYCCRNFPTSQALGGHQNAHKRERQHAKRAQYQSAMAMHHAHYPGHPHAYPAFTSYHQQQRFGMARYEPPPPGPPP

SEQ ID NO: 6467 - protein, 174 aa, Bacillus halodurans
MLYPYKDKKPKIAENVFLADYVTITGDVTIGADSSIWYNTVIRGDVSPTFIGERVNIQDNSVLHQSPRTPLVIEDDVTVGHQVILHSCTIRKEALIGMGSIILDGAEVGEGAFIGAGSLVPQGKKIPANSLAFGRPAKVVRTLTEEDRKDMARIRREYVEKGQYYKQVQQEYRS

SEQ ID NO: 6468 - protein, 258 aa, Streptomyces roseochromogenes subsp. oscitans
MTGPAGSPVAYEPVAMVTGAGRGIGAATAERLAAEGMAVIVVDRAEQDTTATVSAIRAAGGRARGIGCDVAVAHAVTAAVASAVEEFGHVDVLVNCAGVNQDRLLLTMSDQEWDTVLDVNLGGTMRCSFAVGRHMCRQGHGRIINFSSVAARGNAGQTNYATAKGAIAGFTRTLAAELGPHGVTVNAIAPGFVATPMVDELIERLGVDRDTALLEAAMSSAVGRIGTPEEIAAAVAFVTRQESGYLTGETIHVEGGRR

SEQ ID NO: 6469 - protein, 197 aa, Oryza officinalis
GQTPVFPRILGHEAGGIVESVGEGVTELAPGDHVLPVFTGECKECAHCKSEESNMCDLLRINVDRGVMIGDGQSRFTIKGKPIFHFVGTSTFSEYTVIHVGCLAKINPEAPLDKVCILSCGISTGLGATVNVAKPKKGQTVAIFGLGAVGLAAMEGARLSGASRIIGVDLNPAKFEQAKKFGCTDFVNPKDHSKPVH

SEQ ID NO: 6470 - protein, 366 aa, Zea mays
MAGPAPDRAALTVGPGMDMPIMHDSDRYELVRDIGSGNFGVARLMRDRRTTELVAVKYIERGEKIDENVQREIINHRSLKHPNIIRFKEVILTPTHLAIVMEYASGGELFERICKNVRFSEDEARYFFQQLISGVSYCHSMQVCHRDLKLENTLLDGSDAPRLKICDFGYSKSSVLHSQPKSTVGTPAYIAPEVLLKKEYDGKIADVWSCGVTLYVMAVGAYPFEDPEEPKNFRKTIQRILNVQYAIPDYVNISPECRHLISRIFVGDPAMRITITEIRNHSWFLKNLPADLMDDDSMSNQYEEPDQPMQTMDQIMQILTEATIPPACSRSINVLADGLDMDDDMDDLDSDSDLDVDSSGEIVYAM

SEQ ID NO: 6471 - protein, 252 aa, Thermobifida fusca
MGVGCGVGDGSGSGLSSPVQDTAADRRTTLVTSRKRPCCLLRMTLPNSLCRIACATILGPRGSEHGTVRHAARQDSPVGSSDGQGAEARLRDMKIYQSELRTLEGEPFRLPQTQLLLIVNVASKCGLTPQYSGLERLQEAYAYRGFSVIGVPCNQFGGQEPGDAQEIRLFCATTYGISFPILEKMEVNGPNRHPLYVELTKARDSQGLAGDVQWNFEKFLVAPGGRVLYRFRPQVEPEDPEIIRAIEENLPN

SEQ ID NO: 6472 - protein, 380 aa, Glycine max; identical to SEQ ID NO: 5720

SEQ ID NO: 6473 - protein, 282 aa, Magnetospirillum magnetotacticum
MPLSQALVLSHSGGRGHLHRSSGPHQRPLRSGPVRGGMRRGRRRGALDSRLRRSGQPAPGSHSRRGACRARSPSEDIMTGLCYAFEGMVPVVDPTSYVHPTAVLIGDVRIGPGCFIGPGASLRADFSSVIIGAGVNIQDNCILHGTPGFHTVVEDYGHIGHAAVVHGCRIRRNALVGMASSIYDGAEVGEEAIIAAMAFVPAGFKIPPRTLVAGLPAKVLRELSDEEVARKTRGTEAYQQLAQRALKSMVPCEPLSAPEPGRAQLNPSALWPDDLTRHKPKG

SEQ ID NO: 6474 - protein, 278 aa, Clostridium thermocellum ATCC 27405
KFLSHIREVDAIVHVVRCFEDSNIVHVEGSVDPVRDVETIEMELILADMEVLERRIDRTRKMLKSGDKKYQVELDIYERIMKTFEEGKPVRSMSFSEEEKKIVDQLFLLTSKPVLYAANVSEDDINSDKPNPLVEKLVNYAKNEGSEVMVICAKIEEEIAQLDDEEKAEFLKELGLSESGLDRLIKASYRLLGLISFLTAGPQEVRAWTIVKGTKAPQAAGKIHSDFEKGFIRAEVVAYDDLIKAGSYTIAKEKGLVRSEGKDYVMQDGDVTLFRFNV

SEQ ID NO: 6475 - protein, 443 aa, Oryza sativa
  unsure (1)..(443): unsure at all Xaa locations
MSFRSIVRDVRDGFGSLSRRGFEVRLXXGHRRGRSHSAVHELRDGPDVVQSSCWANLPPELLRDVIERLEASEAAWPSRKNVVACAAVCRTWRDMCREIVKNPEFCGKITFPVSLKQPGPRNGAIQCFIKRDKSTQTYNLYLCLSSAVLVESGKFLLSAKRYSRATCTEYTIFMSADNTSRSSNMYIGKLRSNLLGTKFVIYDTQPPCNTANVSQSGKTSRRFYSRKVSPKNPSSTYSIAQVSYELNVLGTRGPRRMNCVMHSIPASSLEAGGTVPXAQPDSVLARSLDESFGSXXSFSKSSIMDRSIRFSSSRYSDISVGGPMVGGQALGDSDESKERPLILRNKAPRWHEQLQCWCLNFKGRVTVASVKNFQLVAAXXQPAAGAPTPSQPAPPPPPDHDKVILQFGKVAKDMFTMDYRYPLSAFQAFAICLSSFDTKLACE

SEQ ID NO: 6476 - protein, 487 aa, Mycobacterium tuberculosis H37Rv
MPPLDITDERLTREDTGYHKGLHSRQLQMIALGGAIGTGLFLGAGGRLASAGPGLFLVYGICGIFVFLILRALGELVLHRPSSGSFVSYAREFYGEKVAFVAGWMYFLNWAMTGIVDTTAIAHYCHYWRAFQPIPQWTLALIALLVVLSMNLISVRLFGELEFWASLIKVIALVTFLIVGTVFLAGRYKIDGQETGVSLWSSHGGIVPTGLLPIVLVTSGVVFAYAAIELVGIAAGETAEPAKIMPRAINSVVLRIACFYVGSTVLLALLLPYTAYKEHVSPFVTFFSKIGIDAAGSVMNLVVLTAALSSLNAGLYSTGRILRSMAINGSGPRFTAPMSKTGVPYGGILLTAGIGLLGIILNAIKPSQAFEIVLHIAATGVIAAWATIVACQLRLHRMANAGQLQRPKFRMPLSPFSGYLTLAFLAGVLILMYFDEQHGPWMIAATVIGVPALIGGWYLVRNRVTAVAHHAIDHTKSVAVVHSADPI

SEQ ID NO: 6477 - protein, 398 aa, Nostoc punctiforme
MKAITLVGSTGSIGTQTLDIVTQYPDQFRIVGLAAGNNVEMLAAQIRQFRPKIAAICSEDKLPALKEAIIDLDPQPILLAGEAGVIEVARYGDAQTVVTGIVGCAGLLPTIAAIEAGKDIALANKETLIAGAPVVLPLVEKHGVKLLPADSEHSAIFQCLQGVPKSGLRKILLTASGGAFRDWDVERLADVTVADALKHPNWSMGRKITVDSATLMNKGLEVIEAHFLFGLDYDNIEIVIHPQSIIHSLIELQDTSVLAQLGWPDMRLPLLYALSWPDRIYTDWERLDLVKAGNLTFREPDHQKYPCMQLAYAVGKAGGSMPAVLNAANEQAVALFLDEKIRFLDIPRCIEWVCDRHQNDNRANPSLDDILAADKWARQEVLTATEKLETPSRIISLR

SEQ ID NO: 6478 - protein, 203 aa, Zea mays
MAAVSAAPRPSMPPRLALRAHLFSSASPLPMRALPLLRSRFRSLTTAYAVKQDTALWTPAPVTGKGFPLDRINPPDVAQTVLIFAAGTGISAIRSLIEFGFAVKERADVRLYYGDTSLKSMSYQERLSNWESTGIKIIPVLSQPDDSWKGERGYVQDAFFRNKNIVNPSSTGAILCGPNEMQEELTLSLVADGVSRDKILTNY

SEQ ID NO: 6479 - protein, 380 aa, Xanthomonas campestris pv. campestris str. ATCC 33913
MAWNTPGNKGGDGPDPNRRRSWGPRGGGNGGGWGNLPAPLKELFDGGVWRWVLIAVVLMVLFSSFQLIGEQQRGVVLRFGQFSRILQPGPSFKLPWPIESVRKVNATEIKTFSNQVPVLTRDENIVNVSLNVQYQISDPRKYLFGSRNADLVLEQAAQSAVREQVGRSDLNTVLNNRGPLAIASKDRLQAALNAYNTGLSVTGVTLPDARPPEEVKPAFDEVNGAQQVRERLINEAQAYAAKVVPEARGQGARTRTGAEGYKQAVISKAEGDADRFTLLQEQYAGAPDVTRKRLWLETVQKVLSENRKVIGSDGRQVIYVPLPADAGKSGNAGTATGNGSTPSMVPQDVLLNPPQGNGGSAEGIRNPERGPRPTGREGTE

SEQ ID NO: 6480 - protein, 821 aa, Listeria monocytogenes
MKSKNNYFKQIITIMTVVSLLIMVLGIQGNNDVKAATQVAPPASINQIFPDADLAEGIRAELQKSSVTDVVTKEELESISQLSVYAKKIASIEGLEYLTNLKFLNLNGNQITDLSPLSNLTKLTEIYIGDNKISDISPLQNLTNVTDLYLVDNDISDLRPLANLTQMYSLRLGGNSNISDLNPVRNMTRLNNLEVTGSILKDLTPLADVTSLTRLTLSDNQIEDLSPLAGLTKLDNIAAYSNKITDITPVTNLTRLQYLDLGSNEITDLSPVANLQKLTSLHLANNQITNISMLEDLTNLTSLGLQNNKISDISVLKNLTHVTYLQLGYNQIVDVKIIGGLTNLTSLQLTQNHITDISPLANLTKIQYSDFSNQMITNLERNFSKTLSVPNNITSIDGTLIAPETISNNGTYDAPNLKWSLPNYLPEVKYTFSQKIPIGTGTSNYSGFITQPLKELLDYKVTFNVEGNTSEVETVTEENLIPEPTSPTKQGYTFDGWYDAETGGTKWDFTTGQMPANDLTLYAHFSVNSYQANFDIDGVVTNEAVVYDALLNEPTTPTKQGYTFDGWYDAETGGNKWDFKTMKMPANDVAFYAHFTINNYQANFDIDGEVKNETIAYDTLLNEPTTPTKQGYTFDGWYDAETGGTKWDFKTKEMPANDVTLYAHFTINNYQANFDIDGAVTEEVVNYDALIPEPTSPSKTGFTLEGWYDAEVGGTKWDFKTMKMPANDITLYAHFSKETPIIPSPDEGLDSDSTNGPITINEPSATSTPSQNNNITVTAGENTTELATAKLPKTGDNAPWKTLFAGILLSSSAFYIWRKKA

SEQ ID NO: 6481 - protein, 331 aa, Triticum aestivum
MASNGMASSPSAFFPPNFLLHMQQAPPQHDPQEHHQQHHHHHHEHHLPPPHPQHNPFLPSPQCPSLQDFRGGLSPMLGKRPAMYGGGGDGGCGGDEVTGGGANEEETSDDGSQLGGEKKRRLNVEQVRTLEKNFEVANKLEPERKMQLARALGLQPRQVAIWFQNRRARWKTKQLEKDYDVLKRQFDAVKAENDALLSHNKKLQSEILGLKGCREAASELINLNKETEASCSNRSENSSEINLDISRTPPSDGPMDAPPSHQQGGGGGGMIPFYPSVARPAGVDIDHLLHASVPKMEHHHGGPDTPSFGNLLCGVDEPPPFWPWADHQQFN

SEQ ID NO: 6482 - protein, 391 aa, Saccharomyces cerevisiae
MGYFVPDSHIENLKSYKYQSEDRSLVSKYFLKPFWQRFCHIFPTWMAPNIITLSGFAFIVINVLTVFYYDPNLNTDTPRWTYFSYALGVFLYQTFVGSDGVHARRINQSGPLGELFDHSIDAINSTLSIFIFASETGMGFSYNLMLSQFAMLTNFYLSTWEEYHTHTLYLSEFSGPVEGILIVCVSLILTGIYGKQVIWHTYLFTITVGDKVIDVDTLDIVFSLAVFGLVMNALSAKRNVDKYYRNSTSSANNITQIEQDSAIKGLLPFFAYYASIALLVWMQPSFITLSFILSVGFTGAFTVGRIIVCHLTKQSFPMFNAPMLIPLCQIVLYKICLSLWGIESNKIVFALSWLGFGLSLGVHIMFMNDIIHEFTEYLDVYALSIKRSKLT

SEQ ID NO: 6483 - protein, 239 aa, Phalaenopsis equestris
MDSSSMEPKEKMGRGKIEIKRIENTTNRQVTFCKRRNGLLKKAYELSVLCDAEVALIIFSTRGRLYEYANNSVKGTIERYKKASTDNSNTGSISEANSQYYQQEATKLRQQITNLQNSNRNLLGDALTTMSLRDLKQLETRLEKGINKIRAKKNELLHAEIDYMQKREMELQTDNMFLRNKISDNERAQQQHQHMSILPSTSTEYEVMPPFDSRSFLHVNLMDPNDRYSHQQQTALQLG

SEQ ID NO: 6484 - protein, 352 aa, Carica papaya
MATMSSISKIIFLATCLIIHMGLSSADFYTVGYSQDDLTSIERLIQLFDSWMLKHNKIYESIDEKIYRFEIFRDNLMYIDETNKKNNSYWLGLNGFADLSNDEFKKKYVGFVAEDFTGLEHFDNEDFTYKHVTNYPQSIDWRAKGAVTPVKNQGACGSCWAFSTIATVEGINKIVTGNLLELSEQELVDCDKHSYGCKGGYQTTSLQYVANNGVHTSKVYPYQAKQYKCRATDKPGPKVKITGYKRVPSNCETSFLGALANQPLSVLVEAGGKPFQLYKSGVFDGPCGTKLDHAVTAVGYGTSDGKNYIIIKNSWGPNWGEKGYMRLKRQSGNSQGTCGVYKSSYYPFKGFA

SEQ ID NO: 6485 - protein, 128 aa, Zea mays
ISRMPSSEFSSICKDLSSIGDTVIISVTKEGVKFSTAGDIGTANIVCRQNKTVDKPEESTIIEMQEPVSLTFALRYMNSFTKASPLSDQVTISLSSELPVVVEYKIGEMGYIRFYLAPKIEEDEEMKA

SEQ ID NO: 6486 - protein, 114 aa, Glycine max
CFQYKKIFLATLLQKIVTAKWKTATAEEKKPYEGIYHAGKEAYLQVIAKEKRETDSMRFLEDEQRQRTAMELLEQYMQFKQETEKDGKKNKLHIPTFGPFFFLVWLLMCFIHVH

SEQ ID NO: 6487 - protein, 158 aa, Streptococcus pneumoniae TIGR4
MTSLYDFSVLNQNNQATPLDSYRGKVLLIVNTATGCGLTPQYQGLQELYERYQDQGFEILDFPCNQFMGQAPGSAEEINAFCSLHFQTTFPRFAKIKVNGKEADPLYVWLQDQKSGPLGKRVEWNFAKFLIGRDGQVFERFSSKTDPKQIEEAIQTLL

SEQ ID NO: 6488 - protein, 199 aa, Triticum aestivum
  unsure (1)..(199): unsure at all Xaa locations
EHFLAMDQANGGCSPCIDDMMASPSMIPITAVAKLLDGYLAEVAPDVNLKPPKFQALASALPEYARPLDDGLYRAIDVYLKAHSWLSEAEREQLCRLMDCQKLSLEACTHAAQNERLPLRVVVQVLFFEQLQLRTSIAGCLLVSDNLEGSSRPLRSGCVAMSGEAXGWSAAVRENQVLKVGMDNMRMRLAELEKECSDM

SEQ ID NO: 6489 - protein, 668 aa, Zea mays
LVQLQAVSDEARAMYNGGRAGLTFWSPNVNIFRDPRWGRGQETPGEDPAVSARYAAAYVRGLQQPYAAPNGGHRNRLKLAACCKHFTAYDLDKWGGTDRFHFNAVVAAQDLEDTFNVPFRACVEDGRAASVMCSYNQVNGVPTCADAAFLRGTIRGRWGLDGYIVSDCDSVDVFFRDQHYTRTPEDAAAATLRAGLDLDCGPFLALYAGSAVAAGKVADADVDAALLNTVTVQMRLGMFDGDPAAGPFGRLGPADVCTREHQDLALDAARQGVVLLKNRRGARHNRDVLPLRPAAHRVVAVVGPHADATVAMIGNYAGKPCRYTTPLQGVAAYAARVAHQAGCTDVACRGNQPIAAAVEAARQADATVVVAGLDQRVEAEGLDRTTLLLPGRQAELISAVAKASKGPVILVLMSGGPIDIAFAQNDPRIDGILWVGYPGQAGGQAIADVIFGHHNPGAKLPVTWYHQDYLQKVPMTNMAMRANPARGYPGRTYRFYTGPTIYPFGHGLSYTQFTHTLAHAPTQLTVRLSGSGHSAASAASLLNATLARPVRAVRVAHARCEGLTVPVHVDVSNVGDRDGAHAVLVYHAAPSPSHAAPGADAPARQLVAFEKVHVPAGGVARVEMRIGVCDRLSVADRNGVRRVPVGEHRLMIGELTHSVSLGVEQLGV

SEQ ID NO: 6490 - protein, 351 aa, Staphylococcus aureus subsp. aureus Mu50
MKALVKTREGHGNLELLDKEVATPLDDKVKIKVHYAGICGTDIHTYEGHYKVNFPVTLGHEFSGEIVEVGADVKDFKVGDRVTSETTFYVCNECEYCKSKDYNLCNHRKGIGTQVDGVFTNYVIAREESLHHIPDEVSYQSAAMTEPLACAHHGVSKIQVNSGDVAVVMGPGPIGLLVAQVLKSKGATVVVTGLDNDKVRLDKAEALHMDYVVNLQQTDLKTYINGITDGYGADVVVECSGAVPAARQGLDIIRKKGFYSQIGIFKDAEIPFDMEKVIQKEITVVGSRSQKPADWEPSLQLMADGLVNAEALVTKIYDISKWDEAYQHLKSGEGIKALLKPLDLDENEGEN

SEQ ID NO: 6491 - protein, 330 aa, Streptococcus pneumoniae TIGR4
METKTMSFRDTIILAMSEEMRRDENVFLMGEDVGVFGGDFGTSVGMLEEFGPERVRDCPISEAAISGAAAGAAMTGLRPIVDMTFMDFSVIAMDNIVNQAAKTRYMFGGKGQVPMTVRCAAGNGVGSAAQHSQSLESWFTHIPGLKVVAPGTPADMKGLLKSSIRDNNPVIILEYKSEFNQKGEVPVDPDYTIPLGVGEIKRQGTDVTVVTYGKMLRRVVQAAEELAEEGISVEIVDPRTLVPLDKDIIINSVKKTGKVVLVNDAHKTSGYIGEISAIISESEAFDYLDAPIRRCAGEDVPMPYAQNLENAMIPTVESIKDAIRKTYNKE

SEQ ID NO: 6492 - protein, 143 aa, Glycine max
MTEAYIRKKPGMASVKDMPVLQDGPPPGGFAPVRFARRIPNKGPSAVAIFLTAFGAFSWGMYQVGQGNKIRRALKEEKYAARRSILPVLQAEEDERFVKEWHKYLEYEAEVMKDVPGWKVGESVYHSGRWVPPASGELRPDVW

SEQ ID NO: 6493 - protein, 342 aa, Humulus lupulus
MSGLRLKFMEVYSILKSELLNDPAFEFTDDSRQWVERMLDYNVPGGKLNRGLSVIDSYQLLKGGKELTEEEIFLTSALGWCIEWLQAYFLVLDDIMDNSVTRRGQPCWFRVPKVGLIAANDGILLRNHIPRILKKHFKGKSYYVDLLDLFNEVEFQTASGQMIDLITTIEGEKDLSKYSIPLHHRIVQYKTAYYSFYLPVACALVMAGENLDNHVDVKNVLIEMGTYFQVQDDYLDCFGHPDVIGTIGTDIEDFKCSWLVVKALEIATEEQKKMLFEHYGKGDEASVKKVKELYKALDLEGVFADYENASYQKLIKSIEAHPKEEVQAVLKSFLAKIYKRQK

SEQ ID NO: 6494 - protein, 1017 aa, Oryza sativa (indica cultivar-group)
MGEPIVAVAIAMNEAGDDGASMEKKVIYLHLIVLSKLRFTLTDVQTPDPWAYAEKLGHVSMLMNWCSVCKCQQEQPPLHAARGLLRRAGWASGLGASFHRLAWLRLGSDRLEGMDFGDSRRKPSVVGKFTVAVALTVMCIIVLKQSPGFTSTSVFSRHEIGVTHVLVTGGAGYIGSHATLRLLRDNYRVTIVDNLSRGNMGAVRVLQRLFPEPGRLQFIYADLGDAKAVSFFTTMRTLTPYYSHSSIHLCVENAFDAVMHFAAVAYVGESTLEPLRYFNVIGSDPEGRLGEAPRPELREHGRISGACFDAALGIIPGLKVRGTDYPTADGTCIRDYIDVTDLVDAHVKALDKAQPGKVGIYNVGTGHGRSVKEFVEACKSATGASIKVSFLTRRPGDYAEVYSDPSKIHDELNWTARYTDLRESLSTAWKWQKAHPNGVQVVGLYPTLLQKRRLIMYMNIIRNYSSSEEKNKQCNDETEPFCKKRAQQQDHHRRRQRPLDAAGVPEDRRRHVHGAAEEQDGPRRRRRRGGAAPPHPVHDEQQPRREDRARQDELQLLGSFHRRRPAPFAAAADGVQGQEGHRREHRREARADEVAASGSASRGALVAGALFVAGGERRPRGRSSARSGSANQVKACVVQAICTTIFEYVQIKVLLFVGKPEITGKNDGVIYRRRPLVEEHTYVASFSREIESAVVAAAGKVFGRGAETLAPDRCVGVANVVVVVVVMVQIRVRVYDVLDDDGAVRREVSGDDMCVSMSSLFHGKFYHRSIGVSVCVSTFHRPHVRRADLARDLSRRLVLRLRETEAGEKNKAPRPRRVRAASSRGLATNTHKACVSFDAELAAATIKGLCTERVHYECLHNHRSDESATWRTVDWCGSNCSTTSTRHPCSILAMLHHLAYKYAHAKLQTQIKLSSHTAHSERIRRTVESYSSSHGQAPQSSSLRRRRSADASGVDRPAASCAALRWRQLRGSEATSGGGVGEEKASLLPPLIPNLPLPPIVPGNPPARNSVVNNKSP

SEQ ID NO: 6495 - protein, 383 aa, Glycine max
MKKRFFFLLRRRKMALGDDAQHHSHSPSFLDSLLCEERETFEEDFDANGDECETENNDPSVIKSQPLPLVLYDNDLFWEDDELVSLIAKEGETHLRSFSDGALEGPRVEAVNWVSKVSGHYGFSALTTVLAVNYFDRFITSLKFQRDKPWMTQLAAVACLSLAAKTEETHVPLLLDLQVEESRFVFEAKTIQRMELLVLSTLKWRMLPVTPISFFEHIVRRLGLKSRLHWEFLWRCERVLLNIIADSRVMSYLPSTLAAATMIHVIKEIESFNATEYIDQLLGLLKISEEQVNKCYRIIQKLLGCHEGIYGLPQKCKRLSELGSPSAVTDASFSCDSSNDSWAVSSSVSLSLEPQLKRRRSQDQQMRLPSVSRVSIDVLNSPH

SEQ ID NO: 6496 - protein, 297 aa, Listeria monocytogenes
MLKKNNWLQNAVIAMLVLIVGLCINMGSGTKVQAESIQRPTPINQVFPDPGLANAVKQNLGKQSVTDLVSQKELSGVQNFNGDNSNIQSLAGMQFFTNLKELHLSHNQISDLSPLKDLTKLEELSVNRNRLKNLNGIPSACLSRLFLDNNELRDTDSLIHLKNLEILSIRNNKLKSIVMLGFLSKLEVLDLHGNEITNTGGLTRLKKVNWIDLTGQKCVNEPVKYQPELYITNTVKDPDGRWISPYYISNGGSYVDGCVLWELPVYTDEVSYKFSEYINVGETEAIFDGTVTQPIKN

SEQ ID NO: 6497 - protein, 458 aa, Oryza sativa
AAAMRIEEVQSTTKKQRIATHTHIKGLGLDANGAAIGLAAGFVGQGAAREAAGLVVDMIRQKKMAGRALLLAGPPATGKTALALGISQELGSKVPFCPMVGSEVYSSEVKKTEVLMENFRRAIGLRIKENKEVYEGEVTELSPEEAESTTGGYGKSISHVIIGLKTVKGTKQLKLDPTIYDALIKEKVSVGDVIYIEANSGAVKRVGRCDAFATEYDLEAEEYVPIPKGEVHKKKEIVQDVTLHDLDAANAQPQGGQDILSLMGQMMKPRKTEITEKLRQEINKVVNRYIDEGIAELVPGVLFIDEVHMLDIECFSYLNRALESPLSPIVILATNRGICNVRGTDMTSPHGIPVDLLDRLVIIRTETYGPTEMIQILAIRAQVEEIDIDEESLAFLGEIGQQTSLRHAIQLLSPASVVAKANGREKISKADLEEVSALYLDAKSSARLLQEQQGRYIT

SEQ ID NO: 6498 - protein, 449 aa, Pseudomonas putida
NMPEHAGASLASQLKLDAHWMPYTANRNFLRDPRLIVAAEGSWLVDDKGRKVYDSLSGLWTCGAGHTRKEIQEAVAKQLSTLDYSPGFQYGHPLSFQLAEKITDLTPGNLNHVFFTDSGSECALTAVKMVRAYWRLKGQATKTKMIGRARGYHGVNIAGTSLGGVNGNRKLFGQPMQDVDHLPHTLLASNAYSRGMPKEGGIALADELLKLIELHDASNIAAVFVEPLAGSAGVLVPPEGYLKRNREICNQHNILLVFDEVITGFGRTGSMFGADSFGVTPDLMCIAKQVTNGAIPMGAVIASTEIYQTFMNQPTPEYAVEFPHGYTYSAHPVACAAGLAALCLLQKENLVQSVAEVAPHFEKALHGIKGAKNVIDIRNFGLAGAIQIAPRDGDAIVRPFEAGMALWKAGFYVRFGGDTLQFGPTFNSKPQDLDRLFDAVGEVLNKLLD

SEQ ID NO: 6499 - protein, 379 aa, Oryza sativa
MAKDGGGPDWNGLLKWSLAHGDGTAKPRSLSEEDKKWFMEAMQANTMDVVKRMKEITQVMKTPDDVLQSQGVTPENIEDMLDELQEHVESIDMANDLHSIGGLDPLLGYLKNSHAGIRAKAAEVVSTIVQNNPKSQQLVMESNGLEPLLTNFSSDASTNSRTKALGAISSLIRHNQPGVAAFRLGNGYSALRDALGSDDARLQRKALHLLQYLLHDNKADRSVATELGLPKLMMHLASSDDSGVREAALGGLLELARDNTSGAGNVLPDQDKLKDVLKSRIEGISTMDADDLSAHREERQLVDSLWKECYNEPSSLREKGLVVLPGEDAPQQPPPDVVGSMFEPPLRAWAASRPPPKEDSESESAKKDPPLLLGPGPSS

SEQ ID NO: 6500 - protein, 262 aa, Magnetospirillum magnetotacticum
MQRRLSSPAASGLFSAPSLECLFRRLCYCLRLYDGMRFVGLPRVHSIGLQPPRARPVPEASCLNRARPTTVREPPCFPEHGFDAVIAQGAEAGGHRGLFLSEAHASQIGTIALVPQIADAVDVPVVAAGGIADPRGVAAAFALGASAVQVGTAYLRCPEAGISEPYRAALATARDEDTVLTNVLTGRPARGLLTRAVRDLGPISAAAPAFPGAALALQPLRMAAEAKGSGDFSPLWSGQAAALGRDCSAADLTRLLARGVPA

SEQ ID NO: 6501 - protein, 187 aa, Rhodopseudomonas palustris
MAGQLDGKRVAILATHGFEQSELEIPRDRLKAAGAQVDIVSPEQGEIRGWSGKDWGHLVKVDKLLSAVKADDYDAIVLPGGQINPDLLRVNQDALKLIKSLFDAGKTVAAVCHAPWLLIDTGIAKGRKMTSYNSIKQDVINAGAKWEDSAVVTDNGVITSRNPGDLEAFSAKIIEEMREGKHQRRAA

SEQ ID NO: 6502 - protein, 204 aa, Escherichia coli
MKQLTILGSTGSIGCSTLDVVRHNPEHFRVVALVAGKNVTRMVEQCLEFSPRYAVMDDEASAKLLKTMLQQQGSRTEVLSGQQAACDMAALEDVDQVMAAIVGAAGLLPTLAAIRAGKTILLANKESLVTCGRLFMDAVKQSKAQLLPVDSEHNAIFQSLPQPIQHNLGYADLEQNGVVSILLTGSGGPFRETPLRDLATMTPD

SEQ ID NO: 6503 - protein, 255 aa, Solanum tuberosum
MDFFNRCSTSSSSSESSSSESSLSGKNPNKSERIKGPWSAEEDKILTKLVERYGARNWSLISKYIKGRSGKSCRLRWCNQLSPNVEHRPFSPAEDEAILAAHAKYGNRWATIARLLPGRTDNAVKNHWNSTLKRRYQQLIQQQNQNPIGFSDLKINGSGSGSGSGFGSCMEYLNADESPKGNSNNNNNNNYAVTNNCSGEFDDPMTTLSLAPPGMGGDELPEKKTESFPEGFWDVVRGVIAREVREYVASTGFPN

SEQ ID NO: 6504 - protein, 142 aa, Oryza sativa
  unsure (1)..(142): unsure at all Xaa locations
MEEEKAASPVSRHIMPHLLNIYGSCATARDFEIYAAHATFEDPLMRAHGVKQIKSAFYTLPKILIDNKQHYKFLGRAIDLASLITLDVEDGKVVKHQDWWDKKPLKNRDTVSFPVVGRLAEATRRGAMLLTHALMGCGKDPX

SEQ ID NO: 6505 - protein, 474 aa, Yersinia pestis CO92
MGKMVDQSKIVAEPLQEPEEHLQRSLSNRHIQLIAIGGAIGTGLFMGSGKTISLAGPSIIFVYMIIGFMLFFVMRAMGELLLSNLNYKSFSDFSADLLGPWAGFFTGWTYWFCWVITGIADVVAITAYAQFWFPDFSQWVASLLVVLLLLSLNLATVKMFGEMEFWFAMIKIVAIVALIFAGLTMVLVSYQSPSGTTASFTHLWSDGGMFPKGISGFFAGFQIAVFAFVGIELVGTTAAETKDPEVVLPRAINSIPIRIIMFYVFSLIMIMSVTPWSSVVADKSPFVELFVLVGLPAAASVINFVVLTSAASSANSGVFSTSRMLFGLAKEGNAPKQFGKLSRRSVPATGLTFSCICLLGGVVLIYLIPNVMTVFTLVTTVSAILFMFVWTIILCSYLVYRKRRPALHKKSIYKMPAGIFMSWVCMAFFAFVLVLLTLESDTRQALIVTPLWFVILTASYIFLKKRRARLYNSK

SEQ ID NO: 6506 - protein, 414 aa, Oryza sativa
  unsure (1)..(414): unsure at all Xaa locations
SDIHYRATSSLPSRAPRQQKPLYYLLSLASMAGQIPQPIRCKAAVCRAAGEPLAVEEIVVDPPKAHEVRIKIVCTSLCHSDVTFWRMQDFPGVFPRIFGHEAFGVVESVGEHVEGFAAGDPVVPTFLGQCTECVDCASERSNVCSTYRFAVRPGMPRDGTARFRDRHGAPIHHFLGVSSFSEYTVVDANQVVRVDPAVPPATASLLSCGATTGVGAAWKLAKVEPGSSVAIFGLGAVGLAVAEGARICGASTIIGVDLNPEKHELGKKFGVTHFINPQELGDKPVSQAIIEMTDGGADYCFECIGLASVMSDAFRSSREGWGKTIILGVEMHGAPLSIPSLEILNGKCVMGSLFGGVKPKQDIPILADKYLNKELELDKFITHEVPLKDINTAFDLLLQGKSLRCTIWMDKXCG

SEQ ID NO: 6507 - protein, 127 aa, Zea mays
  unsure (1)..(127): unsure at all Xaa locations
EAELGGVQQVGPTGLLGITAVTRANTLAGEKTGHKLAWLLLIFLGASYILLFALGKGGHSHAHNYPREKMAVAGLALVPALXPGEKTLPVFFGVGNFSXRMNLAKMGLLFSTIKVIKSLGGPLISRG

SEQ ID NO: 6508 - protein, 164 aa, Euphorbia esula
MSADIEYRCFVGGLAWATTDQSLQEAFSPYGEILDSKIINDRETGRSRGFGFVTFNNEKSMRDAIQGMNSQELDGRNITVNEAQSRGSGGGGGGGGYSRGGGGGGYGGGGRREGGYGGGGGGYNSRSSGGGGGYGGGRDQGYGGGGGGSRYSRGGGESDGNWKN

SEQ ID NO: 6509 - protein, 261 aa, Triticum aestivum
LNPNPNPNPPTHRRRWRAAGRSEKGGGGCGRCCLGFLLKLLAFLQAFAALSAVLYAASILSRWARHHELHIHHLLPDLWFACAVMAAGLLYCAILLAGYVAAEISSGCCLCFYTGLAMVMMLLEAAVAGRILLNEHWIQDLPYDRTGELQNLVSFVNANLDLCKWAALATVATQALSLFLAMVLRAMVSPTSGDYDSDEDFVVIRRPLLIARGAPSYLPTTADPRGGHPNLWSSSMRQKYGLNSSGDYTYNTLGQNAVPPQ

SEQ ID NO: 6510 - protein, 350 aa, Neurospora crassa
MPLIAQNPQPRVILGLMTFGTDPETGARVTTIPEFSKVLDLFQSRGYNEVDTARMYIGGKQEAFTREAGWKDRGLTLATKVIYPTNGGDNTRDKVLESADISLKELGTDCVDILYLHAADRKTPFAETLSAINDLHKAGKFVRFGISNFTSFEVAEIVMTCKYNNWVLPTIYQGMYNAITRSLETELVLACRRYGLDIVVYNPLAGGLFSGKIKSHDMVPESGRFSDVNKMGVMYRGRYFKESTFRALQVVEQAVEKAGLTMIETALRWMVHHSALKIKDGNDGVIIGVSSIDQLDSNLTDLEKGPLPEEVVKALDEAWKIAKVDTVNYWHGTVEYGYDVREALFGKNAK

SEQ ID NO: 6511 - protein, 610 aa, Lycopersicon esculentum
MMMFEEMGFCGDLDFFPAPLKEVEVSAPQSQTEPDSVVDDDYSDEEEIEVDELERRMWRDKMKLKRLKEMSKSKEGVDPAKQRQSQEQARRKKMSRAQDGILKYMLKMMEVCKAQGFVYGIIPEKGKPVSGASDNLREWWKDKVRFDRNGPAAIAKYQADHAIPGMNEGSNPVGPTPHTLQELQDTTLGSLLSALMQHCDPPQRRFPLEKGVPPPWWPTGKEDWWPQLGLQKDQGSLPYKKPHDLKKAWKVGVLTAVIKHMFPDIAKIRKLVRQSKCLQDKMTAKESATWLAIISQEEALARELYPDRCPPLSSAGVSGNFMLNDSSEYDVEGAQDEPNFDVHEQKPNHLNLLNISAERFKETMPLQQQSHPNKDELVTNLDFSLKRKQANEPTVMMDQKIYTCEFLQCPHNELRHGFQDRSSRDNHQFACLYRSSTCFGVSNFQINEVKPVVFPQQYVQPKSSALPVNQGPPSFDLSGIGVPEDGQRMINELMSIYDSDVQGSKRQNRGNIALTKEQPHQQPRVHQDNYLLSQGIMDGNIFKNTNISTTQSMLPQVDPFDQSKAFNAGSNDNFHFMFGSPFNIQSTNYNGNLPSIGYDTTPKQDAPIWY

SEQ ID NO: 6512 - protein, 361 aa, Triticum aestivum
  unsure (1)..(361): unsure at all Xaa locations
MGATNHTLQALLPWLLLFVQQAAAASGGCECTTATDGADKQGAMKLKLVAIASILTAGAAGVLVPVLGRSMAALRPDGDIFFAVKAFAAGVILATGMVHILPAAFDGLTSPCIHKGGGDRNGFPFAGLVAMSAAMATMVIDSLAAGYYRRSHFSKARPLDNIDMPGDEEGRADHPHMHAHGHSHGEAIVVSSPEEAAIADTIRHRVVSQVLELGILVHSVIIGVSLGASVRPSTIKPLVGALSFHQFFEGIGLGGCIVQANFKVRGNXIIMATFFSLTAPVGIVLGIAISSSYNVHSSTAFIIEGVFNSASAGILIYMSLVDLLATDFNNPKLQTNTKLQLMTYLALFLGAGMMSMLAIWA

SEQ ID NO: 6513 - protein, 751 aa, Geobacillus stearothermophilus
MENQNRQNAAQCPFHGSVTNQSSNRTTNKDWWPNQLNLSILHQHDRKTNPHDEEFNYAEEFQKLDYWALKEDLRKLMTESQDWWPADYGHYGPLFIRMAWHSAGTYRIGDGRGGASTGTQRFAPLNSWPDNANLDKARRLLWPIKKKYGNKISWADLFILAGNVAIESMGGKTIGFGGGRVDVWHPEEDVYWGSEKEWLASERYSGDRELENPLAAVQMGLIYVNPEGPDGKPDPKAAARDIRETFRRMGMNDEETVALIAGGHTFGKAHGAGPATHVGPEPEAAPIEAQGLGWISSYGKGKGSDTITSGIEGAWTPTPTQWDTSYFDMLFGYDWWLTKSPAGAWQWMAVDPDEKDLAPDAEDPSKKVPTMMMTTDLALRFDPEYEKIARRFHQNPEEFAEAFARAWFKLTHRDMGPKTRYLGPEVPKEDFIWQDPIPEVDYELTEAEIEEIKAKILNSGLTVSELVKTAWASASTFRNSDKRGGANGARIRLAPQKDWEVNEPERLAKVLSVYEDIQRELPKKVSIADLIVLGGSAAVEKAARDAGFDVKVPFFPGRGDATQEQTDVESFAVLEPFADGFRNYQKQEYSVPPEELLVDKAQLLGLTAPEMTVLVGGLRVLGANYRDLPHGVFTDRIGVLTNDFFVNLLDMNYEWVPTDSGIYEIRDRKTGEVRWTATRVDLIFGSNSILRSYAEFYAQDDNQEKFVRDFINAWVKVMNADRFDLVKKARESVTALQHFCHPRSVNGIELQ

SEQ ID NO: 6514 - protein, 161 aa, Emericella nidulans
MAEKMLVMTSNDGKNIEVPRDVAERSLLIKNMLEDLGDPTEPIPIPNVSENVLSKVLEWCAHHRNDPPSSADDDDSRRKTTDIEEWDQKFMQVDQEMLFEIILAANYLDIKPLLDIGCKTVANMIKGKSPEEIRKTFNIQNDFTPEEEDQIRRENEWAEDR

SEQ ID NO: 6515 - protein, 159 aa, Glycine max
RRIVQYKTAYYSFYLPVACALLMAGEDLDKNVDVKNILVEMGTYFQVQDDYLDCFGDPQTIGKIGTDIEDFKCSWLIVKALELSNEQQKKVLQENYGKPDPENVAKVKALYNELNLQGVFEEYESGSYAKLVSSIEAHPIKAVQAVLKSFLAKIYKRQK

SEQ ID NO: 6516 - protein, 204 aa, Bradyrhizobium japonicum USDA 110
MTSTEPDMLQDFSSTTLREARPSVVATERLTLRRPTLADVRTIARLANDRRVAENTRRLPHPYSQDDAIEFIRATAEIGSETVFLIEHDSGPVGMVGIDCSKPDNAELGYWLGVEHWGQGFATEAARGAIDFFFEEFEDDHLHAGARVTNPASRKVLEKCGFQWSGVQLHRFLALGSSTPVDCFRLSRGVWASLKSWSSARRVR

SEQ ID NO: 6517 - protein, 195 aa, Sinorhizobium meliloti
MSGKKILMLTGEFTEEYEIYVFQKGMEAVGHTVHVVCPDKKAGDRIKTSLHDFEGDQTYTEKLGHYADINKTFSEVRPEEYDAVYAAGGRGPEYIRTDKRVQDMVRHFHDTGKPIFTICHGVQILMAVPGVLKGRKVAGLGACEPEVTAVGGTYIDVEPTGAYVDGNMVSAKGWTGLAAFMRECLNVLGTKITHT

SEQ ID NO: 6518 - protein, 346 aa, Glycine max
  unsure (1)..(346): unsure at all Xaa locations
MESATSWSNPLPLSSLPSPSHSRHPSAFKFMAFSTLHTFSLPSLSSPSSFHPFPLSSLSPKPTSFNPRPLFPRTMHASRIQDAVGGALALVQSSPATWQSALLSNALIFFLGSPILVSNXGLSLSGIGAAFLLGTLTWRAFGPSGFFLVATYFVIGTAATKVKMAQKVAQGVAEKRRGRRGPGSVIGSSAAGCICAFLTIFGVGGEAFSRLWRLGFVASFCTKLSDTVSSEIGKAYGKTTYLVTTFKIVPRGTEGAVSVEGTLAGILASIVLALVSFLMGEVGSHEAIICVLAAQIANLGESIIGAALQEKEGFKWLNNDAVNVINISMGSIIAIFMQQALQICGS

SEQ ID NO: 6519 - protein, 384 aa, Listeria innocua
MKHVFPTYNRFPVDIVKGNGTVVKDATGKTYLDFTSGIAVCNLGHCPENVTEAIQSQLANIWHTSNLYECALQDSVAELITDGTDKLVFFCNSGTEANEAALKLARKYTGKEKIITFEKSFHGRTFGSMSATGQAKIHQGFGRLVPGFTYVPYNDIESFKTELDENTAAVMLEVIQGEGGVIPGNAAWLMEVQMLCKKAGALLIIDEVQTGLGRTGTLFGFQQTFLDPDIFTLAKGLGNGLPIGAMVGKEHLSSAFGPGSHGSTFGGNKLALAAAKEILLTMKQTGFLEEVNAKAAYFRNLLEEHFEQLENVVAIRGEGFLIGIELGSSAAPVVTELRDKGLLILTAGPNILRILPPLTVSYAEIDQAISILKSVLEKQLIGSE

SEQ ID NO: 6520 - protein, 445 aa, Staphylococcus epidermidis ATCC 12228
MSKVNHLIDEDERYFAHSGRIKYYPLVIDHGYGATLIDIDGKSYIDLLASASSQNVGHAPKPVVEAIKNQTEKFIHYTPAYMYHEPLVRLSKKLCDIAPGNYEKRVTFGLSGSDANDGIIKFARAYTGRPYIISFTNAYHGSTFGSLSMSSISLNMRKRYGPLLNGFYHIPFPDKYRGMFEQAKPNTVEEYLAPLKEMFTKYVPAEEVACIVVETIQGDGGLLEPVPGYFEALQELCHAHNILIAVDDIQQGLGRTGKWSSVDHYHFTPDLMTFGKSLAGGLPMSAIVGRKEIMESLEAPAHLFTTGANPVSCEAALATIKMIEDEDLLNASWKKGSYVRKRIDPWIERYQYVGDVRGIGLSIGIDIVSNKIEKTRDSEAALKICNYCFENGVIIIAVAGNVLRFQPPLVITYKQLDKALDTIEEALEKLERGELNQYDISGQGW

SEQ ID NO: 6521 - protein, 395 aa, Idiospermum australiense
DLEPVNPADVLVTAAGGLKSYKLAAKAISKLQSLPSGNISLLCDVLVREVSELTGYDRVMAYKFHEDEHGEVIAECRRSDLEPYIGLHYPATDIPQASRFLFRKNKVRMICDCLAPPVKVIQDKRLAQPLSLCGSTLRAPHGCHAQYMANMNSIASLVISVTVHEDDNETGSEQQQQPKGRKLWGLVVCHHTSPRFVPFPLRYACEFLIQVFGIQLNKEIELAAQMNEKHILRTQTVLCDMLQRNAPVGIITQTPNVMDLVKCDGAALYYRNQFWLLGTTPTEAQIRDIVEWLMEYHSSSTGLSTDSLMEAGYQGAAILGDAVCGMAAIRITSKDFLFWFRSHTAKEIKWGGAKHDPVDQDDDGRKMHPRSSFKAFLEVVKRRSLPWEDVEMDAI

SEQ ID NO: 6522 - protein, 888 aa, Xanthomonas campestris pv. campestris str. ATCC 33913
MSLSVFPHRLALALGFALAAPLTSAPAQAAAPTGTPEQRAAALVAQMSREEKVAQAMNAAPAIPRLGIPAYEWWSEGLHGIARNGYATVFPQAIGLAASWNTQLMQQVGTVVSTEARAKFNQAGGPGKDHKRYAGLTIWSPNINIFRDPRWGRGMETYGEDPFLTGQLAVGFIRGLQGDDLEHPRTIATPKHIAVHSGPEPGRHGFDVDVSPRDVEATYTPAFRAALVEGQAGSVMCAYNSLHGTPACAADWLLNGRVRGDWGFKGFVVSDCDAVDDMTQFHYFRPDNAGSSAASLKAGHDLNCGTAYRALGTAIERGEVDEALLDQSLVRLFAARYRLGELQAPRKDRYARLGAKDIDNAGNRALALQAAAESIVLLKNANATLPLKAGTRLAVIGPNADALAALEANYQGTSSQPVTPLLGLRQRFGAQQVRYAQGAPLAAGVPGMIPETALRSDGKPGLRGEYFDNVELEGAPRVTRQDRAISFNWDQVSPAKGVPADRYAVRWSGELLPPGTGDYTLAVRVARCFDCTGHDPVRLYIDDKLVVAGNAEDKHVPAGMHNADGRSVETVLHFDDTRPRKIRLELEHRGQDQGVRLEWLAPAAAQLAEAEQAVAQADAVVAFVGLSPDVEGEELRIDVPGFDGGDRNDIALPAAQQALLERAKASGKPLVVVLMSGSAVALNWAKTHADAIVAAWYPGQSGGTAIARALAGDDNPGGRLPVTFYRSTKDLPPYVSYDMKGRTYRYFKGEALFPFGYGLSYTSFAYDAPQLSSTTLQAGSPLQVTTTVRNTGTRAGDEVAQVYLQYPDRPQSPLRSLVGFQRVHLQPGEQRTLTFTLDARALSDVDRTGTRAVEAGDYRLFVGGGQPDTGAPGQSVALTIQGRAPLPK

SEQ ID NO: 6523 - protein, 204 aa, Glycine max
IRLEVSSSLLAKLCITFFRCYRKRVSAVTEQFDNCMKKQVEAIARVLHLFQSYKEDNIPCKIDEGLYLGSIATAANKPALKDCNITHVLTVAGRIPPAHPHDFVYKIIDVVDKDDEDLKQYFNECFDFIDEAKRHDGGVLVHCFAGRSRSVTIVVAYLMKTRGMSFFEALQHVRSIRPAAGPNQGFICQLQDFEKSLQGANKLH

SEQ ID NO: 6524 - protein, 154 aa, Zea mays
AFLQTNISLNAIKIVPGKYSAVTDHQFRAPYRIRCAAASPGKKRYNIALLPGDGIGPEVISGAKNVLQKAGSLEGLEFDFKEMPVGGAALDLVGVPLPEETFTAAKLSDAILLGAIGGYKWDKNEKHLRPEMALFYLRRDLKVFANLRPATVLP

SEQ ID NO: 6525 - protein, 244 aa, Oryza sativa
  unsure (1)..(244): unsure at all Xaa locations
XKNYTLLYSISDKNVQEIKISRGRMLLIYTRTSSSVPLKILSIEDGTVLKSFNHLLHRNKKVDFIEQFNEKLLVKQEGENLQILDVRNFQLTEVSRTEFMTPSAFIFLYELQLFLTFRNRSVAVWNFRGELVTSFEDHLLWHPDCNTNNIYITSDQDLIISYCKADSNDSSSEENAGSINISNILTGKCLAKIKASDLCKQKKAWKFQSTALEALEDITALYYDEERDEIYTGNRQGLVHVWSN

SEQ ID NO: 6526 - protein, 304 aa, Triticum aestivum
RSLGGFDTAHAAARAYDRAAIKFRGLEADINFNLSDYEEDLKQMRNWTKEEFVHILRRQSTGFARGSSKYRGVTLHKCGRWEARMGQLLGKKYIYLGLFDSEVEAARAYDRAAIRFNGREAVTNFESSSYNGDAPPDAENEAIVDADALDLDLRMSQPTAHDPKRDNIIAGLQLTFDSPESSTTMISSQPMSSSSSQWPVHQHGTAVAPQQHQRLYPSACHGFYPNVQVQVQERPMEARPPEQPSSFPGWGWQAQAMPPGSSHSPLLYAAASSGFSTAAAGANLAPPPPYPDHHRFYFPRPPDN

SEQ ID NO: 6527 - protein, 620 aa, Ralstonia metallidurans
MLHQRRRHRTRFRASDPGGHGRHQRADSGADGVAFVRWLEALAVRRSPRLRRGRCALLHTLQERDATLAGQHRQGCGVHDAGGEVTASAHGDCRLDRASLRGRPFFWRVSFASIMPPFRWRRCRSKDAQPRPPADSAQPIVLTRTFCRSRAMSLFRTKNIDAMLEVSEHDGLRKVLGAVDLVLMGIGAIIGTGIFVLTGTGALTAGPALTVSFVIAAMACGFAALCYAEFASAIPVSGSIYTYSYATLGEIVAWMIGWDLLLEYGLATSAVSVGWSGYFQSLIAGFGIHLPTVLTAAPGAVPGEHTLFNLPACLIMLAITWIVSYGVKESARLNNVMVAIKIGVVLLFIAVGVWHVKPANWQPFAPFGMTGVFNAAALVFFAFIGFDAVTSAAEEVRNPRRDLPIGIIGSLAVCTILYVTVAAIMTGIVPFMKFEGVDHPVSLALQYAGQNWVAGFVDLGAILGMTTVILVMTYGQTRIIFAMSRDGLLPEALSTVHPVHATPYTATWTVGIVFAAIAAFVPLNVLAELINIGTLAAFTLISIAILVLRRTRPDLRRGFRCPGVPVVPLLAVGFCLFLMAHLQALTWIAFLCWIGLGLIIYFAYSRRNAVLHNHGGDAEG

SEQ ID NO: 6528 - protein, 576 aa, Zea mays
PTRASSRPISHDFCEPLGDHTVDSDSHHDMPYSQSNLPRSQSAIFQNDCTSDPEGSVDSEILGCRSVDGLCSLTDEKFDYLRGGEMYHCKSNLDVYCAPSPNMHRASNIDDHGSVGCSDVAAEGQRSTGSTEEFFVRDGILVGHEYWDGKYICGDHSLGPVALFCADYYHSGNDVDLSEATGQERELSNRDSTLHQSLVVEVPESVSISDTNDISGEPEHSRTDIDEDPSELTPRTYNIKRIEDWINQIDINDIALDGQGENSVSALAKSREPMAGVPAVRPDAKSPLGMEIAYTYISKLTPASSSAQLANLGLVAIPRLSAFSGLRVLNLSGNSIVRVTAGALPKGLHMLSLSKNNISTIEGLRELTRLRLLDISYNRISRIGHGLASCSSLKELYLAGNKISEVDGLHRLLKLKILDLRHNKISTSKGLGQLAANYNSLEAINLAGNPAQKNVGDEHLKKYLLGLLPNLAVYNKQPIRATGSKDVSDRHTRKISSSHHSDRGGRPDRRSSRLVGAPSAHKPQSSRHGRSGYVSSSALKYTRARNTHKTSLGSRPLEHASAIDLAKQTQTEGRTQ

SEQ ID NO: 6529 - protein, 243 aa, Pyrococcus horikoshii
MLVMVSQGIGMEGLLAIIVIPFLGYLAYKVKALDKKGSLIAILLGYAIIILGGYLPFLALLTFLIAGTLATRIKWNEKNALGLNEDVYRSVGNVLGNGLAPLLFLILEVLAEKDWGWAGVFSAIATANADTLASEIGKAFGKNPIMITTFRRAKVGESGAVSLVGEIVALLGALMIGIFAMFSSYNKFEMLLSVTIAGFLGSNIDSLVGATLERRGYLDNNGTNFVATLLGGVIGILMFLIVG

SEQ ID NO: 6530 - protein, 425 aa, Sulfolobus tokodaii
MEEKKLSLSQALALGLGNIIGAGIFVMAGVSITAAGPAALLAFLITAVYAMSVGLNNAELASVFPKVEGGVYSFALLSLGETIGFLVGWFRVIGYAISGGATALGFSGYLITTFSLPSFLYFLLAILLIIVLIIIDYLGLKLAAEIESILVVLNILGLVIFSITALVISGIRLQNFSPFLPHGITGVLTASNIAFFAYSGFNTIATLTPSVKEGERTVPKAIVLSLLISAFLYMLVTFSMVDAIGYKNFKTNSAPLQLVLSTIHAPFYVYFFVNLTAILATITVTLSTIIATERTMVQMELDNLLPKVKGGKLSILLIIGLVMIASLGLGNVEVIALVSNFGIVFSYMLSGIEVAVVRHRGLRGVFKSPGFPFVQIISVILSGVFIYSLGFQSLLIGFVTLLIGLVIHSIHKEIMKKEGIFSRKK

SEQ ID NO: 6531 - protein, 380 aa, Diacidia ferruginea
ETPAGALKSYKLAARAISRLQSLPSGIISLLCDVLVKEVRDLTDYDRVMVYKFHEDEHGEVISECCRPDMEAYLGLHYPATDIPQASRFLFMKNKVRMICDCLATPVKVIQDERLPQPLSLCGSTLRSPHGCHAQYMANMGAIASLVMSVTINEDDDVMDGDRQHRARKLWGLVVCHHTSPRFLPFPLRYACEFLIQVFGVQINKEVELAAQVREKHILRTQTLLCDMLLRDAPVAIITQSPNVMDLVKCNGAALYYKKKFWLVGLTPTEAQIRDIAEWLLEYHNGNTGLSTDSLMEAGYPGASELGDTVCGMAVVKITSRDFLFWFRSHTAKEIKWGGAKHDPDDKDDGRKMHPRSSFKAFLEVVKWRSLPWEDVEMDA

SEQ ID NO: 6532 - protein, 158 aa, Triticum aestivum
HVRPRTHARTPEESISQLQQRRRLSGGMAKWSLAHGSDGTNPPRALSEEDRKWFMEAMQANTVDVVGRMKEIAQVMKTPDDVLQSHGVTPENIEDMLDELQEHVESIDMANDLHSIGGLDPLLGYLKNSHAGIRAKAAEVVSTVVQNNPKSQQLVMES

SEQ ID NO: 6533 - protein, 377 aa, Triticum aestivum
  unsure (1)..(377): unsure at all Xaa locations
MAAASVSLKSSLFLSSPLSDFGGAAISISAQNRRRSWQPRGARMQVAAAADSKNILIMGGTRFIGLFLSRKLVQEGHQVTLFTRGKAPITQQLPGESDAEYAEFSSKVLHLKGDRKXIGFVKTSLAAKGFNVVYDINGREATEVSPILEALPKLEQXIYCSSAGVYLKSDLLPHFETDAVDPKSRHKGKLETESLLETSGVNWTSIRPVYIYGPLNYNPVEEWFFHRLKAGRPIPIPNAGNQITQLGHVKDLATAFIKVLDNPKASKQVYNISGSKYVTFDGLARACAKAGGFPEPEIIHYNPKDFDFGKKKAFPFRDQHFFASVEKASKDLGVTPEYDLLDGLTDSYNLDFGRGTFRKEADFTTDDMILGKKLVSV

SEQ ID NO: 6534 - protein, 320 aa, Lactococcus lactis subsp. lactis
MSKKIVTLAGDGIGPEIMSAGLSVLKAVSKKIDFEYELEAKDFGGIAIDKHGHPLPEETLQAVKNADAILLAAIGHPKYNNAKVRPEQGLLALRKELGLYANVRPLKIYPALKKLSPIRNVENVDFLMIRELTGGIYFGQHELADDKARDVNDYSADEIRRILHFAFKSAQSRPRKLLTSVDKQNVLATSKLWRKMADEIADEYPDVRLEHQLVDSCAMLLITNPQQFDVIVTENLFGDILSDEASSLAGSLGVMPSSSHGFNGLALYEPIHGSAPDIAGKGIANPVSMILSIAMMLRESFGQEDGATMIEKAVTQTFTD

SEQ ID NO: 6535 - protein, 198 aa, Oryza ridleyi
GQTPVFPRIFGHEAGGIVESVGDGVTDLAPGDHVLPVFTGECKECPHCKSAESNMCDLLRINTDRGVMIGDGKSRFSINGKPIYHFVGTSTFSEYTVMHVGCVAKINPEAPLDKVCVLSCGISTGLGATINVAKPPKGSTVAIFGLGAVGLAAAEGARIAGASRIIGVDLNPNRFEEARKFGCTEFVNPKDHDKPVQQ

SEQ ID NO: 6536 - protein, 189 aa, Zea mays
  unsure (1)..(189): unsure at all Xaa locations
MSFFPELYFNVDNGYLEGLVRGLKAGVLSQADYLNLVQCETLEDLKLHLQSTDYGNFLANEASPLTVSVIDDRLKEKMVVEFRHMRNHAYEPLASFLDFITYSYMIDNVILLITGTLHQRSIAELVPKCHPLGSFEQMEAVNIAQTPAELYNAILVDTPLAAXFQDCISEQDLDEMNIEIIRNTLYKAY

SEQ ID NO: 6537 - protein, 354 aa, Neisseria meningitidis Z2491
MKAARFYDKGDIRIEDIPEPTVAPGTVGINVAWCGICGTDLHEFMEGPIFIPPCGHPHPISGESAPVTMGHEFSGVVYAVGEGVDDIKVGQHVVVEPYIIHDDVPTGEGSNYHLSKDMNFIGLGGCGGGLSEKIAVKRRWVHPISDKIPLDQAALIEPLSVGHHAYVRSGAKAGDVALVGGAGPIGLLLAAVLKAKGIKVIITELSKARKDKARESGVADYILDPSEVDVVEEVKKLTNGEGVDVAFECTSVNKVLDTLVEACKPAANLVIVSIWSHPATVNVHSVVMKELDVRGTIAYCNDHAETIKLVEEGKINLEPFITQRIKLDELVSEGFERLIHNNESAVKIIVSPNL

SEQ ID NO: 6538 - protein, 318 aa, Glycine max
MALVRHRRHPNLRLPLPEPSERRLRFPLPLPPTTTAKPASGDAIAAADLEKLAILGHGNGGTVYKVRHKATSATYALKIIHSDTDATRRRRALSETSILRRVTDCPHVVRFHSSFEKPSGDVAILMEYMDGGTLETALAASGTFSEERLAKVARDVLEGLAYLHARNIAHRDIKPANILVNSEGDVKIADFGVSKLMCRSLEACNSYVGTCAYMSPDRFDPEAYGGNYNGFAADIWSLGLTLFELYVGHFPFLQAGQRPDWATLMCAICFGDPPSLPETASPEFRDFVECCLKKESGERWTTAQLLTHPFVCNDPDTC

SEQ ID NO: 6539 - protein, 341 aa, Streptomyces griseus
MRYRYLGKTGLRVSELCLGAMTFGREADETTSHALLDRFTEAGGTFVDTADIYSAGASEEILGRWLKRQRRDDVVIATKVRYGTGEGPNDRGLGRNHLIAGVESSLRRLGTDHIDLYQVHAWDPGTPLEETLATLDALVTSGKVRYIGASNFSGWQLQKAVDLSRANGWEPFTALQPLYNLLDRSAEWELMEVSRNEGLGVIPWSPLRGGWLSGAIRRGTERPPTGTRVETAEKLGWGESWSAYEGDERTWRVLDALHEVAGRTGLAVPVVALAWLLGRPGVTAPIVGARTLEQLETNLGAADLDLDPADAALLTAASDQVLPYPYSVNRDGPRAALTHPV

SEQ ID NO: 6540 - protein, 421 aa, Shigella flexneri 2a str. 2457T
MSNNEFHQRRLSATPRGVGVMCNFFAQSAENATLKDVEGNEYIDFAAGIAVLNTGHRHPDLVAAVEQQLQQFTHTAYQIVPYESYVTLAEKINTLAPVSGQAKTAFFTTGAEAVENAVKIARAHTGRPGVIAFSGGFHGRTYMTMALTGKVAPYKIGFGPFPGSVYHVPYPSDLHGISTQDSLDAIERLFKSDIEAKQVAAIIFEPVQGECGFNVAPKELVAAIRRLCDEHGIVMIADEVQSGFARTGKLFAMDHYADKPDLMTMAKSLAGGMPLSGVVGNANIMDAPAPGGLGGTYAGNPLAVAAAHAVLNIIDKESLCERANQLGQRLKNTLIDAKESVPAIAAVRGLGSMIAAEFNDPQTGEPSAAIAQKIQQRALAQGLLLLTCGAYGNVIRFLYPLTIPDAQFDAAMKILQDALSD

SEQ ID NO: 6541 - protein, 612 aa, Oryza sativa (japonica cultivar-group); identical to SEQ ID NO: 6389

SEQ ID NO: 6542 - protein, 192 aa, Glycine max
  unsure (1)..(192): unsure at all Xaa locations
ITINPLCFHPSFSSYSRLFLFSSLSKGCPEITLNNGERLWPLLGSSEGXVTGTIHFVQEGXGPTTXVTGSLAGLKPGLHGFHVHALGDTTNGCLSTGSHFNPNNKEHGAXPEDENRHAGDLGNVNVGDDGTVSFTITDSQIPLTGPNNIIGRAVVVHADPDDLGKGGHELSKTTGNAGGRVACGVGIIGLQG

SEQ ID NO: 6543 - protein, 269 aa, Triticum aestivum
MQILNEQLAAPSTGLMVKESASPGSGSGSPGGAAEKMGRGRIEIKRIENTTNRQVTFCKRRNGLLKKAYELSVLCDAEVALIVFSGRGRLYEYSNNSVKATIERYKKATSDTSSAGTVAEINAQHYQQESAKLKQQITTLQNSNRTLIGDTMATMSHRDLKQLEGRLDKGLGKIRARKNELLCAEIEYMQRREMELQNNNFFLREKVAETERGQQQTLNMMGAASTSNEYEQNMIHCDPRTFLQFNFMQQQPQYYSQQEDRKSLNSVGR

SEQ ID NO: 6544 - protein, 372 aa, Chenopodium rubrum
MAPSFDLLCAEDNSSIFDEVDDNYYGVVDDDVLQICNLQQQHGNLRNFDDFTLILLIIIKEHNFEALISGFFVANHECLASLFDNERQHFLGLDYLKRFRNGDLDLGARNLVIDWIHKVQSHYNFGPLCVYLSVNYLDRFLSAYELPGKAWMMQLLGVACLSLAAKVDETDVPLILDLQVSESKFVFEAKTIQRMELLVLSTLKWRMQSVTPFSFIDYFLYKLSGDKMPSKSLIFQAIQLILSTIKGIDLMEFRPSEIAAAVAISVTQQTQIVEFTDKAFSFLTDHVEKERLMKCVEIMHDLRMSSRSNGALASTSVPQSPIGVLDASACLSYKSDDTSTTPSGSCGNSAHSSPASAPPPKRRKLDRTSQIS

SEQ ID NO: 6545 - protein, 144 aa, Triticum aestivum
GSWPRRFRTSELGGNWSSWAPVPPPRVAHRSRAKLILLVNMPVLIGSTGMMPPATAVNYTTWIIAGFLSGYVVYRYRRHWWERHNYLLSGALDAGLAFMAVLIYLCLGLENVGLNWWGNDLDGCPLASCPTAKGIVVEGCPVYT

SEQ ID NO: 6546 - protein, 72 aa, Escherichia coli
MGFKCGIVGLPNVGKSTLFNALTKAGIEAANFPFCTIEPNTGVVPMPDPRLDQLAEIVKPQRTLPTTMEFVD

SEQ ID NO: 6547 - protein, 220 aa, Gossypium barbadense
DVYYWECKGYTPLFPRILGHEASGIVESVGEGVNDLKPGDHVLPIFTGECKECRHCLSEESNNMCELLRINCDRGVMLADGKTRFSINGKPIYHFVGTSTFSQYTVVHVGQVAKISPTAPLDKVCPISCGICTGFGATVNVAKPKKGQTVAVFGLGAVGLAAAEGARVCGASRIIAVDVNPRRFEEAKRFGITEFVNPKDYDKPVQEVIVEMTGGGVDRS

SEQ ID NO: 6548 - protein, 294 aa, Rhizobium sp. USDA 3394
RGKTQIKEFDTFPTLEQLPLWGFDGSSTMQAEGRSSDCVLKPVALYPDPARTNGALVMCEVMMPDGVTPHASNARATILDDEDAWFGFEQEYFFYQNGRPLGFPEQGYPAPQGPYYTGVGYSNVGDVAREIVEEHLDLCLAAGINHEGINAEVAKGQWEFQIFGKGSKKAADQIWMARYLLQRLTEKYGIDIEYHCKPLGDTDWNGSGMHCNFSTKYMREVGGKDYFEALMAAFDKNMMDHIAVYGPDNDKRLTGKHETAPWNKFSYGVADRGASIRVPHSFIKNDYKGYVEDR

SEQ ID NO: 6549 - protein, 246 aa, Oceanobacillus iheyensis HTE831
MDYYNNYPYHQQPQQDQRQNNNLPGDMLNQYFNNQHDDYNQQQFTGAHPESSEGYYEVDESEANNPHGYFNDPGRIFPGGPGGGFPGGFPGGGPDGGPGGGFPGGFPGGGPGGGPGGGFPGGFPGGGPDGGPGGGFPGGIFDGFPGGGFPGGGFPGGGGQGGQQAPTSAPPNFTPEKPAFQTFAVDPGGIRRCLFRFTYIWPERGRGFWYFPTFVGRNSIAGFRWSGFRWVYFGMDLDRIESFQCY

SEQ ID NO: 6550 - protein, 392 aa, Mionandra camareoides
DLEPVNPADVPVTAAGALKSYKLAAKAISRLQSLPSGNISLLCDVLVKEVRDLTGYDRVMAYKFHEDEHGEVVSECRRSDLESYLGLHYPATDIPQASRFLFMKNKVRMICDCLAPPVKVIQDERLPQPLSLCGSTLRSPHGCHAQYMTNMGTIASLGMSVTVNEDDDTMDGDQQQMTRKLWGLVVCHHTSPRFVPFPLRYACEFLIQVFGVQINKEVELAAQVREKHILQIQTMLCDMLLRDAPVAIITQSPNVMDLVKCDGAALYFKNKTWLLGVTPTEEQIRDIAEWLLKYHCGNTGLSTDSLMEAGYPGASALGDAVCGMAAVSITSRDFLFWFRSHTAKEIKWGGAKHDPDDKDDLRKMHPGSSFKAFLEVVKWRSMPWKDVEMDAI

SEQ ID NO: 6551 - protein, 245 aa, Salacia impressifolia
ALSIAGAVQSQKLAVRAISQIQSLPGGDIKLLCDTVVESVRDLTGYDRVMVYKFHEDEHGEVVAESKRPDLEPYIGLHYPATDIPQASRFLFKQNRVRMVVDCNASPVRVIQNDGLMQPLCLVGSTLRAPHGCHAQYMENMGSIASLAMAVIINGNDEEVIGGRNPTRLWGLVVCHHTSARCIPFPLRYACEFLMQAFGLQLKMELQLAAQLLEKHVLKTQTLLCDMLLRDSPTGIVTQSPSIMD

SEQ ID NO: 6552 - protein, 184 aa, Triticum aestivum
MLCRLLSLLLLAALLAAAAGHGDSSASSCPFHGGHDEEPHEHHDHGHSCGGALDDSNHEHHHHHSHHHRDEIQRLLPEELAEEADLELEGFDHDHHHHHDHHHDHIHRDFQPESTPMGVWLRAMGCSLLVSMASLVCLILLPVILFQGKPSKAVVDALAVFVAGAMLADSFLHQLPHAFVVYCS

SEQ ID NO: 6553 - protein, 405 aa, Neurospora crassa
MASPRKSHPLQAHRTASRHIKKTNHNVTTTEQIRTPITDLFKINHPIFLAGMNVAAGPKLAAAVTNAGGLGVLGGINYTPDMLRDQIDELKSHLKDKNAPFGVDLLLPQVGGNARKTNYDYTKGKLNELIDIIIQSGAKLFVSAVGVPPKHVVDKLHAHGIVYMNMIGHPKHVKKCLDLGVDIICAQGGEGGGHTGDIATTILIPAVVEACKGAISPLTKKEVLVVAAGGIHSGPLLASALMMGASAVWVGTRFVLCEEAGASEAHKEAVRTASFSDTIRTLIFTGRPLRVRKNPYIENWETERAQEIKELTSKGKLPYEADLDKLMSGAADIPQAMKDAYKADNGSEEVDVDDLLDHFQPFLMGQCAAVCNEKKNAKQIVDEFINDAVAVIRKGNSFITVPSKL

SEQ ID NO: 6554 - protein, 388 aa, Salmonella enterica subsp. VII
QNGKLNVPENPIIPFIEGDGIGVDVTPAMLKVVDAAVEKAYKGERKISWMEIYTGEKSTQVYGQDVWLPAETLDLIRDYRVAIKGPLTTPVGGGIRSLNVALRQELDLYVCLRPVRYYQGTPSPVKHPELTDMVIFRENSEDIYAGIEWKADSADAEKVIKFLREEMGVKKIRFPEHCGIGIKPCSEEGTRRLVRAAIEYAITNDRDSVTLVHKGNIMKFTEGAFKDWGYQLARDEFGGELIDGGPWLKIKNPNTGKEIVVKDVIADAFLQQILLRPAEYDVIACMNLNGDYISDALAAQVGGIGIAPGANIGDECALFEATHGTAPKYAGQDKVNPGSIILSAEMMLRHMQWFEAADLIVKGMEGAIAAKTVTYDFERLMEGAKLLK

SEQ ID NO: 6555 - protein, 316 aa, Zea mays
MSAPSAPPRTVICVGDVHGYITKLESLWSNLQAALPADAFATALVIFLGDYNDRGPHTRRVLDFLLALPTRHPAQRHVFLCGNHDLAFAAFVGALPPPPDGSPFSATWDEYIHNEEHEGWFRGPGFEGMHVQGRRWGGVIKERWNPKKGLPYKGSIYDAQPTFESYGVAHGSPDLAKAVPEEHKRFLHDLVWIHEEENVPIDMDGGQIICNLIAVHAGLERTIDLNEQLRVLRTRDTRVPKVQMLSGRQDVWDTPKGLAGKQTIIVSGHHGKLHIDGLRFIIDEGGGYEDKPIAAIVFPSKTLIRSTEEAGTTSER

SEQ ID NO: 6556 - protein, 153 aa, Oryza sativa (japonica cultivar-group)
MVAAAAAVLPWGGGGSPAWIEVPEKSKSAFWELKRRKVHRYVIFKIDDRREEIVVEKTGAPGESYDDFTASLPADDCRYAVYDLDFVSDDNCRKSKIFFISWSPSVSRIRAKTIYAVSRNQFRHELDGVHFEIQATDPDDMDLEVLRGRANRT

SEQ ID NO: 6557 - protein, 221 aa, Glycine max
MALFAAFSICKVAKDAAGVAGNVFAFGLFVSPIPTFRRIIRNGSTEMFSGLPYIYSLLNCLICMWYGTPLISADNLLVTTVNSIGAVFQFVYIIIFLMYAEKAKKVRMIGLSLAVLGIFAIILVGSLQIDDIIMRRFFVGFLSCASLISMFASPLFIIKLVIQTKSVEFMPFYLSLSTLLMSTCFLLYGLLNDDAFIYGPDGVGTMLGLVPGVLCWVLRGG

SEQ ID NO: 6558 - protein, 129 aa, Petunia axillaris
MSTSNASTSGVRKGAWTEEEDLLLRECIEKYGEGKWHLVPVRAGLNRCRKSCRLRWLNYVRPHIKRGDFSLDEVELILRLHKLLGNKWSLIAGRLPGRTANNVKNYWNTHLRKKLIVPHDQKQESKTKP

SEQ ID NO: 6559 - protein, 429 aa, uncultured bacterium pCosHE2
MTTDDLAFDQRHIWHPYTSMTSPLPVYPVVSAEGCELILSDGRRLVDGMSSWWAAIHGYNHPQLNAAMKSQIDAMSHVMFGGITHAPAIELCRKLVAMTPQPLKCVFLADSGSVAVEVAMKMALQYWQAKGEARQRFLTFRNGYHGDTFGAMSVCDPDNSMHSLWKGYLPENLFAPAPQSRMDGEWDERDMVGFARLMAAHRHEIAAVIIEPIVQGAGGMRMYHPEWLKRIRKICDREGILLIADEIATGFGRTGKLFACEHAEIAPDILCLGKALTGGTMTLSATLTTREVAETISNGEAGCFMHGPTFMGNPLACAAANASLAILESGDWQQQVADIEVQLREQLAPARDAEMVADVRVLGAIGVVETTHPVNMAALQKFFVEQGVWIRPFGKLIYLMPPYIILPQQLQRLTAAVNRAVQDETFFCQ

SEQ ID NO: 6560 - protein, 363 aa, Prochlorococcus marinus subsp. pastoris str. CCMP1378
MLKAGIIGLPNVGKSTLFNALVENAKAQAANFPFCTIEPNKGIVSVPDQRLQELGSLSSSQNIIPTKIEFVDIAGLVKGASKGEGLGNKFLSNIREVDAIVHVVRCFEDTEVIHVSGKIDPLDDIEIINLELNLADLSQLQKRRERIKKQVKTSKEAAQEDSLLEKIEDELQKGLSIRSISLTDEENLMIKQLGFLTAKPIVYATNLNENDLAEGNDFSSKVQSFANSENTECIKISAQVESELIELEPEDKKDYLMGLGVEEGGLKSLIKSTYKLLGLKTYFTTGEKETKAWTIKDGMTAPQAAGVIHTDFEKGFIRAQTISYQNLIDSGSIVNAKNKGLLRSEGKEYVVNEGDVMEFLFNV

SEQ ID NO: 6561 - protein, 188 aa, Lithachne humilis
VMHVGCVAKINPAAPLDKVCVLSCGISTGLGASINVAKPPKGSTVAIFGLGAVGLAAAEGARIAGASRIIGVDLNPNRFEEARKFGCTEFVNPKDHNKPVQEVLAEMTNGGVDRSVECTGNINAMIQAFECVHDGWGVAVLVGAPHKDAEFKTHPMNFLNERTLKGTFFGNYKPRTDLPNVVELYMKK

SEQ ID NO: 6562 - protein, 290 aa, Zea mays
QVGSPHYYCYQECSPTSRTAAQADDGRERADAAAPSCQTLAKRLDSKDWVMTCEALNNVRQLAMYHKERLQELLEPVVPLIVKSVKNPRSAVCKTALMTCADIFKAYGDLMVHSIDPLLVQLFLKASQDKRFVCEAAEAALISMTSWISPLLLLPRMLPYLKNKNPRIRAKASVCFSKSVPRLDVVGIKEYGMDKLIQIAATQLSDQLPESREAARNLALELQAFYEKSQASTSDEHEVEASASPDAESWEAFCQSKLSALSAQAILRVTSTTTKECVTSAPKEGLAVGC

SEQ ID NO: 6563 - protein, 434 aa, Cenarchaeum symbiosum
MDLEREYRAKTGGSARIFARSKKYHVGGVSHNIRFYEPYPFVTRSASGKHLVDVDGNKYVDYWMGHWSLILGHAPAPVRSAVEGQLRRGWIHGTVNEQTMNLSEIIRGAVSVAEKTRYVTSGTEAVMYAARLARAHTGRKIIAKADGGWHGYASGLLKSVNWPYDVPESGGLVDEEHSISIPYNDLEGSLDVLGRAGDDLACVIIEPLLGGGGCIPADEDYLRGIQEFVHSRGALLVLDEIVTGFRFRFGCAYAAAGLDPDIVALGKIVGGGFPIGVICGKDEVMEISNTISHAKSDRAYIGGGTFSANPATMTAGAAALGELKKRKGTIYPRINSMGDDARDKLSKIFGNRVSVTGRGSLFMTHFVQDGAGRVSNAADAAACDVELLHRYHLDMITRDGIFFLPGKLGAISAAHSKADLKTMYSASERFAEGL

SEQ ID NO: 6564 - protein, 306 aa, Glycine max; identical to SEQ ID NO: 5439

SEQ ID NO: 6565 - protein, 165 aa, Clostridium tetani E88
MIRNFNNKTPKIHSNSFIESTSCIIGDVTIEDNVSIWFNAVLRADHNSIYVGKNSNIQDNCTLHIDTNFKVKIGESVTVGHNSILHGCEIGNNTLIGMGSIILNGAKIGENAIVGAGTLIPQGKTFPSGVLLLGSPAKIIRNLTSEEIENIKKSSDEYVKLSKTY

SEQ ID NO: 6566 - protein, 132 aa, Glycine max
MRLNTEKWHRKLIFDAVNEILGEKLGSFVEPCLKPNGLATKFVSAQKLLKELCFEVQKLQYVKPDCSLEDEGDGLKSMLREDVMCHSENWTGFPGELPGVVLDVERLIFKDLIDEFVIDEMASLRVKFSKHR

SEQ ID NO: 6567 - protein, 683 aa, Gibberella moniliformis
MYHTVPYTIESPGYLKVAGESLPRRHPRAKHGLLRYPSAGVLTVFDIVRRSAKLYPDNKAVGSRRLIKMHREFKIIQDKEKEWIYYELGPYNYLSYSQYELLAIQIGSGLRKLGLSSSNKVYLFGTTSANWISMSHGCASQGIPIVTGYDTLSATDIQHSLSQTHAEVIYLDPHLLGTASIALENSQVKTVIINTGSIFSGGYDIDQFRNEHPQFNVITYEELIQLGRHNLKEPIPVKSSDLFCIMYTSGSTGLPNGCCITHENFLAGKLTRSSTVTGLLGGIDDFVSDQERVLAYLPLAHIFEMALENLVMYIGGTLGYGNPKTLTDASLRECNGDMVEFKPTIMVGVPQIWETIRKAVLSKLNCSGFVAKTVFWTAMSFKSFAVRYSLPGKGVFDDLVFGRVRQMTGGRLRYILNGSSGIADSTKEFLSLIVAEMLTGYGLTETCANGALSSPFEQTTSAIGSTSPAIDVKLVSIPELGYFTDADAGPCQGEILVRGPAVFKGYFNNPQGTEKAFAPGGWFKTGDIGEFDDRGHLKIIDRIKSLVKMQGGEYIALEKLESIYRTSQAILQVMVHADFEYTRPIVIIMPNTKFLQDKSRELGFSDDDSTLSSERMSAYVLDDLQDIARRSGLSKIETVTGVVITDIEWTPQSGLVTPTMKLNRRFILNYFRDEVEKCMQSIG

SEQ ID NO: 6568 - protein, 322 aa, Glycine max
MAPSSKAEKKAAVDAAAWMFNVVTSVGIIIVNKALMASYGFSFATTLTGMHFATTTLMTVVLRMLGYVQPSHLPLPDLLKFVLFANFSIVGMNVSLMWNSVGFYQIAKLSMIPVSCLLEVVLDKIRYSRDTKLSIGVVLMGVGVCTVTDVSVNGRGFIAAFIAVWSTSMQQYYVHFLQRKYSLSSFNLLGHTAPAQAASLLLLGPFLDYWLTNKRVDRYDYNTASLIFIFLSCTIAIGTNLSQFICIGRFTAVSFQVLGHMKTILVLIMGFFFFGKEGLNLQVVFGMIIAVAGMIWYGNASSKPGGKERRSHTLPTNKTETR

SEQ ID NO: 6569 - protein, 227 aa, Zea mays
  unsure (1)..(227): unsure at all Xaa locations
SSRRSVHHLSSAACPLLLSPSRLSASSTRYRLTAVNAPPGIPLVRHRRPPAAPFASSWPPRRPPTSVHDFXVKDASGKDVDLSTYKGKVLLIVNVASQCGLTNSNYTELAQLYEKYKDQGFEILAFPCNQFGGAGAXTNEEIVQFACTRFXKAEYPIFDKVDVNGNNAAPIYKFLKSSKGGLFGDSIKWXNFSKFLVDKEGRVVDRYAPTTSPLSIEKDIKKLLGSS

SEQ ID NO: 6570 - protein, 503 aa, Zea mays
  unsure (1)..(503): unsure at all Xaa locations
MDAAAAAAVVSLNGKMGAEERKAQKSYWEEHSKNLTVEAMMLDSRAADLDKEERPEVLSLLPSYEGKSVLELGAGIGRFTGELAKTAGNVLALDFIESAIKKNESINGHYKNASFMCADVTSQDLVLQANSIDLIFSNWLLMYLSDEEVEQLVQRMVKWLKVGGYIFFRESCFHQSGDSKRKVNPTHYREPSFYTKVFKECHTFDQDGNSFELSLVTCKCIGAYVKNKKNQNQICWLWQKVHSTEDKGFQRFLDNVQYKASXGILRYERIFGEGYVSTGGVETTKEFVDKLDLKPGHKVLDVGCGIGGGDFYMAEKYDAHVVGIDLSINMVSFALERAIGRSCSVEFEVADCTTKTYPDNTFDVIYSRDTILHIHDKPSLFKSFFKWLKPGGKVLISDYCRSPGKPSEEFAAYIKQRGYDLHAVEAYGQMLKSAGFRDVIAEDRTDQFLGVLDKELAEFEKNKDDFLSDFTQEDYDDIVNGWKAKLQRSSAGEQRWGLFIATK

SEQ ID NO: 6571 - protein, 209 aa, Triticum aestivum
  unsure (1)..(209): unsure at all Xaa locations
MVSLKLQKRLASSVLKCGKGKVWLDPNEVNEISMANSRQNIRKLVKDGFIIRKPQKIHSRSRARRAHEAKQKGRHSGYGKRRGTREARLPTKILWMRRMRVLRRLLRKYREAKKIDKHMYHDMYLKVKGNMFKNKRVLMESIHKSKAEKAREKTLSDQFEAKRAKSKASRERKIARREERLAPXPERSCTSTSGCSSSCGTKEGQEVKF

SEQ ID NO: 6572 - protein, 241 aa, Rickettsia conorii
MSELTIVTGGTRGIGKATALELKNKGLTVVANFFSNYDTAKEIEEKYGIKTKRWNIANFEECRKAVKEIEEEFKKPVSILVNNAGITKDKMLHRTSYQDWNDVMNINLNSCFNMSSSVMEQIRNQDYGRIINISSINAQARQIGQTNYSAAKAGIISFTKALARETASKNITINCIAPGYIAIKMVGAVPEDVLVKIVNSIPKKRLGQPEEIARAVAFLVDENAGFITGETISINGGHNMI

SEQ ID NO: 6573 - protein, 437 aa, Rhodobacter sphaeroides
MDRPGRSGFAGNPQPLERPLPPVPVPLLAREPLQPVESRSIHAPDPSRAHGPPQAPPPTLERIVQHFERIGVAGTGPSAPCSETWRSQRPADKERISSMRYRRLGPSGLFVSELCLGTMTFGGSDGIWGQIGQLGQDEADALVRTALDAGINFIDTANVYAGGESERILGRSLRNLGVRREDVVIATKVLGPMGAGVNARGASRVHILDQCKASLERLQLDHIDLYQIHGFDAETPIVETLEALDTLVRHGHVRYIGLSNWAAWQVMKAVGIAEARRLAPILSLQAYYTLAGRDLEREVVPMLKDTGMGLMVWSPLAGGFLSGKYDREGKAADGRRAAFDFPPVDKDRGWTVIEAMRPIAEAKGSSVAQVALAWLLHQEAVTSVIVGAKRVDQLADNIAATEVRLEAEDLAALDRASALAPEYPGWMLERQRSYRAR

SEQ ID NO: 6574 - protein, 214 aa, Oryza sativa (japonica cultivar-group)
MARSLSLLLLLVACFLVAGATAARPAPSTSGAAAISSFVRSWCAGTKYPALCDATLAPYSAAVGASPAKLAWAALTVTLSAARNATSAVRSIAARSSSSHLPPVAAEAAGDCASELGDGVDALRRCVDAMARVAVGEESSSTAAAARRKVRFEVDNVRTWASAALTDDNMCMEGFKGEAAGGGGAREAVRGHIMGLLHLTANALGILNAMAKQI

SEQ ID NO: 6575 - protein, 102 aa, Triticum aestivum
  unsure (1)..(102): unsure at all Xaa locations
YCSCGAHNFAIRSSCFXCSAYKXEAAVNSGAGGFDSDMSRSRGYGFGSGAARTNRPGWKSGYWICTRSGCNEHNFASRMECFRCNAPRDSGSAAMTYENYLH

SEQ ID NO: 6576 - protein, 1160 aa, Oryza sativa (japonica cultivar-group)
MPAKYLQMLGEERRPELHRQQAGCVTGILQAFDRRYPLAAHHSHNRLLPPAHALSSSPSVGEERTRYSSQIVLDKNMSKSWIDNQRAPLTVELSQGSYSSSSCSSSSSLDGNRSGQQDLSSTDRMLFPEKPFKSSPKLKSSSDSDCGVDYYLDDALAKLSAQPSYPTLGIRNLVKDSIYRDTRDFSIRTFTKEAEKDHLFNCGDPPRILNEPPNSAIQEKNKGTMDIDESLRVLAKLRNPSESVQQPRLSYDAPRFSCEGRESASKLREVPRLSLDIKESPLRNREIDVRPKPSMTDEDRRSSISKDYSPPLETQQEHNACKRLPSVVAKLMGLEDLPEHKDNTAISSQVSKSVTERSEEPTMLRPLSLSSQNEATPRQQRNLDATIKNVPNSKFPVETAPWKQQEKIVLPRKLPKGSKGAHGKEQHAASVYSEIEKRLKDLDFQQSNKDLRALKQILDSMQAKGLLQNKKREEPSMPKIYDGDHDNGDVTDVNLRLNSTSNTKQAPEGTPSFTTEEDSTTERSFKSPIVIMKPAKSADLLSDVTEDSAVGPLGGLSELPQLRTANSADKRKSSKKVTREAVEQHTKSSSRAPTPQHLASFDKRANGRNEEISRKQKSTSQLMTENSARRQQMQRENNGSLLKHKNSTSPRVQQKKPDSERRARPPIPSPDSSKNQRQSVERSHLDSVSPRSKFRRKPAQAQGEDFHQNGVSRRTRSLNQEGNDMSARSDGSISVASELDVEVTSTDRSAEVNILRSQHGTQTPSGRNPQKVKTSYDANKDLPSMDPAATITERPSPVSVLDSSFDQEEFFHTSKTTNSSNVDDEHHPSPSEESCKPSEKKSTELPTQPKNSKLANIASLLKKLQQLSVNKDEAPPVDHIAFLCETPSPDHRYVSEILLASGLLMKDLGSGLSQMQLHTSGYPINPDLFFVLEQRKSGWTSKPEGIHQSRSTTKPDDPKRAHRKLMFEAVNELLLDKFEKETTLITGVAARDPVMSSGQQLVKMICSGIECLKTERSRMCQEDSSVIPDAEILNRLEGWSPSFIRRELPGMVLEIERSIFKELVDEVVRGESADVAAMDPSDEQQGIQFSDGCLREFPSVITRKNNLCKFPKNLNDTKKNWVKGDLVRESTESLILDRQKKIGACNLRNVWVAAGVAFAE

SEQ ID NO: 6577 - protein, 222 aa, Pinus resinosa
MGRGKIEIKRIENTTNRQVTFCKRRNGLLKKAYELSVLCDAEVALIVFSSRGRLYEFANHSVKRTIERYKKTCVDNNHGGAISESNSQYWQQEAGKLRQQIEILQNANRHLMGDGLTALNIKELKQLEVRLEKGISRVRSKKNEMLLEEIDIMQRREHILIQENEILRSKIAECQNSHNTNMLSAPEYDALPAFDSRNFLHANLIDAAHHYAHQEQTTLQLG

SEQ ID NO: 6578 - protein, 173 aa, Helicobacter pylori
MNLEKLEISHDANALCVVIEISKHSSIKYELDKESGALMVDRVLYGAQNYPANYGFVPNTLGSDGDPVDALVLSDVAFQAGSVVKARLVGVLNMEDESGMDEKLLALPIDKIDPTHSYVKDIDDLSKHTLDKIKHFFETYKDLEPNKWVKVKGFENKESANKVLEKAIKAYQG

SEQ ID NO: 6579 - protein, 233 aa, Triticum aestivum; identical to SEQ ID NO: 6395

SEQ ID NO: 6580 - protein, 199 aa, Prochlorococcus marinus str. MIT 9313
MSIFVGNLPFRAEQEDVIELFAPFGEVANCALPLERDTGRKRGFAFVEMADESAEPAAIEALQGAEMMGRPLRINKAEPRGSAPRRGGGYGGGGGGGGGGYGGGGGGGYGGGGGGYGGGGGGYGGGGYGGGGYGGGGYGGGGGGGDRGSGARGWEDRSYGGASPETSSYDEGRTRRRRGGAAPEGEGGDSYSGYGGAEG

SEQ ID NO: 6581 - protein, 356 aa, Triticum aestivum
MAPLLKDELDIVIPTIRNLDFLEMWRPFFQPYHLIIVQDGDPTRTVMVPEGFGYELYNRNDINRILGPKASCISFKDSACRCFGYMVSKKKYVYTIDDDCFVAKDPTGKDIDALAKHIQNLLCPSTQLFFNTLYDPYQEGADFVRGYPFSLREGVPTAVSHGLWLNIPDYDAPTQLVKPRERNGRYVDAVMTIPKGSLFPMCGMNLAFDRELIGPAMYFGLMGDGQPIGRYDDMWAGWCVKVICDHLGLGVKTGLPYIWHSKASNPFVNLKKEYKGIFWQEDIIPFFQAAKLTKECDTVQKFYISLSQQVKEKLGKIDPYFVKIVDAMVTWIEAWDMLNSKDSKEADVANGKLKGK

SEQ ID NO: 6582 - protein, 450 aa, Magnetococcus sp. MC-1
MSNPWQPDSWRKFNALQQPEWPNQDELQQVCKNLSSYPPLVFAGEVRSLSGHLKRVANGKAFLLQGGDCAESFGEFNANAIRDKLKILLQMAVILTYGGGRPIVKVGRIAGQFAKPRSSPTETQGDQTLPSFRGEMVNDPDFSESSRNPEPNRLERVYFQSASTLNLLRAFTSGGFADLHSLNNWTRDFVSNSPQGKRYAEIADKLTDALKFMDTVGINSTNTPVLHEVEYFTSHEALILDYEQALTREDSLTNEYYCCSAHMLWIGERTRQLDGAHVEFLRGVKNPIGVKLGPSATAEDALRLCDALNPQNIPGRLTFITRFGHNKVEENLPKLIRSIKQAGRSVIWSCDPMHGNTFTASSGYKTRNVDHVMSEIRSFFAVHKAEGTCPGGVHFELTGDAVTECVGGSHQVTEAHLPERYETTCDPRLNATQSLDIAFLITETLQDFKK

SEQ ID NO: 6583 - protein, 345 aa, Oryza sativa (japonica cultivar-group)
MAATNKKIVLRNHVTGFPKESDMELVAATGAAPSRVPEGTDGAVLVKNLYLSCDPYMRGRMSSHDGSYVDAFVVGEAITGYGVGKVVDSSHPGFKAGDLVWGMTGWEEYSLIKDPSRALFAIRHPDLPLSYYTGLLGMAGFTAYVGFHEICAPREGERVYVSAASGAVGQLVGQFAKLMGCYVVGSAGSDDKVRLLREKFGFDDAFNYKKESDLSAALKRCFPEGIDIYFENVGGAMLDAVLLNMRVRGRVAACGMISQYNLEHPDPVHNLTAIVTKRLRIEGFIVSDHYARYREYEEKAARYVKEGKIAYVEDVAEGLENAPAALIGLFSGRNVGKQVVVVARE

SEQ ID NO: 6584 - protein, 353 aa, Bacillus halodurans
MKKITLSVIPGDGVGKEIMPHALRVLDAVAEVHGGLTFEKVEYPWSCEYYLEHGEMMPEDGLVQLTESDAVFLGAVGNPQLVPDHVSLWGLLIAIRRGFQQSLNIRHAKQIRGIDPPIKHANQFDLLVVRENSEGEYSEVGGRIHQGDDEVVVQNAIFTKKATKRAIDYAFQLAATRGKRVTSATKSNGIVFSMPFWDNVFQEVGKQYPDIEQQSVHIDALTAFLVTKPAEFDVIVASNLFGDILTDVSAAIMGSIGIGPAANLNVEGTYPSMFEPVHGSAPDIVGKGMANPIGQIWTGKMMLDHFGEEELGKTLLDIVEDVTEAGIKTPDIGGRATTGEVADAIIERVKSLT

SEQ ID NO: 6585 - protein, 144 aa, Zea mays
PAGQKVLKKKPRKGSKNTKPITKTEDCESFFPFERPPQVPDDDEEIDEDIAEQLQNEMEQDYDIGSTIRDKIIPHAVSWFTGEAAQDEEFEVMDGEDDDDEDNDDEDEDDEDDDDDDDYDSKKTKGTAGGEGQQGERPAECKQQ

SEQ ID NO: 6586 - protein, 436 aa, Leuconostoc mesenteroides subsp. mesenteroides ATCC 8293
GSSATIKWTGVSVLLAYAIAGLVLYLVMRALGEMLYVDPSVGSFANYATKYIHPVAGYLTVWANVFQWLTVGVSETIAVGMYLDYWFPHIPGWVTGVVVLAMLTAANLVTVKAYGEMETWFSLIKVVTIIFMIILGLLVIVLGFGNHWQPIGFSNLWTHGPFFAGGVKGFFFALSIVITSYQAIEIIGITAGEADNPQVAIVKSIKSIVARILIFYIGAIFVIITIYPWNELDQVGSPFVETFSRVGITAAAGIINFVMMTAAMSALNSGIFSSSRMLYTLAIGKELSPKFLKLSKHRVPTLPVLAISGGILLGIILNAVLPLFWHGSSSIFVLVYSASTLPGMVPWFVILWSQIKFRKENASQMVNHPFKMPFAPYTNYFAILMLLVTLVFMVFNPDTRVPLFIGLGFLVIMSIVFFATRKSHRRNSEVSSSKTL

SEQ ID NO: 6587 - protein, 458 aa, Oryza sativa (japonica cultivar-group); identical to SEQ ID NO: 2722

SEQ ID NO: 6588 - protein, 452 aa, Triticum aestivum
MATTAAAAAAAAATASTRANSLSRIFSSSSPIVQPPKRNPKTKSAPKPKPTPKPPAADAVSIADEKPPKPLGAQPAAKGDSDGKHKLPKPLGLLVKALSRQRDPDKLISGFIQASTVSSRFRDRHRVFEIAVSRLTSLGRQDGIEAIIEAQMPFLETSAEGFASRLIRLYGRASMPSHAAATFHKLPAQHKSNMTFNSLLSCYADAGDFDGLTAAFQEIPATYPSIVPTVYSYNVLIHALCRKPDVSAALDAVHLMEKIGVSPDIITFNTLLNGFCNNGRLDEAETVWEMIKERNLEPDAKCYNAKLRGLVAEGRIDDAAAVLEGLEKDGPKPDTVSYNELIRGYCKAGKLQEAKKLYDDLVKNECAPNKGTYETLLPHLLQAGELDCALTYCYKIFSHKRNLRVECGVLQDVVNALVDVLRVEEAAKIIVLGRKKYYPRKGLRMPDSTKRQ

SEQ ID NO: 6589 - protein, 462 aa, Oryza sativa
MSFRSIVRDFRDSFGTLSKRSFEVKISGFSGRHRGKSIGPSSELDDTPVVAQQSKWAGLPPELLRDVMKRLEEDDSNWPSRKDVVACASVCTTWRDMCKDIVRNPEFCGKLTFPVSLKQPGPRDGVIQCFIKRDKSKLTYHLYLCLSSAVLDETGKFLLSAKRSRRTTHTDYIISMDSKNISRSSSGYIGKLRSNFLGTKFIIYDTQPPYNARTLCSQERTSRRFSSRKVSPKVPTGCYPIVQVNYELNVLGTRGPRRMQCAMHSIPASAVEPGGIVPGQPKELLPRLFEESFRSMATSFSKYSITDHSTDFSSSRFSEFGGGALQGQEQEQDGDDVNKERPLVLRNKAPRWHEQLQCWCLNFRGRVTVASVKNFQLIAAAPQPASGAASEPSQAGQAAQQQTQPSQPSSSSSSSSSNHDTVILQFGKVAKDMFTMDYRYPLSAFQAFAICLTSFDTKLACE

SEQ ID NO: 6590 - protein, 157 aa, Zea mays; identical to SEQ ID NO: 642

SEQ ID NO: 6591 - protein, 251 aa, Salmonella typhimurium LT2
MTGFDFSDKTVWVTGAGKGIGYATALAFVDAGARVIGFDREFTQENYPFATEVMDVADAAQVAQVCQRVLQKTTRLDVLVNAAGILRMGATDALSVDDWQQTFAVNVGGAFNLFSQTMAQFRRQQGGAIVTVASDAAHTPRIGMSAYGASKAALKSLALTVGLELAGCGVRCNVVSPGSTDTDMQRTLWVSEDAEQQRIRGFGEQFKLGIPLGKIARPQEIANTILFLASDLASHITLQDIVVDGGSTLGA

SEQ ID NO: 6592 - protein, 446 aa, Chenopodium rubrum
MAARAVLQEQPRGGVQQKNGQGGERRNRTALGDIGNVVTARGGAIGAANGIAKPQAINRPLTRSFCAQLVANAQAAAEKKKKQGVKAVDVNVGGARKAGVGVAVAPAAAAQKKVQEKKKTEVVVAETKTPSGHGKVEQKPASKKKKTPTFTSFLTARSKEACGLSKKPQELIVNIDEGSVEDELAVVEYVEDIYSFYKIAEDESRVRDYMDSQPDINEKMRSILVDWLIEVHYKFELRQETLYLTINIIDRFLSMKIVPRKELQLVGIASMLIACKYEEIWAPEVNDFVQISDKAYVREQVLCMEKTILGNLEWYLTVPTPYMFLTRYVKASVTLDSEMENMSYFFSELGMMNYSTTIKYPPSLLAASSVYTARCTLNNSPSWTETLKHYTGYSENQLLECARLLVSFHMAAPEGRLRAVYKKFSKPDNGAVALRPPAKSLLASTS

SEQ ID NO: 6593 - protein, 42 aa, Glycine max
MSKLPIAEPSPLHTTTIVEKCTLKLVDDYKNMLCQATEPLST

SEQ ID NO: 6594 - protein, 108 aa, Schizosaccharomyces pombe
MPRAAKSSRKKDPNTPKRNMSAFMFFSIENREKMKTDNPDATFGQLGSLLGKRWKELTSTEREPYEEKARQDKERYERERKEYDTKLANGEKTGKASAPAAAAAAKEE

SEQ ID NO: 6595 - protein, 190 aa, Triticum aestivum
  unsure (1)..(190): unsure at all Xaa locations
GVDSKSELAEISISLKEEIVXSPRCESFDESLQWIARMLDSNVVGGKCIRGLSIIDRYNTLKGVDAIXKEDTFITCSYVGGIEGFQAYCLVFDDIMNNCQTLRGQPNXFRVRQRVVISVYDGIILRXHSSRIVHKHLRGNRXYVYLEDPFNEVECXDSSRAVVGSFSTHEGEKALTIYTCLNTIKLEREG

SEQ ID NO: 6596 - protein, 328 aa, Magnetospirillum magnetotacticum
MTPLFQTRVTELFGIRLPVLAGGLQWLATPDYVAAAAHAGICGFITAASYEDTADLKSAIRRCRELSDGKPFGVNVSMLPKLVQGERTQAVFDLIVEESVPFVETSGRNPASYLPALKAAGIKVVHKVPAVKYALKAEAEGVDAVAVVGAECGGHPGMDMVGTFVQANVAAAKLSIPLLVGGGIGTGAHLVAALALGADGVVVGTRFLVAEEIWAHADYKQRLIEADETETTLILSSLRNTARVLRNEATATVQALENQGAGIEALMPHISGKVGREAYLSGDWTKAALSVGQSVAFADRIEPLAAIVARFEDEARAALARLKRLAAP

SEQ ID NO: 6597 - protein, 491 aa, Methanopyrus kandleri AV19
MEKVGLRRELTMLGFISTICCTVIGGGVNVLTCMIQVKAPGVGPYVPLAFLIGAVPSLVAGIVAGALSAAVPRAGGHYTYVSRLFDPFLAFFSSWSRFVGEIGAFVAIAIGDVALLAAMCKFWGAPAAGKWLNAHTLEVATLIIIFTWLVNVLGIRIYEAVVDVMFFILLTGFFIVVGYGFAHSPAEYLKAIGGTTALKSLISQAGGLPKDVGTLSAIFSAAATLVFAYVGFETGTQAAGEVKKPEKTVFRGMLIALGIITAYYLLYSAAVYHAVPWEYIYAKAALADKAGSNFTVPEAMAPIMPSALAGYVAFVAAIALLSDLPPMFLSTSRMTFAWAYDGMFPKVFAKVHKSFGTPHWALTVLMVVSVILTWAVGKFLAAVDITTVALLFTYLFICMTGLVWKFVRPDIYEKAPLGDKTKKAVNWLGATGTVLSLFFLGEIAISDPTSFYWWIALMVPGPFIFYYAYNRTVKKLGPEKARERLMTIPPE

SEQ ID NO: 6598 - protein, 405 aa, Saccharomyces cerevisiae
MNIGGGKFLLGRISNNPTSGIVGLANVGKSTFFQAITNSKLGNPANYPFATIDAECAKVNIPTVPLSNLLRIYQSAKCVPGTLTIYDIAGLTRGASQGHGLGNKFLNDIRHVEGIFQVVRGFLKEDITHIEGNVDPVRDLSVVQDELIFKDLEFLENIRERLSKKMRMVSKNSKEHQEMKIETELLDALEEHLFNGKKIRHFKDHWNLDEVKILNKHNFLTSKPTLILLNVSPQDYVRNENKFVRNIIEWINEFSPGDKFLLFSAEFESQLMECKGIASEYFDKIKEDTNVSDQQLVSAIPQIILEMRKLLNLISFFTCGPQAVHQWNIREGTTAQEAAGVIHSDLRETFISADVIKYDDLKKMEPPLNESLLKSKGLIKRAGKQYIMQDNDIALFKAAGGKIKK

SEQ ID NO: 6599 - protein, 220 aa, Putterlickia verrucosa
MAGQLAKPRSEPMEEKDGVRLPSYKGDNINGDDFNEKSRIPDPDRMIRAYTQSAATLNLLRSFATGGYATLQRVTDWNLDFVEHSEQADRYRELANRVDEAIGFMAAAGLTVDNPIMTTTEFWTSHECLLLPYEQSLTRLDSTSGKYYDCSAHMLWVGERTRQLDGSHVEFLRGLSNPLGIKVSNKMDPNELTKLVEILNPTNKPGRITIIVRMGAENMR

SEQ ID NO: 6600 - protein, 293 aa, Zea diploperennis
IIESVGEGVTDVAPGDHVLPVFTGECKECAHCKSAESNMCDLLRINTDRGVMISDGKSRFSINGKPIYHFVGTSTFSEYTVMHVGCVAKINPQAPLDKVCVLSCGISTGLGASINVAKPPKVSTVAVFGLGAVGLAAAEGARIAGASRIIGVDLNPSRFEEARKFGCTEFVNPKDHNKPVQEVLAEMTNGGVDRSVECTGNINAMIQAFECVHDGWGVAVLVGVPHKDAEFKTRPMNFLNERTLKGTFFGNYKPRTDLPNVVELYMKKELEVEKFITHSVPFAEINKAFDLMA

SEQ ID NO: 6601 - protein, 422 aa, Streptomyces coelicolor A3(2)
MTALSPHLRQATPVVAVRGEGVHIEGEDGRRYLDFTAGIGVTSTGHCHPRVVAAAQEQVATLVHGQYTTVMHPPLRRLVDKLGEVLPQSLDSLFFTNSGSEAVEAALRLARQATGRPNVLVCHGGFHGRTVAAASMTTSGTRFRSGFSPLMSGVVVTPFPTAFRYGWDEETATRFALQELDYTLQTISSPADTAAVIVEPVLGEGGYVPANRAFVEGLRERADRHGFLLILDEVQTGVGRTGRFWGHEHFGVAPDILVTAKGLASGFPLSAIAAPEELMRKAWAGSQGGTYGANAVACAAACATLDVVRDEKLVENAEAMGARLRHGLEAVASRNPAVGDVRGMGLMLASEFVTADGEPDPETAARVQRAAVDEGLLLLLCGAWNQVVRMIPALVIDETAVDEGLRAWAAAVEAGTSGAAGR

SEQ ID NO: 6602 - protein, 199 aa, Oryza sativa
  unsure (1)..(199): unsure at all Xaa locations
MMKLAHLXRLFFFXSSSSKKENKVSSKKRRSGAKSCSFGSTTSSSSLAASSSDDSAATTPRSVLPTSAAASSSGTKKPAAAAVTREDLEVALRRIVSSKEELAAMLRRGGLXXPGSFVLEEIAGXXAADEGELKETFAVFDADGDGRISAEELRAVLASLGDELCSVDDCRRMIGGVDTDGDGFVCFDEFARMMMCGRA

SEQ ID NO: 6603 - protein, 164 aa, Glycine max
MAASSSSSEKQVVLIGIDDSEQSTYALNWALDHFFPSPIFKLVLIHSRPTATSAVGFAGPVYAGAAEILPIVDSDLRKIAARVLETAKQLCFNKSVNDVTAEVVEGDPRNVLCDAVDKYRAAILVVGSHGYGAIKRAVLGSVSDYCAHHAHCTVMIVKKPKIKH

SEQ ID NO: 6604 - protein, 379 aa, Chlamydophila caviae GPIC
MKHLAILGSTGSIGQQTLKIIRSLPHLFKVVALASYGNNKDVFFEQIREFSPSIVSVYDEQSYFEISKEFPNIEVFLGEEGLLAAATAGEVDTIVAASSGVVALPAIIEAMKLGKTLALANKEVLVSAGEIIKEIAKQYQTRILPIDSEHNALYQCLEGKNTSEVKKLVLTASGGPLLYKSKEDLSRVTIRDVLKHPIWNMGAKITVDSSTLVNKGLEIIEAYWLFGLENAEIDAVVHPQSLIHGMVEFQDGTVLSVMNPPSMLFPIQHALTAPKRYPAPHKGIDFSVKQTLEFFPVDEERFPSIGLARQVLREKGSSGPFLNAANEVLVQRFLTEEIAWCDILDKLTRLMENYRVSSCSSLDDVFAVDKEARALAQEI

SEQ ID NO: 6605 - protein, 291 aa, Antirrhinum majus
MEILTPSSYFSNSNLFVEESWSPKWTAADNKAFENALAVFDEYTPHRWERVAEIVPGKTVWDVIRHYKELEDDVTSIEAGLVPVPGYNTSLPFTLEWGSGHGFDGFMQSYVVGGRKSSCSRPSDQERKKGVPWTEEEHKLFLMGLKKYGKGDWRNISRNFVITRTPTQVASHAQKYFIRQLSGGKDKRRASIHDITTVNLNDGQTFPRENKIKQSSPLAHQSNSAAATSKLHIQWNQTRNETITGFGSGNMFVSDPYNYMNSNEVGLQGRSPFGSRNMVFRMHPCFSYPSA

SEQ ID NO: 6606 - protein, 152 aa, Ipomoea batatas
MVKAVAVLSSSEGVSGTIFFSQEGDGPTTVTGNVSGLKPGLHGFHVHALGDTTNGCMSTGPHFNPAGKEHGAPGDDNRHAGDLGNITVGEDGTASFTITDKQIPLTGANSVIGRAVVVHGDPDDLGKGGHELSKSTGNAGGRVACGIIGLQG

SEQ ID NO: 6607 - protein, 385 aa, Zea mays
  unsure (1)..(385): unsure at all Xaa locations
MAGWCEQAVALLQRPAVAEMAVDVLLCAVPIWAAVMIGLVVGWSWRPRWTGLLFLGLRSRLRILWVPPGLGARRLWFACTALSACSVATKLISSAFRRCRGKHQDRASPDDAAAATRDGGCRADGRXGPIMYCSRTIFEDATPELVRDFFWDGDFRLKWDPMLAYSKSLDEFPQNGATIVHWIKKFPFFCSDREYIFGGRIWESGKTYYCVTKGVPYPSLPKKEKPRRVELYFSSWRIRAVQSPKHVGQQSACEVTLVHYEDMGIPKDVARVAVRHGMWGAVKKLQSGFRAYQQMRHTETTLSHSVIMARMTTKISITASNDPLDHDLSVADKISDENDSSNAVQHGFDWKWLVVGGAVAAVCVLNTGLVGKAVLLGAARRQAKK

SEQ ID NO: 6608 - protein, 192 aa, Isochrysis galbana
EGFEHYRCDRNVSLGINLGSMGKVLKCCNNDDIVTLKSDENGDAMTFMFENQNADRISDFELKLMDIDSEHLGIPDTDYKCTVQMPSAEFQRICRDHAILGDTVTISVTKEGVQFSVSGEMGSGNMTIKPNETVDTKDEDRVKVEMEEPVCLNFALRYLNFFTKATSLSDTVILSLSADVPLVVEYRINELG

SEQ ID NO: 6609 - protein, 577 aa, Ceratodon purpureus
MSAPKKTYSSTTSAKSKHSVRVAQTTADAALEAVYEMSGDSGDSFDYSKSVGQSAESVPAGAVTAYLQRMQRGGLIQTFGCMVAVEEPNFCVIAYSENASEFLDLMPQAVPSMGEMDVLGIGTDIRTLFTPSSGAALEKAAATQDISLLNPITVHCRRSGKPLYAIAHRIDIGIVIDFEAVKMNDVSVSAAGALQSHKLAAKAITRLQALPGGDIGLLCDTVVEEVRELTGYDRVMAYKFHEDEHGEVVAEIRRMDLEPYLGLHYPATDIPQASRFLFMKNRVRVIADCCASPVKLIQDPDIKQPVSLAGSTLRAPHGCHAQYMGNMGSIASLVMAVIINDNEEDSRGAIQRGRKLWGLVVCHHTSPRTVPFPLRSACEFLMQVFGMQLNMEVELAAQLREKHILRTQTLLCDMLLRDAPIGIVSQTPNIMDLVKCDGAALYYGKRFWLLGTTPTENQIKDIAEWLLEYHKDSTGLSTDSLADANYPGAHLLGDAVCGMAAAKITAKDFLFWFRSHTAKEVKWGGAKHDPAEKDDGRKMHPRSSFKAFLEVVKRRSLPWEDVEMDAIHSLQLILRGS

SEQ ID NO: 6610 - protein, 498 aa, Oryza sativa (japonica cultivar-group)
MDPSSAGAGGNSLASASCGDAQKRRVCYFYDPEVGNYYYGQGHPMKPHRVRMTHALLAHYGLLAPAKMQVLRPLPARDRDLCRFHSDDYVAFLRAVTPETQFDQIRSLRRFNVGEDCPVFDGLYAYCQTYAGASVGAAVKLNHGTHDIAINWSGGLHHAKKSEASGFCYVNDIVLAILELLKLHERVLYIDIDIHHGDGVEEAFYTTNRVMTVSFHKFGDYFPGTGDIRDIGYSEGKYYCLNVPLDDGIDDDSYQSIFKPIISKVMEMYRPGAVVLQCGADSLSGDRLGCFNLSGKGHAECVKFMRSFNVPLLLLGGGGYTIRNVARCWCYETGVALGEELREKLPYNEYYEYFGPEYSLYVAASNMENRNTNKQLEEIKCNILDNLSKLQHAPSVQFEERIPETKLPEPDEDQDDPDERHDPDSDMLLDDHKPMGHSARSLIHNIGVKREITETETKDQHGKRLTTEHKVPEPMADDLGSSKQVPVSRRLLYPSANP

SEQ ID NO: 6611 - protein, 592 aa, Saccharomyces cerevisiae
MTEDFISSVKRSNEELKERKSNFGFVEYKSKQLTSSSSHNSNSSHHDDDNQHGKRNIFQRCVDSFKSPLDGSFDTSNLKRTLKPRHLIMIAIGGSIGTGLFVGSGKAIAEGGPLGVVIGWAIAGSQIIGTIHGLGEITVRFPVVGAFANYGTRFLDPSISFVVSTIYVLQWFFVLPLEIIAAAMTVQYWNSSIDPVIWVAIFYAVIVSINLFGVRGFGEAEFAFSTIKAITVCGFIILCVVLICGGGPDHEFIGAKYWHDPGCLANGFPGVLSVLVVASYSLGGIEMTCLASGETDPKGLPSAIKQVFWRILFFFLISLTLVGFLVPYTNQNLLGGSSVDNSPFVIAIKLHHIKALPSIVNAVILISVLSVGNSCIFASSRTLCSMAHQGLIPWWFGYIDRAGRPLVGIMANSLFGLLAFLVKSGSMSEVFNWLMAIAGLATCIVWLSINLSHIRFRLAMKAQGKSLDELEFVSAVGIWGSAYSALINCLILIAQFYCSLWPIGGWTSGKERAKIFFQNYLCALIMLFIFIVHKIYYKCQTGKWWGVKALKDIDLETDRKDIDIEIVKQEIAEKKMYLDSRPWYVRQFHFWC

SEQ ID NO: 6612 - protein, 287 aa, Picea mariana
YKVTKGMAEKYGDLRVLDTPIAENSFTGMGVGAAMTGLRPVIEGMNMGFLLLAFNQISNNCGMLHYTSGGQFTIPVVIRGPGGVGRQLGAEHSQRLESYFQSVPGLQMVACSTPYNAKGLMKAAIRSENPVILFEHVLLYNLKEKIPDEEYVCCLEEAEMVRPGADVTILTYSRMRYHVMQAAKTLVNKGYDPEIIDIRSLKPFDLHTIGNSIKKTHRVLIVEECMRTGGIGASLRAAIIENFWDYLDAPIMCLSSQDVPTPYAGTLEDWTVVQPPQIVSAVEQICQ

SEQ ID NO: 6613 - protein, 117 aa, Triticum aestivum
GILEWLAPMAHATVRWQAERSFEQRKTTSTSSTTDIARLPPRHGGGGGGNTFLLQTLQFADRDKVEAAVAELLVGLNYVWRFEKEMSCRALFAVHREFVERGGRPSDFDGGADSCRG

SEQ ID NO: 6614 - protein, 240 aa, Oryza sativa
  unsure (1)..(240): unsure at all Xaa locations
MPFATELTKRLGIRVPVVQGGMMHVGTADLASAVSNAGGLGLITALIFPTPEELRKEIQRCRTLTKNPFGVNITLLPSMVPPNYAAFAQTIIDEGIKVVKTAGNSPGPVITQLKKAGIIVLHKCTTIRHAQSAVXLGVDFLSIDGFECAGHVGESDITNFILLSKARQTLGVPFIASGGFADGYGLAAALCLGACGINMGTXLYVXLVEAPVHXQVKEEIVRAQETDTTLLLRRWTNTTX

SEQ ID NO: 6615 - protein, 434 aa, Oryza sativa (japonica cultivar-group)
MLLDLNVESPERSGTSSSSVLNSGDAGGGGGGGGGGGLFRFDLLASSPDDDECSGEQHQLPAASGIVTRQLLPPPPPAAPSPAPAWQPPRRAAEDAALAQRPVVAKKTRRGPRSRSSQYRGVTFYRRTGRWESHIWDCGKQVYLGGFDTAHAAARAYDRAAIKFRGLEADINFNLSDYEDDLKQMRNWTKEEFVHILRRQSTGFARGSSKFRGVTLHKCGRWEARMGQLLGKKYIYLGLFDTEVEAARAYDRAAIRFNGREAVTNFEPASYNVDALPDAGNEAIVDGDLDLDLRISQPNARDSKSDVATTGLQLTCDSPESSNITVHQPMGSSPQWTVHHQSTPLPPQHQRLYPSHCLGFLPNLQERPMDRRPELGPMPFPTQAWQMQAPSHLPLLHAAASSGFSAGAGAGVAAATRRQPPFPADHPFYFPPTA

SEQ ID NO: 6616 - protein, 225 aa, Vibrio parahaemolyticus RIMD 2210633
MWLIVTIVVFLIARQIAIKINSPLANPLLISIAVLIPLLTYLNVPFETYYADNEGISFLLQPAVVALAYPLYEQLPQIKANWRIITFACTLGSIMSMATTTLIAVAFKADISLIASLVGKSVTTPIAMEISSHLGGETAVAAILVLIVGLLGAILAYPIYNLIGIKHPIARGLTMGTVSHALGTATCAEKQPGDAAFSSLALVLCGIITSILAPSFFGLAVWLYQ

SEQ ID NO: 6617 - protein, 453 aa, Corynebacterium glutamicum ATCC 13032
MSNRHLQLIAIGGAIGTGLFMGSGKTISVAGPSVILVYAIIGFMLFFVMRAMGELLLANLNYKSLRDAVSDILGPGAGFVTGWTYWFCWIATGMADIVAITGYTQYWWPEIPLWLPGVLTIALLFALNLAAVRLFGEMEFWFAIIKIVAIVSLIVVGLFMVVTAFESPNGTTAQFNNLIEHGGFFPNGITGFLAGFQIAIFAFVGIELAGTAAAETENPTKTLPRAINSIPIRIVVFYVLALAVIMMVTPWDQVRADNSPFVQMFALAGIPAAAGIINFVVITSAASSANSGIFSTSRMLYGLSLEGAAPKRWSRLSKNLVPARGLTFSVICLIPAVGLLYAGGTVIEAFTLITTVSSVLFMVVWSYILVAYIVYRRNSPELHKKSIFKMPGGVVMAVVVLVFFAAMLVVLSLEPDTRAALIATPVWFIILGIGWLSIGGAKGAKHRSQITSH

SEQ ID NO: 6618 - protein, 826 aa, Oryza sativa
  unsure (1)..(826): unsure at all Xaa locations
MTENSSLSMESSRASSSSSSCSSFSSTDINRPIQQELSYINKERFAGKPPRSSQXKECEMFQDRGQNHPHTGFRDIVKESINRETHGMTIKTSTKESRKGLHKDSPRPLLISKSTDGTYVIGIDRSTGVPGYVHESSRPPRFSCDDRQLLRSVEAQDSKKPSAKLKELPRLSLDSRKESMNPCSRLKNSGYISLDVLKHQESPSHQRASSVVAKLMGLEGTTPDIHETARSPTPVHGTQIDQPSHCQRIKNXXDHSVPVQKNHSPVLKTNPSPRIIPEAAPWRQNERXXVTGRAAEVKPRTASIYADIQRRLRGLELSECNKELRAXQDIEHTAQKGWPKPERQQSXINXAIQKKASEQIVDSENFQSPIVIMKPARCITKPDASDTLVAPLSRPKGIRRLRHEETSFTRKNXXNSDSKRNHSPNESAHSSXLAQKKADSERRXXPPVLPTSPGKKSKETVSPRGRLRSRHSQTKSNSDNDNVLHIPETKINXXGKADRCGCRXSSESSXXANSPYIHQSKIASTPNREENNSTCRQEEDPSTGEHXPSPVSVLDATFYHEGSSPSLKRISDSFKDGETHTSDESWNPTSLPDTPPSKASNDGNQIKAENMKALIQKLELLQMLSEEALKTDDTFSSVAANKDHQYLYEILSASGILHNKLNFQMMPHQLRPSSYPINPELFLILEQAKPDEEKLHRRLIFDLANELLAQQMDANHTVNSSVQFFQSKKLSGWQLFKDLCAEIDMIQSRSSMIRCSEEEDSRLAEDAMQGMKEWKSSDSERQGIVLAIEKSIFKDLIDEIIXXEXTKGSSLPSKKKTVTELQSKKT

SEQ ID NO: 6619 - protein, 466 aa, Hedyosmum sp. SM-2000
SGKPFYAIIHRVTASFIIDFEPVKPYEVPMTAAGALQSCKLAAKAISRLQSLPGGSMERLCETVVQEVFELTGYDRVMAYKFHEDDHGEVFSEITKPGLEPYLGLHYPATDIPQAARFLFMKNKVRMICDCHAKPVKVFQDEKLTFDLTLCGSTLRAPHSCHLQYMANMSSIASLVMAVVVNEGEDEGENVDSGQQQQQKRKRLWGLVVCHNTTPRFVPFPLRYACEFLIQVFAIHVNKEIELESQIREKNIFRTQTLLCDTLMRDAPLGIISQNPNILDLVKCDGAALLYKSKVWRLGLTPNEPQIHDISLWLSEYHMDSTGFSTDSLHEAGYQGAVALGNIVCGMAAVWITSKDMLFWFRSHTAAEVRWGGAKHDPDDTDDNRRMHPRSSFKAFLEVVKKRSIPWKDYEMDAIHSLQIILRGNFSDSEKTHANTTFDSRLNDLKLEGMEELQAVTNEMVRLIET

SEQ ID NO: 6620 - protein, 174 aa, Zea mays
MNRKPGDWDCRACQHLNFSRRDICQRCSEPRGVADRGGGGGGGDYASFGGRGGSSFGGGFGAAGSDVRPGDWYCSCGAHNFASRSSCFKCSAYKEEAAVNSGAGGFDGDMSRSRGYGFGSGAAGAGAGAARTTNRPGWKSGDWICTRSGCNEHNFASRMECFRCNAPRDSGTEV

SEQ ID NO: 6621 - protein, 124 aa, Glycine max
MVMAWKWIVRRTRESKPFFLAFATVCGVVPGVIGYGVMQLTNTRNEKLESHLRTNARPESLMMGQVNKERLAEYLGELQRKEDTNDRYVAALRGETLTRKPYVRIQPIPEQTDTKANKEQKKMN

SEQ ID NO: 6622 - protein, 123 aa, Enterococcus faecium
MNKFMALTAGIVGLPNVGKSTLFNAITKAGAEAANYPFATIDPNVGMVEVPDWRLQRLTELVHPKKTVPTTFEFTDIAGIVKGASKGEGLGNQFLSHIRQVDAICHVVRCFDDDNITPRRRTC

SEQ ID NO: 6623 - protein, 384 aa, Pisum sativum
MAIHHHHHHHQQLHHNSLLDALYCDEEKLEEEQEDVSSQQSDVTTNNDNNILDSTSLFPLLLLEQNLFSQDEELTTLFSKEKTQQETYYEDLKNVVDFVSLSQPRREAVQWMLKVNAHYAFSPLTATLAVTYFDRFLLTFHFQKDKPWMIQLVAVTCISLAAKVEETQVPLLLDLQVQDTKYVFEAKTIQRMELLILSTLKWKMHPVTPHSFLDHIITRLGLKTNLHWEFLRRCENLLLSVLLDSRFVGCVPSVLATATMLHVIDQIEESDDNGVDYKNQLLSILKINKEKVDECYNAIVEVTNENNYGHKRKYEQIPGSPSGVIDAVFSSDGSNDSWKVGSSSYSTSEPVFKKTKTQGQNRNLSPLNRVIVGILATASATTSP

SEQ ID NO: 6624 - protein, 275 aa, Zea mays
WRRRGRRCAFPPTAPCFWLHDTHSVFWRGGDAWTAAENKLFEKALAQIDRNAPDRWEKVAEVVRTKTVDDVRNHYHDLENDVGFIEAGLVPFPHYSGSVPSFGFTHHEDWDGGFRRGYCLKRARGSDPERKKGVPWTEEEHKLFLMGLKKYGRGDWRNISRKYVTTRTPTQVASHAQKYFIRLNSGGKDKRRSSIHDITTVNLPDEDRGNAPPSAVTTTTNPSVALVDMKPFVAPLQDALGVPHPYGDVKLEPKSSLVAGLGFNDSVLLMHCGQL

SEQ ID NO: 6625 - protein, 618 aa, Hordeum vulgare subsp. vulgare
MKREYQDGGGSGGGGDEMGSSRDKMMVSSSEAGEGEEVDELLAALGYKVRASDMADVAQKLEQLEMAMGMGGPAPDDGFATHLATDTVHYNPTDLSSWVESMLSELNAPPPPLPPAPPQLNASTSSTVTGGGGYFDLPPSVDSSSSTYALRPIISPPVAPADLSADSVRDPKRMRTGGSSTSSSSSSSSSLGGGAARSSVVEAAPPVAAAAAAPALPVVVVDTQEAGIRLVHALLACAEAVQQENLSAAEALVKQIPLLAASQGGAMRKVAAYFGEALARRVFRFRPQPDSSLLDAAFADLLHAHFYESCPYLKFAHFTANQAILEAFAGCRRVHVVDFGIKQGMQWPALLQALALRPGGPPSFRLTGVGPPQPDETDALQQVGWKLAQFAHTIRVDFQYRGLVAATLADLEPFMLQPEGEEDPNEEPEVIAVNSVFEMHRLLAQPGALEKVLGTVRAVRPRIVTVVEQEANHNSGSFLDRFTESLHYYSTMFDSLEGGSSGGPSEVSSGGAAPAAAAGTDQVMSEVYLGRQICNVVACEGTERTERHETLGQWRNRLGNAGFETVHLGSNAYKQASTLLALFAGGDGYKVEEKEGCLTLGWHTRPLIATSAWRLAAP

SEQ ID NO: 6626 - protein, 109 aa, Zea mays
MARLHCLEAVLTLGIITGMLCIMDNAQHFIHKVGHSRPNHISTDLWDVKHGAPATRSSRNNPTATMVWSNLKLSWMLSNLAQKHTMTALLFAAQLEPILASAALKYQQT

SEQ ID NO: 6627 - protein, 658 aa, Thermosynechococcus elongatus BP-1
MMSAAYTYTPPGGLPQDASLPDHFLAYKRLQSLPEMWPLLAQRHGDVVALDAPYEDPPTRITYSELYQRIQRFAAGLQALGVAAGDRVALFPDNSPRWLIADQGSMMAGAINVVRSGTADAQELLYILRDSGATLLLIENLATLGKLQEPLVDTGVKTVVLLSGESPELAGFPLRLLNFGQVFTEGQYGTVRAVAITPDNLATLMYTSGTTGQPKGVMVTHGGLLSQIVNLWAIVQPQVGDRVLSILPIWHAYERVAEYFLFACGCSQTYTNLRHFKNDLKRCKPHYMIAVPRIWESFYEGVQKQLRDSPATKRRLAQFFLSVGQQYILQRRLLTGLSLTNPHPRGWQKWLARVQTLLLKPLYELGEKRLYSKIREATGGEIKQVISGGGALAPHLDTFYEVINLEVLVGYGLTETAVVLTARRSWANLRGSAGRPIPDTAIKIVDPETKAPLEFGQKGLVMAKGPQVMRGYYNQPEATAKVLDAEGWFDTGDLGYLTPNGDLVLTGRQKDTIVLSNGENIEPQPIEDACVRSPYIDQIMLVGQDQKALGALIVPNLEALEAWVVAKGYRLELPNRPAQAGSGEVVTLESKVIIDLYRQELLREVQNRPGYRPDDRIATFRFVLEPFTIENGLLTQTLKIRRHVVSDRYRDMINAMFE

SEQ ID NO: 6628 - protein, 374 aa, Canotia holacantha
ALSIAGAVESQKLAVRAISHLQSLPGGDIKLLCATVVESVRDLTGYDRVMVYKFHEDEHGEVVAESKRPGLEPYIGLHYPATDIPQASRFLFKQNRVRMIVDCCASPVGVIQDDGLMQPLCLVGSTLRAPHGCHAQYMENMGSKASLAMAVIINGKDEEIVGGRNATRLWGLVICHHTSARCIPFPLRYACEFLMQAFGLQLNMELQLAAQLSEKHVLKTQTLLCDMLLRDSPTGIVTQSPSIMDLVECDGAALYYQGKYYPSGVTPSEAQTKDIVEWLLAFHGDSTGLSTDSLADAGYPGAAFLGDAVCGMAVAYITNRDFLFWFRSHTTKEIKWGGAKHHPEDKDDGQRMHPRSSFKAFLEVVKSRSLSWEN

SEQ ID NO: 6629 - protein, 493 aa, Oryza sativa; identical to SEQ ID NO: 2109

SEQ ID NO: 6630 - protein, 388 aa, Glycine max
MASRVSIGNLTSSAPYINSPHFRSQLKLSSNSSLHKPLMRDKTVLVTGGAGYIGTHTVLQLLLGGCRTVVVDNLDNSSEVSIHRVRELAGEFGNNLSFHKVDLRDRDALEQIFVSTQFDAVIHFAGLKAVGESVQKPLLYYNNNLTGTITLLEVMAAHGCKKLVFSSSATVYGWPKEVPCTEEFPLSAMNPYGRTKLIIEEICRDVHRAEPDWKIILLRYFNPVGAHPSGCIGEDPRGIPNNLMPFVQQVAVGRRPALTVFGNDYNTTDGTGVRDYIHVVDLADGHIAALLKLDDPNIGCEVYNLGTGKGTSVLEMVNAFEQASGKKIPLAMAGRRPGDAEIVYASTEKAERELNWKTKYSIDDMCRDQWNWASKNPYGYGASADSSN

SEQ ID NO: 6631 - protein, 466 aa, Aspergillus flavus
MSSTAIPKRMALNRNPGTDSSVPSVSVSPFDSPRHSPSSTSLSSLASESENKGKMLDTYGNEFKIPDYTIKQIRDAIPAHCYERKALTSLYYVFRDIAMLGSIFYVFHNYVTPETVPSFPARVALWSLYTVVQGLIATGVWVLAHECGHQAFSPSKVLNDTVGWICHSALLVPYFSWKISHGKHHKATGNIARDMVFVPKTREEYASRIGKTIHDLNELMEETPIATVTNLILQQLFGWPMYLLTNVTGHNNHERQPEGRGKGKRNGYFGGVNHFNPSSPLYEAKDAKLIVLSDLGLAITGSVLYYIGSTYGWLNLLVWYGIPYLWVNHWLVAITYLQHTDPTLPHYQPEVWNFARGAAATIDRDFGFVGRHILHGIIETHVLHHYVSTIPFYHADEASEAIQKVMGSHYRTEAHTGWTGFFKALFTSARVCHWVEPTEGARGESEGVLFYRNTNGIGVPPAKLSK

SEQ ID NO: 6632 - protein, 307 aa, Cytophaga hutchinsonii
MNIVFIVLGVLFFLIILSGFVTVKQGYVAIITVFGKYRRVIEPGLSFRIPFIETVYKRISIQNRSVEIEFQAVTQDQANVYFKAMMLYAVINQSESTIKNVAFKFVDESSFMQALIRTIEGTIRSFVATKKQAEILSLRTEIIEEVKMHLDATLEEWGYHMIDIQLNDIMFDEEIIKSMAKVVASNNLKAAAENEGQALLITKTKAAEAEGNAIKISAIAEKEAAIQRGQGIALFREEVAKGMAQAAREMSEAQLDSSYLMFSLWTESIKHFAEHGKGNVIFLDGSTDGMHKTLNQMMAVSKLQETK

SEQ ID NO: 6633 - protein, 138 aa, Zea mays
MSILWEKSAGWRWLVRRTRDSKPFFFTFAALCGVVPGVIGYGVMQLTGSRNEQLEAHLRSTARPETTMMGQVNRERLAEFLGELQRKEDTNDRYVAALRGETLTRKRYERIQPLPAANAQASQETAGASAEEERPKAK

SEQ ID NO: 6634 - protein, 351 aa, Stigmatella aurantiaca
MANMAQAIRMALHYAEENLGVMDIFGEDVGPPLGGVFTATQGLKNVWNSPLDERGIIGTAIGLAMAGQRPVAEIQFADYIFNTIDLLKLAGNTCWASNGDWNLPMVVKTPVGSGIRGSLYHSHSFDATATHIPGWKIVIPSNPLDAYGLMISACQELNPVMFLEPKALLRVKGEERIPGEPEDDRQLSKMIDAPLGDRSAWKPQWPALEAYAVPIGQGKVVREGEHLTVVSYGRTLPLCAKAADTLREEGVSAEVIDLRSLWPYDWELIRRSIQKTGRVLFVKEDTEVTNFGEHLVRRTVEELFYTLMAPPRLLAGKFLPGIGLADTLEMASVPQLPDILQALRALATEQP

SEQ ID NO: 6635 - protein, 159 aa, Brassica napus
MSESNKKISLISSEGEAFEVSEAVAREFEIVAHMLEDGCSGSSIPITTVDSNILGKVIEYCTKHVEVGNVEGNSEKAEKDLEEFDKRFIAVEMNTLFSLILAANYLNVKGLLNIGCQKVADTIKDMKPEEVRSIFNIENDYTPAEEEVVRKENEWAFQP

SEQ ID NO: 6636 - protein, 338 aa, Mycoplasma pneumoniae
MSETKSKVLVLGGLGYIGSCFIDQLLKQYPDVTVSVIDINHTSLALQLLPRQVNVHFVNLLDRAQLTDTIAQINPDVVFHFAAKTSVKESTEQPLTYFDHNLVGTLNLLHALKELQKPIQLFFSSTAAVFGSASTLPIPENLVLEETLASNPYGISKFLSEIVLQTLTRSPHFQVIALRYFNVAGASNPFGNFNKNTTLLIPNLIKAFMEKRTFFLYGDDYDTKDGSCIRDYIHVVDLCDAHLLAWKWLQANPKVRFESFNLGSGQGFSNWEVINTAQAIFAPEQLQLKIESRRAGDPPVLVVDCTKAKRLLNFQPTRSLHKMLSDETIFYRDFYNRL

SEQ ID NO: 6637 - protein, 559 aa, Staphylococcus epidermidis ATCC 12228
MKNNSKSKSNKISLSQLVLLGLGSLIGSGWLFGAWEASSMAGPAAIISWVIGFLVIGTIAYNYIEIGTMFPQSGGMSNYAQYTHGSLLGFIAAWANWVSLVTIIPIEAVSAVQYMSSWPWDWAKPMGSLMKDGSISTYGLIAVYIIIAIFSLLNYWSVKLLTSFTSLISVFKLGVPILTIIMLLVSGFDTGNYGHSIGTFMPYGSAPIFAATTTSGIIFSFNAFQTIINMGSEIKNPEKNIARGIVISLTLSAILYIVLQSTFITSMPSSMLHEHGWSGINFNSPFADMAILLGLNWLAILLYMEAVVSPFGTGVSFVAVTGRVLRAMEENGHIPKFLGKINKKYNIPRVAIAFNAIISMVMVTLFRDWGTLAAVISTATLVAYLTGPTTVISLRKMAPKMTRPFKANILKFMAPLSFVLASLAIYWAMWPTTAEVILIIILGLPIYFFYEYKMNWKNTKKQIGGSLWIIIYLIVLAFLSFIGSKEFKGLNWIHYPWDFLVIVIVALIFYQLGTTSYFESIYFKRANKLNKKMGDKLRKTRKKARHKDWKERDRQEQNQ

SEQ ID NO: 6638 - protein, 363 aa, Buchnera aphidicola str. APS (Acyrthosiphon pisum)
MKKNYRIAVLSGDGIGPEVMQEACKILNVLKKYFFLSLEIQKFNIGGIAIEREGVALPKTTLLGCENSDSILLGSVGGKKWDNLPVEQRPERAALLPLRKHFNLFSNLRPAKLYPELKCLSPLRSDIVKNGFDILCVRELTGGIYFGEPKGFVNKNNTKYAFDTEIYHEYEIIRIAHLAFKLARSRKKKVCSIDKSNVLQSSILWREVVESVSKKYPDVHLSHLYIDNAAMQIIKDPNQFDVLLCSNLFGDIISDECATITGSIGMLPSASFNEKNFGLYEPAGGSAPDIEGKNIANPIAQILSLSMLVRYGMNLNQIADKIDKAVNNVLKKGYRTSDISHDNNFLKTDEMGDLIVDSLINGE

SEQ ID NO: 6639 - protein, 497 aa, Salmonella typhimurium LT2
MKTQTTHAAEQHAAKRRWLNAHEEGYHKAMGNRQVQMIAIGGAIGTGLFLGAGARLQMAGPALALVYLICGIFSFFILRALGELVLHRPSSGSFVSYAREFLGEKAAYVAGWMYFINWAMTGIVDITAVALYMHYWGAFGDVPQWVFALGALTIVGTMNMIGVKWFAEMEFWFALIKVLAIVIFLVVGTIFLGTGQPLEGNATGFHLITDNGGFFPHGLLPALVLIQGVVFAFASIELVGTAAGECKDPQKMVPKAINSVIWRIGLFYVGSVVLLVLLLPWNAYQAGQSPFVTFFSKLGVPYIGSIMNIVVLTAALSSLNSGLYCTGRILRSMSMGGSAPKFMAKMSRQHVPYAGILATLVVYVVGVFLNYLVPSRVFEIVLNFASLGIIASWAFIMVCQMRLRQAIKEGKAADVSFKLPGAPFTSWLTLLFLLSVLVLMAFDYPNGTYTIASLPLIAILLVAGWFGVRRRVAEIHRTAPVTADSTESVVLKEEAAT

SEQ ID NO: 6640 - protein, 284 aa, Rhizobium sp. USDA 3883
  unsure (1)..(284): unsure at all Xaa locations
RGKTQIKEFAEFPTLEQLPLWGFDGSSTQQAEGHSSDCVLKPVAVYPDPARTNGVLVMCEVMMPDGVTQHASNKRATILDDEGAWFGFEQEYFFYKDGRPLGFPESGYPAPQGPYYTGVGYSNVGSVARQIVEEHLDQCLAAGINHEGINAEVAKGQWEFQIFGKGSKKAADQMWMARYLMQRLTEKYGIDIEYHCKPLGDTDWNGSGMHANFSTSYMREVGGKAYFEALMAAFDKNLMDHIAVYGPDNDKRMTGKHETAPWNKFSYGIADRGASIRVXHSFIK

SEQ ID NO: 6641 - protein, 217 aa, Oryza sativa
PRPRGARRPISPQSPSPPLRKLGFRAIHLLGDDRDRERFRRARSMAAEGEKKMITLKSSDGEEFEVEEAVAMESQTIRHMIEDDCADNGIPLPNVNSKILSKVIEYCNKHVHAAAAAASKAADDAASAAAAVPPPSGEDLKNWDADFVKVDQATLFDLILAANYLNIKGLLDLTCQTVADMIKGKTPEEIRKTFNIKNDFTPEEEEEIRRENQWAFE

SEQ ID NO: 6642 - protein, 401 aa, Guillardia theta
MQEDMEYNIRFVGSYILDKTLGVGATGKVKLAKHSRTKEKVGVKIIKKDLFYDKPSLRLKIQREISVMKLMFHPHVIKIYDVLEDSKYLFLIIEYASKGELFNYLVEKRKLENREALKFFHEIISGLEYCHKHRICHRDLKLENILLDMKLQIKIADFGMASLSIPNIMLKTFCGSPHYASPEVVSNEPYNGIKADIWSCGIILYALVVGKLPYDEENDNMRKLFNKIRFEPPRIPRIIHPDCRDLIRALLTINPQKRITIDKIKKHPWYKSSPLPESCRISIQNLSFASVQNPISNPDPEIISFLLPLQLVKDKKTLCGILSTKKPSFLRVLYRQLEWRKMKMDSVRSNLINEANFKRKKLFKQGKLGNITGLKYWKNLKCKFLSINIKSFVRTGIYIYF

SEQ ID NO: 6643 - protein, 146 aa, Mycoplasma genitalium
RLAIAGHLVILMVIPRLLIPNLVKAFLKQTPFFLYGNDYATKDGSCIRDYIHVYDICNAHFLLWKWLNDHRQIKFETFNLGSGIGTSNLEVIDIAKKVFYPSRLNLEIRPKRSWDPAILVANVAKAKQTFQFKITRNLKDMISDEP

SEQ ID NO: 6644 - protein, 437 aa, Vernicia fordii
ERPPGQVTGAVSRTHSSKLRLLHTNKTVKDLKLPFSNGCFRERDWGIKVSAPYRVSSIEGEEEEREEGINGVIGIEGEETEFDPGAPPPFKLSDIREAIPKHCWVKDPWRSMSYVVRDVAVVFGLAAAAAYLNNWIVWPLYWAAQGTMFWALFVLGHDCGHGSFSHNPKLNSVVGHLLHSSILVPYHGWRISHRTHHQNHGHVENDESWQPLSEKIFRSLDYMTRTLRFTVPSPMLAYPFYLWNRSPGKTGSHFHPDSDLFGPNERKDVITSTVCWTAMAALLVGLSLVMGPIQLLKLYGMPYWIFVMWLDFVTYLHHHGHEEKLPWYRGNEWSYLRGGLTTLGRDYGWINNIHHDIGTHVIHHFFPQIPHYHLIDATEASKPVLGKYYREPDKSGPLSFHLIGYLIRSLKKDHYVSDTGDVVYYQTDPQLSGSSSE

SEQ ID NO: 6645 - protein, 353 aa, Triticum aestivum
MATTVQPHSPDPTAITTTPAPPPPPSPPRQENPTAAGEGVEIAALDEQPAAVAVAVADKGKTAPGGGKLVAEAMRKCAAPRSSRYHGVTRLKWSGKYEAHLWDNTSQVEGRKRKGKHVYLGSYVTEENAARAHDLAALKYWGITQPTKLNFNISDYAKEIEIMKSMNQDEFVAYIRRQSSCFSRGTSSYRGVTRRKDGKWQARIGRIGESRDTKDIYLGTFETEVEAAEAYDLAAIQLRGVHAVTNFDISNYSEEGLKKLEGSSEVVNLEDQSEVTKLAVTNLDISKHCEDGLKKLDGASQVVNLEGQSEVTKLSVTNFDISNCCEDGLKKLEGSSEVANLEDQSEVTKLAGQ

SEQ ID NO: 6646 - protein, 371 aa, Neurospora crassa
MVTLIGFSFIVANVGLLLIFMPDLVGPGPSWLYFSFAFGLFAYQTMDNVDGKQARRTGTSSGLGELFDHGIDSLNCTLASLLETAAMGLGTTKAGVFTALCPCLPMWFSTWETYHTHTLYLGYINGPTEGILIACLLMAISGWYGPEIWSERLADNLHLFSFLGLNEENLGDTSFQDIWVYFLIGAMFFHIPFCIINVVNARLSRNEPLLPVFLEWTPIVVFTLSVGTWLYSPYSTLMDENHLVLFCVTMSFVFGRMTTKMILAHLTKQPFPYWTVMLWPLIGGALIGNLPRFGLPAVTAQFEHLYLWAYLVFAFVVYSRWAWLVTTSICDFLGINCLTIPLEKQMANKQIAREIAAQAAAAVPVGPAKKD

SEQ ID NO: 6647 - protein, 174 aa, Zinnia elegans
KIWFQNRRARWKTKSLERDYNRLKSCYDVLTSDYESIVKENEKLKAEVLSLTEKLQSKEVSETSAVGQGSGSALEEAGDVPAPSDNDNVKVEDHFSTGSGGSAVVDDQDGPQLVDSGDSYNFPNDDDYPHEYVVPAVDQSEEDDGSDDGQNRFQYTFETADHEEQDGLGWWVWS

SEQ ID NO: 6648 - protein, 929 aa, Oryza sativa
MAYTTKPAFTSPTLALSQTSPENTSPPDCDGGGGGNAGVVGLPSSGEAPSIPLRPRAVETELVDVDLRLFGGKSLPDRAAAAATGRRLSYLHGPIVLQVVSVRDIYRSIIDASFKNPQQHRLLRFVLTDGISEAVAIEFFPIPFIIEDIAPGTKICLENKIPIHNGILCLSAKNISIMGGVVQSLYEEWQMNQKFSGLSRSSLRLSQNDDGVGPPPFEKLDVEARPSRTSRSQTYSADNKARKPEVGRQNVSVSSSGKPVNESSSDENKESAVEPKQSISDGRPKEVSEAIPVQNQATAQKLLQKMTQAAPEDRYGRGHRFKGKGRQEDTPVFTLDEWEKRKSAGLKSTAQSYIDDTSRDEELARQLQEQLDLEDSYVAVLKKREAGEEIFEGEDGGEEGAEDEGEGEAGEDFSPIQTSNGSGNSSCDLTLISSLLPPLHLHLRDSGEPTAAGSPAILPKHLVGRQFLHRSTRLRLEAEKGFVSFAGVSSSSSVCRLHWLGVGGGEEEIHIRSVREWFDRFLFGVLRCCARSGLVRWRSPAMDHGGGGGGGVWIRAAVAVAAGGAIAARAVRRKSVDSTAVFVGVPAMVAHTVAGYRFAGMLLVFFFTASRMTRVGEKRKRALDPDFKEGGQRNWKQVLSNSGIASVLVVLIALVTGGSDRCLDTRESSLVTALIGGVIGHYACCNGDTWSSELGILSKAEPRIITTFKRVRKGTNGGVTIDGLLAAAAAGFSIGLTFVLLGFLTTQCSSDVFWRQLLVIPLATAAGLCGSLIDSLLGATLQYSGYCSLRKKVVGVDGPTVTRISGRNILDNNGVNVVSVFLTTLITALARSAAAEAFEAALAGLVAAEAAAEGEQAATKRERDHRLEEHDRRRGSPCIEAAFVLMALLDMVGVGHLLRRRRVVHRRPCRGRRRRSRRRRRGGRNQQGG

SEQ ID NO: 6649 - protein, 344 aa, Zea mays
MAVASTSPLSAKPATAPSPPAPVSGFLALPARRGCATRLGSAAAWRRLRVEAIWKQQEKQRAEVSVEEPAPVREAAAPLDGVGADDPMVPSSDESWVVRLEQSVNIFLTESVIILLNTVYRDRNYARFFVLETIARVPYFAFISVLHMYETFGWWRRADYLKVHFAQSLNEFHHLLIMEELGGNAIWIDCFLARFMAFFYYFMTVAMYMLSPRMAYHFSECVERHAYSTYDKFLKLHEEELKTLPAPEAALNYYLNEDLYLFDEFQTTRIPCSRRPKIDNLYDVFVNIRDDEAEHCKTMKACQTHGTLRSPHSMPNCLEAATECVIPENDCEGIVDCVKKSLTK

SEQ ID NO: 6650 - protein, 472 aa, Zea mays; identical to SEQ ID NO: 1639

SEQ ID NO: 6651 - protein, 282 aa, Triticum aestivum
  unsure (1)..(282): unsure at all Xaa locations
MTYITENIIAMGFPAGDLSSGIFGYFEGFYRNHMEEVIRFFEMHHKGKYKVYNLCSERLYDASLFEGKVACFPFDDHNCPPIQLVISFCQSAYSWLKEDIENVVVVHCKAGKARTGLMISSLLVYLKFFPTAEESIEYYNQKRCVDGKGLILPSQIRYVKYFERILIYFNGENQPPRRCMLRGFRLHRCPYWIRPSITVSNHNGVLFXTKKHPRTKELMPEDFWFSAPRKGIMVFALPGEPGLAEVAGDFKIQFHDRQGDFYCWLNTTMMENKVTLNPTDFD

SEQ ID NO: 6652 - protein, 228 aa, Gossypium anapoides
FTSLCHTDVYFWEAKGQTPLFPRIFGHEAGGIVESVGEGVTHLKPGDHVLPVFTGECGNCRHCKSKESNMCDLLRINTDRGVMLSDGKTRFSINGKPIYHFVGTSTFSEYTVAHVGSVAKINPAAPLDKVCILSCGISTGLGATLNVAKPAKGSTVAIFGLGAVGLAAAEGARIAGASRIIGVDLNPNRFEEAKKFGCTEFVNPKDHNKPVQEVLAEMTNGGVDRSVE

SEQ ID NO: 6653 - protein, 151 aa, Glycine max
MSDGGKRQGGRALPPPPRGPPPPPPSRPRLEPVDREKTCPLLLRVFTKIGSHHSMEDFAVRGKEPKDEVQIYTWKDATLRELTDLVKEVAPAARRRNAKLSFAFVFPDKNGRFKVQEVGKTLSYGNGRLDDGKALAELGFEIGDYLDVAIL

SEQ ID NO: 6654 - protein, 498 aa, Triticum aestivum
MDTITVVENVFGEVERKVQKSYWEEHSKDLTVESMMLDSRAKDLDKEERPEVLAILPSYAGKTVLELGAGIGRFTGELAKEAGHVIALDFIDSVIKKNEEINGDIYKNITFMCADVTSPELKIEDNSVDIVFSNWLLMYLNDEEVEKLIGRIVKWLKPGGHIFIRESCFHQSGDSKRKVNPTHYREPRFYTKVFKECHSYDQEGNSFELSLVTSKCIGAYVKSKKNQNQICWLWEKVKCTEDKGFQRFLDNVQYKSTGILRYERVFGEGYVSTGGFETTKEFVDKLDLKAGQKVLDVGCGIGGGDFYMAETYDVHVLGIDLSINMVSFAIERAIGRSCSVEFEVADCTTKEYAENTFDVIYSRDTILHIQDKPALFRNFFKWLKPGGKVLISDYCRSPGTPSEEFAAYIKQRGYDLHDVKTYGKMLEDAGFHDVVAEDRTDQFLRVLERELGETEKNKEAFLADFTQEDYDDIVNGWSAKLKRSSAGEQKWGLFIATK

SEQ ID NO: 6655 - protein, 139 aa, Oryza sativa
  unsure (1)..(139): unsure at all Xaa locations
MAAPDVEYRCFVGGLAWATDDRSLEAAFSTYGEILDSKIINDRETGRSRGFGFVTFSSEQSMRDAIEGMNGKELDGRNITVNEAQSRRSGXGGGGGYGGGGGGYGGGRGGGGYGGGGGGGYGGSRGGGYGGDSGGNWRN

SEQ ID NO: 6656 - protein, 154 aa, Zea mays
MVKAVAVLGSSEGVKGTIFFTQEGDGPTTVTGSVSGLKPGLHGFHVHALGDTTNGCMSTGPHYNPASKEHGAPEDENRHAGDLGNVTAGADGNGVANINVTDSQIPLTGPNSIIGRAVVVHADPDDLGKGGHELSKSTGNAGGRVACGIIGLQG

SEQ ID NO: 6657 - protein, 313 aa, Synechococcus sp. PCC 7942
MRILVIGGSRFIGVALVRQLLAAGHAVTVFNRGSRPALAGVEQLVGDRQDPAALAQLQGRSFDVVFDNTGREAAETQALVASLDGQFQQLIYVSSAGVYAASDQLPLRESDPVDPQSRHRGKFETENWLQQQGLPFTAFRPVYIYGPGNYNPLEQWSSIAFCVIGPLPIPGTGLHLTQLGHVEDLATAMVAAVKNPRAIGQIYNLSGDRYVSFDGLARACAIAAGRDPQALHLVHYDPKQLNLGKRKAFPMRAQHFITAIDQARQDLEWVPRFSLIDGLQNSLQNDYLARGLDQQAVDFSLDEEILAAVSSSP

SEQ ID NO: 6658 - protein, 148 aa, Zea mays
REEMAASDVEYRCFVGGLAWATDDHSLNNAFSTYGEVLESKIILDRETQRSRGFGFVTFSTEDAMRSAIEGMNGKELDGRNITVNEAQSRGGRGGGGGGYGGGRRDGGGYGGGGGGYGGGRGGYGGGGGYGGANRGGGYGNNDGNWRN

SEQ ID NO: 6659 - protein, 459 aa, Brucella melitensis 16M
MTKNWTPQSWRSKPIRQVPFYPDAQALNDVEARLRTYPPLVFAGEARKLKEQLAAVAGGKAFLLQGGDCAESFAEHGADNIRDFFRVFLQMAIVLTFGASKPVVKVGRIAGQFAKPRSSDMETKDGVELPSYRGDIINGIEFDESSRIPDPQRQDMAYRQAAATLNLLRAFAQGGYANLENVHQWMLGFVGKSPQAERYAALAQRISETMNFMRAIGITAESNHALRETDFYTSHEALLLGYEEALTRIDSTSGDWYGTSGHMIWIGDRTRQPDHAHIEYCRGIKNPLGLKCGPSLQPDDLIRLIDLLNPENEAGRLTLIARFGYDKVGDHLPQLIRAVEREGRTVVWSCDPMHGNTITAGGYKTRPFDLILKEVESFFAIHRAEGTHPGGIHIEMTGKNVTECTGGARAISAEDLHDRYHTHCDPRLNADQALELAFLLAELLKKERDAGVEKRAAIA

SEQ ID NO: 6660 - protein, 554 aa, Oryza sativa
MPSLSRNLSWSYIELSIPPENSTPIEAFMFNSAKGFYSFNLQVFLMANIVRQTNDMRLRSRHDTSFRKKTLHFILFISPIEKALPWYGIHTVGRTLYGEVGLGRGPGPPRIEAKRVSANPRPSCVRRVLARKRRRPEATANSARKLQRREISALPCRAFSASTTRERFRNIQLQHLGLDRYGVEGRSGSLWLGERSEIIEIVGASDIIFALSQSGVCAAFSRVSNQRICFLNGRPDEVIRSLFYNKNNDSLITVSVYGSENFSALRCRTTRIEYIRRGKPDAGFPLFETESLKWPGFVEFDDVNGKVLTYSAQDSTYKVFDLKNYTLLYTISDKNVQEIKIRKKGCIPLDILSIEDGKRLKSFKHLLHRNKKVDFIEQFNEKLLIKQEGENLQILDVRNFQSIEVSRSEFVTPSAFIFLYEMQLFLTFRSRSVSVWNFRGELVTSFEDHMLWHPDCNTNSIYITSNQDLIISYCKADPNDPSSEENACSINISEILTGKCLAKIKAGNLNKQRVSKFQSTPSEALGDITALYYDEEREEIYTGNRLGLVHVWSN

SEQ ID NO: 6661 - protein, 392 aa, Hiraea fagifolia
DLEPVNPADVPVTAAGALKSYKLAAKAISRLQSLPSGNISLLCDVLVKEVRDLTGYDRVMVYKFHEDEHGEVVSECRRPDLESYLGLHYPATDIPQASRFLFMKNKVRMICDCLAPPVKVIQDKRLPQPLSLCGSTLRSPHGCHAQYMTNMRTIASLVMSVTINEDDDTMDGDQQQMTRKLWGLVVCHHTSPRFVPFPLRYACEFLIQVFGVQINKEVELAAQVREKHILQIQTMLCDMLLRDAPVAIITQSPNVMDLVKCDGAALYFKNKIWLLGVTPKEEQIRDIAEWLLEYHSGNTGLSTDSLMEAGYPGASVLGDAICGMAAASITSRDFLFWFRSHTAKEIKWGGAKHEPGDKDDGRKMHPRSSFKAFLEVVKWGSMPWEDIEMDAI

SEQ ID NO: 6662 - protein, 344 aa, Streptomyces coelicolor A3(2)
MTGGMSAVVWAGVNDVRVEEVPMPEVPPGWALVRVACTGICGTDLGIVHGKHPRARQGLILGHEISGWVEVTAPGGPPEGALVVAEPLISCKDCRACREGHSHVCARLGLFGIDAPGGAAQFVALPTSTLHQVPSRVEPTQAALTEPLAVAVHAVSRSGMEAGDVVAVFGAGPIGILTALVARHEGASHVVVAEPNARRRAVASDMGLIAVPDGAQLRDMVAELSQGDGADTTFDSAAHPAVAAELADVTRVLGRVVIVGVYKEPAAVDLQAVCFKEQSVVGVRVYTREDFRTAIDLVAQNALGLDRFPVSVYGFDRISDAFDAAATGSGGLKVLISTHRDEAT

SEQ ID NO: 6663 - protein, 119 aa, Zea mays; identical to SEQ ID NO: 2930

SEQ ID NO: 6664 - protein, 397 aa, Zea mays
MEEARQRRRLCLCLLVAAVSWALLAAVSRCDPQVPCYFIFGDSLVDNGNNNYIVSLARANYPPYGIDFAAGQTRRFTNGLTTVDVIDLYRSQDRDGDMHGEIHSHVEMAMGKYPPAQLLGFDNFIPPFAATSADQLLGGANFASAAAGIRAETGQQLGGRIPFAGQVQNYQTAVQTLVSILGDQDTASDHLSRCIFSVGMGSNDYLNNYFMPAFYNTGSRYTPEQFADSLIADYRRHLRVLYNYGARKVVMIGVGQVGCSPNELARYSADGVTCVDRIDDAIQMFNRRLVGLVDEFNALPGAHFTFINAYNIFDDILANAASYGFTVTNAGCCGVGRNNGQVTCLPYQAPCANRDQHIFWDAFHPSEAANIIVGRRSYRAESPNDVYPMDISTLASI

SEQ ID NO: 6665 - protein, 314 aa, Triticum aestivum
  unsure (1)..(314): unsure at all Xaa locations
AAYSPSGARRPPSGGWKASSRGYTKLXKGLAVILLLVHLLVXLFPSAVNYLALIPXRTIPFAWNLITAGYVEQTIPGVIISIIGLLLFGKLLEPLWGTKELSKFVFIVNFSTSMCVFVTAIAVYYVTQQESYLYTPLSGFYGVLSGLLVGIKQLMPELELNLFVLKIKGKWIPSLIALISVVVSFFMKDLVSYLPVILFGIYMSWIYLRYFQKRLETGLKGDPSEEFSFSSFFPAILRPVLDPIATIFHRLLCGRSDRADRGQTLETSSLPGSDSTEANRRRERGQRALEQRLAEKLAAVKSTESTSLDASDKV

SEQ ID NO: 6666 - protein, 327 aa, Oryza sativa (japonica cultivar-group)
MARLLLSGVAPLPLLPCRRRAIAFALPLGNVRLRLRVAAPTSRVATVEEDDNENNAPPPPCEDFDPGAAPPFGLADIRAAIPKHCWVKDPWRSMGYVLRDVVVVFALAAAAARLHSCLAWPLYWAAQGTMFWALFVLGHDCGHGSFSNNSRLNSVMGHILHSSILVPYHGWRISHRTHHQNHGHVDKDESWHPLPERLYRSLNRATRMLRFSIPFPMLAYPFYLWSRSPGKSGSHFHPSSDLFQPNERNDVLTSTACWVAMAALLAGLTFLMGPLLMLNLYFVPYWIFVMWLDFVTYLHHHGHNDKLPWYRGKIDDMYRNGAICGED

SEQ ID NO: 6667 - protein, 926 aa, Bacillus halodurans
MKIYASDEQYKQMNEELDERVESLVSELTLDEKIRLMCQYQEAVPRLGIGKYKHGTEGAHGVAWLGKATVFPQNIGLGCTWNEELMKKIGDVIAEEARVYYQENPEQNGLTIWAPTVDMERDPRWGRTEEAYGEDPYLTGKLTTELIKGMQGDHPFYLKTAATLKHFLANNNEEARTECSVSIDPRNLREYYLKAFEPQVKEGHVQCVMTAYNAVNGTLCNMNPDVNAILKEEWGLQGFVVSDACDVVGSVDDHQFVESYAEAVALSIKNGIDNVTDDEKIIHRAIGDALEQGLLSEEDLDQALKRVFRVRIRLGEFDQENKNPYATVAKEKLCAPEHSELALQAAKEAIVLLKNDDLLPLSPEKKVAVIGPLANEIYTDWYSGTPPYTISPLEGIMQKANEPVLYADGSDRIRLREAMSGNGIVAEEGSSQLTCHDGQGETFIHTDWGWGSETLQSQQSGKYVTLTDEGVLAANALEVKGWFVKELLAMEENDHEVTLHTWDRQQVKRDESERLSVNGENDCSLVKDIVERGIDQAVEAAKQADTAVVFVGNQPYINGKECVDRPDLALPPAQQRLIEEVVKVNRNTVVVIVGSYPYTIPWVKENVPAIVYTAHGGQEFGRAVSDVLFGDYNPAGRLNMTWYLSANQLPDMMDYDIIKGKRTYQYFEDDVLYPFGHGLSYARFSYDHLQIQKTNVLTVSATITNTSHLDGEEVVQLYVRCQTSRVKRPLKTLKGFKRLMIKRGEQKVVTFTLEPEELAIWDVTRERYCVEQGMYTIMLGRSSKDIQLEETIELEGEVIPARLLSTKVKALNYDDYHNVLIDRCVEGGESIRGLGDGSWIAFHDINLEQPTNLLTVRAANENKQAVLEIRADRVDGPLVSQSVIPPTGGLQAWTTVTAQVNGETSEIRDLYLVFKGEFQLSWFSFS

SEQ ID NO: 6668 - protein, 347 aa, Escherichia coli O157:H7 EDL933
MKNSKAILQVPGTMKIISAEIPVPKEDEVLIKVEYVGICGSDVHGFESGPFIPPKDPNQEIGLGHECAGTVVAVGSRVRKFKPGDRVNIEPGVPCGHCRYCLEGKYNICPDVDFMATQPNYRGALTHYLCHPESFTYKLPDNMDTMEGTLVEPAAVGMHAAMLADVKPGKKIIILGAGCIGLMTLQACKCLGATEIAVVDVLEKRLAMAEQLGATVVINGAKEDTIARCQQFTEDMGADIVFETAGSAVTVKQAPYLVMRGGKIMIVGTVPGASAINFLKINREVTIQTVFRYANRYPVTIEAISSGRFDVKSMVTHIYDYRDVQQAFEESVNNKRDIIKGVIKISD

SEQ ID NO: 6669 - protein, 566 aa, Saccharomyces cerevisiae
SSATVYGDATRFPNMIPIPEECPLGPTNPYGHTKYAIENILNDLYNSDKKSWKFAILRYFNPIGAHPSGLIGEDPLGIPNNLLPYMAQVAVGRREKLYIFGDDYDSRDGTPIRDYIHVVDLAKGHIAALQYLEAYNENEGLCREWNLGSGKGSTVFEVYHAFCKASGIDLPYKVTGRRAGDVLNLTAKPDRAKRELKWQTELQVEDSCKDLWKWTTENPFGYQLRGVEARFSAEDMRYDARFVTIGAGTRFQATFANLGASIVDLKVNGQSVVLGYENEEGYLNPDSAYIGATIGRYANRISKGKFSLCNKDYQLTVNNGVNANHSSIGSFHRKRFLGPIIQNPSKDVFTAEYMLIDNEKDTEFPGDLLVTIQYTVNVAQKSLEMVYKGKLTAGEATPINLTNHSYFNLNKPYGDTIEGTEIMVRSKKSVDVDKNMIPTGNIVDREIATFNSTKPTVLGPKNPQFDCCFVVDENAKPSQINTLNNELTLIVKAFHPDSNITLEVLSTEPTYQFYTGDFLSAGYEARQGFAIEPGRYIDAINQENWKDCVTLKNGETYGSKIVYRFS

SEQ ID NO: 6670 - protein, 526 aa, Schizosaccharomyces pombe
MARETEFNDKSPSSTDDGMSQSHFSDKLKNLFHFRRNRAATVSTSVRNDQRDNDSDDSTFDINVNQLNELDLNDSSDQLDSRPSLRRVSSAPDSHKGVEAPPPRPLINMSNIRKAQVKILKNPGNYIFGRTEYGKRTYSGNSTKISRVEVTPHSFEKIRLLGQGDVGKVYLVRQKSNHRLFAMKILNKREMIKRHKVNRVLAEQEILTKSKHPFIVTLYHSFQSRDYLYLCMEYCAGGEFFRALHSLPKHILPEKDACFYAAEVTAALEYLHLMGFIYRDLKPENILLHQSGHIMLSDFDLSKPISIVTHPTVVLPKHSTFSQEKPALDTNSYFSNFRTNSFVGTEEYIAPEVIRSCGHTVAVDWWTLGIFIYEILYGTTPFKGKNRHATFSNILYSDVSFPEYHGAPNVSSTCKSLIRRLLVKDESKRCGSVAGASDIKQHPFFRHIQWALLRSMKPPIIPKIEDGMEAVEPSDNDNEEEDFLNSQYLISANLPAVDMHSSTPVNEQSNPFDSFSSVTLHHAGDE

SEQ ID NO: 6671 - protein, 305 aa, Miscanthus sinensis var. sinensis
IESVGEGVTDVAPGDHVLPVFTGECKECPHCRSAESNMCDLLRINTDRGVMIGDGKSRFSINGKPIYHFVGTSTFSEYTVMHVGCVAKINPQAPLDKVCVLSCGISTGLGASINVAKPPKGSTVAIFGLGAVGLAAAEGARIAGASRILGVDLNPSRFEEARKFGCTEFLNPKDHKKPVQEVLAEMTNGGVDRSVECTGNINAMIQAFECVHDGWGVAVLVGVPHKDAEFKTHPMNFLNERTLKGTFFDNFKPRTDLPNVVELYMKKELEVEKFITHSIPFAEINKAFDLMAKGEGIRCIIRMEN

SEQ ID NO: 6672 - protein, 318 aa, Triticum aestivum
  unsure (1)..(318): unsure at all Xaa locations
MAKQKQQQQPKPAADAAPPPREFKTAHSPWFTYASMVTLFSLCPPFVILLWYTVVHADGSVARTYEHLRDHGILEGLKAIWPMPTVLAGKIILGFALFEAALQLLLPGKRFEGPISPAGNVPVYKANGLLAGAVTYAVTLVTYLGRIFNPAIVYDLLGEIYSALVLGSLVGWLCLYIKGHVAPSSSDSGSSGNGVIDFYWGMELFPRLGPRFGMHSVLTGRSGGRLGWLAGPARAGPCCVGPVAVSGRGAGSGLVYSPLVLGGITKFFWWESGYWCTMDIAHDRAGFYICWGCLVWVPSTYTSPGMYLXXHXXNLXXX

SEQ ID NO: 6673 - protein, 380 aa, Pisum sativum
MSNTVGQIIKCRAAVAWEAGKPLVIEEVEVAPPQAGEVRLKILFTSLCHTDVYFWEAKGQTPLFPRIFGHEAGGIVESVGEGVTHLKPGDHALPVFTGECGECPHCKSEESNMCDLLRINTDRGVMLNDNKSRFSIKGQPVHHFVGTSTFSEYTVVHAGCVAKINPDAPLDKVCILSCGICTGLGATINVAKPKPGSSVAIFGLGAVGLAAAEGARISGASRIIGVDLVSSRFELAKKFGVNEFVNPKEHDKPVQQVIAEMTNGGVDRAVECTGSIQAMISAFECVHDGWGVAVLVGVPSKDDAFKTHPMNFLNERTLKGTFYGNYKPRTDLPNVVEKYMKGELELEKFITHTVPFSEINKAFDYMLKGESIRCIIKMEE

SEQ ID NO: 6674 - protein, 611 aa, Hordeum vulgare subsp. vulgare
MSSPAGGYGGAEAHHHGHMLLHSHAHHMAAAAAASGGQLYHVPQHSRREKLRFPPDAAAEDSPPTPLAPHHQHHQAGAWPPPAFYSYASSSSSYSPHSPTVPQGQQLVLNGLTAQQVTAQQFPHIPTHNFSLSLSSASSNPATAPPTPRKQQEPGGAGPCGPFTGYASVLGRSKFLVPAQRLLEEICDVGGAAAHADRSLPDEGLLDADTMDVADDELDAAGPMYGAEQQWKKTRLISMMEEVCKRYRQYYQQVQSAIASFETVAGFSNAAPFTALALRVMAKHFKTIKEMILSQLRNTSKMPVKGSSMSKDITIFGLGGGGGAPVGGFQRGSSVNGFGQPHNIWRPQRGLPERSVTVLRAWLFEHFLHPYPTDGDKQMLAKQTGLTRNQVSNWFINARVRLWKPMVEEIHNLEMRQVHKQSPHDNGSQHGVHGHAHQPSSQQQQQQRSGKRSEPCDSHLGQCSGVTRNHHHHSNPAASSHGGGFPDDLSQMSHSMQQGQVTFAGYGALPSQSQQHQHQHQHSSMASPQHPHHQHHVGAAGAGNGGGVSLTLGLHQNNRVCFGEPLPANLAHRFGLEDVVSDPYVMGSFGGGQDRHFAKEIGGHLLHDFVG

SEQ ID NO: 6675 - protein, 175 aa, Triticum aestivum
  unsure (1)..(175): unsure at all Xaa locations
MERVSPWLLLVVLLVAAASGPGARGDPQVPCYFVFGDSLVDNGNNNDIASLARANYPPYGIDFPGGATGRFSNGLTTXDAISRLLGFDDYIPAYAGANNDQLLSGVNFASAAAGIRDETGQQLGQRISFGGQLQNYQAAVQQLVSIXGDEDSAANHLSQCIFTVGMGSNDYLNNY

SEQ ID NO: 6676 - protein, 460 aa, Yarrowia lipolytica
MCVDSCVQRSSLPHLSRPPGNLHKIINSDIYIYIKPHAPTPLLVAFAPTPHPSTTTSPFGQGLHQAHRQRVASLPTYGKTTTFNLPDNRPIKTVHCPSCEHVCRPQTQDAEAQKLQEAVTQRRRRSGAPGNSFPSAITALHPRQTHAPRERPSARQPDKPNGNRWELGVEFKIDIRAQDLRTIQELGAGNGGSVSRVEHIPTGAVMAKKVIHIGGKEAVRRQILRELHIMHECDSPYIVSFYGAFINESSGDVVMCMEFMDCGHLDRIYKKAGPLTEEIVGHITVAVVEGLTYLYNEHRIVHRDVKPSNILVNSHGQIKLCDFGVSGELINSIADTFVGTSTYMSPERIQGGNYTVKSDVWSLGISLLELLLGKFPFDMANGAVGPMGILDLLQRIVNEPPPTLPAEDTRFSPVCRRFVDRCLVKEPERPSPQQLHPTMPFIITSRAKQVDMKAWAMSVQ

SEQ ID NO: 6677 - protein, 479 aa, Pseudomonas putida KT2440
MSVQTTTTRNASAHTFKQDMQTRHIVMLALGGVIGTGLFLTSGYTVNQAGPLGAVIAYILGAIMVYLVMMCLGELAVHMPEVGSFSSYATRYLGPGTGYMVAWMYWLTWTVAIGSEFTAAGILMVRWFPDTPVWMWSALFGAAVFISNIISVRSFAETEFWLSLVKVLAVIAFLVVGGGAILGGFEIQQAHSAGLGNFTREGLFPTGFWSIAMTLLAVAFAFSGTELIGIAAGETKDPEKNVPKAIRTTVLRLALFFIGTIFVLATLLPREQAGVIESPFVMVFAMIGIPYAADIMNFVIITALLSAANSGLYAASRMLWTLSDQGNMPRRYATLSRRGTPFNAIVLSMAGGMASLLSSVFAPDTIYLALVSISGLAVVVVWISIAASQIAFRRHYIASGGKLEDLKFRVRGYPFVPLGAIFCCVLACVGIAFDPAQRVALYFGLPFIAWCYLAYWLTCKYRSRRTAPLEIVAPGSEAA

SEQ ID NO: 6678 - protein, 432 aa, Triticum aestivum
  unsure (1)..(432): unsure at all Xaa locations
MTHGPTSLLPGRARTTARSPSSRRQSLHATTAEAMDGEDAHHRPSSSSSSGGPFLSGLCAAALRRKPISARASAAASGEGLVRQLGVLELVLLGIGASIGAGIFVITGTGARDAGPGVTISFALAGAACVLNALCYAELASRFPAVVGGAYLYTYAAFNELTAFLVFTQLMLDYHIGAASIARSLASYFIQFLELIPSVKGNVPSWIGHGEEFFGGVVSVNILAPILLVILTVILCRGVKESSAVNTFMTTLKIIIVIVVVFAGVFEVDVSNWSPFMPNGFKAVVTGSTVVFFAYVGFDAVANSAEEAKNPQRDLPIGILGSLLACVILYVAVCLVITGMLPYTLLGEDAPLAEAFSAKGLKFVTVLISIGAVAGLTTTLLVGLYVQSRLYLGLGRDGLLPSXFTKVNSRFHAQLSFLIWXGCVAAFLAGPL

SEQ ID NO: 6679 - protein, 348 aa, Salmonella sp.
MKLLITGGCGFLGSNLASFALSQGIDLIVFDNLSRKGATDNLHWLSSLGNFEFVHGDIRNKNDVTRLITKYMPDSCFHLAGQVAMTTSIDNPCMDFEINVGGTLNLLEAVRQYNSNCNIIYSSTNKVYGDLEQYKYNETETRYTCVDKPNGYDESTQLDFHSPYGCSKGAADQYMLDYARIFGLNTVVFRHSSMYGGRQFATYDQGWVGWFCQKAVEIKNGINKPFTISGNGKQVRDVLHAEDMISLYFTALANVSKIRGNAFNIGGTIVNSLSLLELFKLLEDYCNIDMRFTNLPVRKVISVFLLQILKKSLMQLTGARKSRQKMVSRKCMIGLVLYDVSARESGHN

SEQ ID NO: 6680 - protein, 614 aa, Sorghum bicolor
MGMGSDAAAVLFPFSTTTTTTSPRLCGTAVSSHRRIFSDVAEDVTVSVDGQSFLLHKFPLVSRCGRVRKMVVDSKDPDLLKLELVNVPGGAFAFELAAKFCYGSNFEITTGNVAHLRCVAEYLEMTEDYQEENLIFRTETYLNEIVLKNLDKSLEVLCKCDGLDPVVEEVGLVDRCVDAIAVNASKEQLVSGLAHLECDVGSAKLRMHCQDWWVEDLSALRIDHYRRVIAAMRRNGVRPESIGTSITHYAQTSLKGVERRHVWDSGPFVGDSQRMIVETLIDLLATENITTVTLSFLFGMLRMAIEVDASLDCRIEVEKRIGLQLEMASLDDLLIPSTQTSDSMFDVDTVHRILVNFLQRIDEDSSGELSPCGYDSDGLKSPSHSSVLKVGRLMDGYLAEVAPDPYLKLQKFMALIELLPDYARIVDDGLYRAIDIYLKAHPSLTESECKKLCKLIDCQKLSQDASSHAAQNDRLPIQMVVRVLYFEQLRLKSGVPSSCVSPQRDNYASLRRENRELKLEISRMRVRLTELEREQGLMKQQGRMRGGDGGGRHGGEQGRAFLASLSRGFGRITMFGVGGGPAAADRRRKKSGGRSSQCSDGKARRRHKASFAYD

SEQ ID NO: 6681 - protein, 222 aa, Zea mays; identical to SEQ ID NO: 1917

SEQ ID NO: 6682 - protein, 461 aa, Bacillus subtilis subsp. subtilis str. 168
MSSLFRKKPLETLSAQSKSKSLARTLSAFDLTLLGIGCVIGTGIFVITGTVAATGAGPALIISFILAGLACALAAFCYAEFSSSIPISGSVYSYSYVTLGELLAFLIGWDLMLEYVIALSAVATGWSSYFQSLLAGFNLHIPAALTGAPGSMAGAVFNLPAAVIILLITAIVSRGVKESTRFNNVIVLMKIAIILLFIIVGIGYVKPDNWSPFMPFGMKGVILSAATVFFAYLGFDAVSNASEEVKNPQKNMPVGIISALAVCTVLYIAVSLVLTGMMPYAKLNVGDPVSFALKFVGQDAVAGIISVGAIIGITTVMLALLYAQVRLTFAMSRDGLLPGLFAKVHPSFKTPFRNTWLTGIVAAGIAGFINLGTLAHLVNMGTLAAFTVISIAVIVLRKKHPEIKASFRVPFVPVVPIISAGICLWFMYSLPGVTWLSFVIWIAVGTLVYFLYSRKHSLLNK

SEQ ID NO: 6683 - protein, 193 aa, Neurospora crassa
MAKLFVGGLSWNTDDNMLRAKFEEFGAVEEAVVVKDRDTGRSRGFGFVRYGNDADAENAIANMDGQEVRVDKASDRAAGGGGGGFRQGGGGGGYGGRGGYQGGGGYQGGGGYQGGGGYQGGGYQGGGGGYGGQQYGGQGGYQQSSYGQRSYGQNPQQGYNGGQQQGKGYAAPYGGYPADPSQQGQQYPPQGQY

SEQ ID NO: 6684 - protein, 425 aa, Shigella flexneri 2a str. 301
MTRRGKCRGALPSDTLSRGFRMGQSSQPHELGGGLKSRHVTMLSIAGVIGASLFVGSSVAIAEADPAVLLAYLFAGLLVVMIMRMLAEMAVATPDTGSFSTYADKAIGRWAGYTIGWLYWWFWVLVIPLEANIAAMILHSWVPGIPIWLFSLVITLALTGSNLLSVKNYGEFEFWLALCKVIAILAFIFLGAVAISGFYPYAEVSGISRLWDSGGFMPNGFGAVLSAMLITMFSFMGAEIVTIAAAESDMPEKHIVRATNSVIWRISIFYLCSIFVVVALIPWNMPGLKAVGSYRSVLELLNIPHAKLIMDCVILLSVTSCLNSALYTASRMLYSLSRRGDAPAVMGKINRSKTPYVAVLLSTGAAFLTVVVNYYAPAKVFKFLIDSSGAIALLVYLVIAVSQLRMRKILRAEGSEIRLRMWLDP

SEQ ID NO: 6685 - protein, 749 aa, Chlamydomonas reinhardtii
MAGVPAPASQLTKVLAGLRHTFVVADATLPDCPLVYASEGFYAMTGYGPDEVLGHNCRFLQGEGTDPKEVQKIRDAIKKGEACSVRLLNYRKDGTPFWNLLTVTPIKTPDGRVSKFVGVQVDVTSKTEGKALADNSGVPLLVKYDHRLRDNVARTIVDDVTIAVEKAEGVEPGQASAVAAAAPLGAKGPRGTAPKSFPRVALDLATTVERIQQNFCISDPTLPDCPIVFASDAFLELTGYSREEVLGRNCRFLQGAGTDRGTVDQIRAAIKEGSELTVRILNYTKAGKAFWNMFTLAPMRDQDGHARFFVGVQVDVTAQSTSPDKAPVWNKTPEEEVAKAKMGAEAASLISSALQGMAAPTTANPWAAISGVIMRRKPHKADDKAYQALLQLQERDGKMKLMHFRRVKQLGAGDVGLVDLVQLQGSELKFAMKTLDKFEMQERNKVARVLTESAILAAVDHPFLATLYCTIQTDTHLHFVMEYCDGGELYGLLNSQPKKRLKEEHVRFYASEVLTALQYLHLLGYVYRDLKPENILLHHTGHVLLTDFDLSYSKGSTTPRIEKIGGAGAAGGSAPKSPKKSSSKSGGSSSGSALQLENYLLLAEPSARANSFVGTEEYLAPEVINAAGHGPAVDWWSLGILIFELLYGTTPFRGARRDETFENIIKSPLKFPSKPAVSEECRDLIEKLLVKDVGARLGSRTGANEIKSHPWFKGINWALLRHQQPPYVPRRASKAAGGSSTGGAAFDNY

SEQ ID NO: 6686 - protein, 368 aa, Burkholderia fungorum
MSEVNFVTPFARRFGLRVPVVQAPMAGGATTPAMVAAVSNAGGLGFLAGAALSPEKIASEVAAIRALTDRPFGVNLFVLEPAAPDDATVRTALEAIDPLRRDLGLPPGGPLARYAPDFRAQLDMLIELRVPLASFTFGLLPADDVARLHANGLYVIGTATHVAEAVAWRDVGADAIAAQGAEAGAHRGTFIGAFEEALVGTMALVPQVVDATGLPVLAAGGIMDGRGIVAALALGAQAAVMGTAFLTCHESAIPQAWKTRVRSMSDTSTSVTRAITGRHARGIRNPLMQRLSEAPQKIAPYPVQNALTQELRQTASRAENGDYLSLWSGQGAPLGRARREGLGAAELMSQLEREWREATARIATPNAD

SEQ ID NO: 6687 - protein, 145 aa, Oryza sativa
MNIQRKPGDWNCKSCQHLNFSRRDYCQRCHTPRQDLPLGDGYVPGGVLSSLDIRPGDWYCNCGYHNFASRASCFKCGAIVKDLPAGQGGGVANGDFARALDSSAVRAGWKAGDWICTRPGCNVHNFASRIECYRCNAPREAGNVK

SEQ ID NO: 6688 - protein, 165 aa, Porphyra purpurea
MNLYNNQCPVPLEQQPVNEYNSLKNSWFFCWPTLSSHSYNKKITITLIATCFLVSPVLLSIFPIAKLPLKFFFSEFIISSLITCFILIRLYLGWSYVVKRLMSATVFYEESGWYDGQIWVKPSEILVKDRFIGLYEVFPLLNKIKNTLSCLSLMTTAPAILFFYF

SEQ ID NO: 6689 - protein, 379 aa, Arachis hypogaea
MGAGGRVTKIEAQKKPLSRVPHSNPPFSVGQLKKAIPPHCFERSLFISFSYVVYDLLMAYLLFYIATTYFHKLPYPFSFLAWPIYWAIQGCILTGVWVIAHECGHHAFSKYQLVDDMVGLTLHSCLLVPYFSWKISHRRHHSNTGSLDRDEVFVPKPKSKVSWYNKYMNNPPGRAISLFITLTLGWPLYLAFNVSGRPYDRFASHYDPYAPIYSNRERLLIYVSDSSVFAVTYLLYHIATLKGLGWVVCVYGVPLLIVNGFLVTITYLQHTHASLPHYDSSEWDWLRGALATVDRDYGILNKAFHHITDTHVAHHLFSTMPHYRAMEATNAIKPILGDYYQFDGTPVYKALWREAKECLYVEPDDGASQKGVYWYKNKF

SEQ ID NO: 6690 - protein, 410 aa, Oryza sativa
  unsure (1)..(410): unsure at all Xaa locations
DFYYFFTCPTSHIEAHHYAHPFSLILPLCSGIDQNDQXRFFFPASPAAPRAAFPHAPPPPLAALLPSPGAQLHLIHRHRSYPLAAGDLSLLRIRSGDTSLAAIALLHPIQWPLARDVASVKLDPCHYSFSLTVPPSPRDPDPGPSLHGPAGLEPEERPKANLTXAKSTIKAAAADYRAVGEQGSRXEVEAAAYWTAVAPNVEEYGGKVANAIATGAGHLAKGILWCSELTVDRLRWGNEVLKRRMQPGDADAEVSPEMLRRIKRVKMVTKMSEKVATGILSGVVKVTGYFTNSIANSKAGKKFFNLLPGEIVLASLDGFGKICDAVEVAGTNVLSTSSTVTTGLVSHKYGEKAAAATNEGMDAAGHAIGTAWAVFKIRQALNPKSVLKPTSLAKSTIKAAAADYRAKQKK

SEQ ID NO: 6691 - protein, 207 aa, Zea mays
MVSLKVPKRLAASVLKCGKGKVWLDPNEVSEISMANSRHNIRKLVKDGFIIKKPQKIHSRSRARRAHEAKQKGRHSGYGKRRGTREARLPTKVLWMRRMRVLRRLLRKYREAKKIDKHMYHDMYMKVKGNSFKNKRVLMESIHKSKAEKAREKTLSDQFEARRAKSKASRERKNARREERLAQGPREIPPPVSATAPTTGAPKKAKK

SEQ ID NO: 6692 - protein, 884 aa, Rhodospirillum centenum
MPDRTTDDFGPFTEQIRGTIDGMGTAEFDALPVGAIQVDGSGVIHRYNRTESRLSGRIPERVIGRNFFTEVAPCTNIPAFSGRFMDGVTSGTLDARFDFVFDFQMAPVRVQIRMQNAGVPDRYWIFVRKLEDLRPPGPAPEAPAAHTASVTGEVVDFSVCEQEDIRRVGAIQPWGAVLAVDPRDWTVCAASDNAQALLDCARPPLGRPLGEVLDAGPLAALRDWLPDRTSRSWRGEMARGRRIDIRAHRSGGCVVLDLEPLTARPGEAPVCSLLAAVEADVAVIRQASSLTGLAQACARSVRVLTGFERAIVYRFDADWHGEVIAEDKVEDWPQSFAGLHFPASDIPRQARELYSQSLSRHVPDRDYVPVPVHRIEGTEPLDLSFSRHRSLSPVHLQYLRNMGVTASMSFSILVEGRLWGMVAAHHRQPHHVAIPRRSAAMTVVEAVALSIAAVERAEAMRGRQVDHAVLTALMVQMASSDAVEPALTQQATRLTDLFGATGAALSIDGHLLTVGDWPPPAEVAALRAWLEPRWGSAGLFRTSSLSSVFPDATAYRQKASGCLALRLSGGDFVMWTRPEEPRQITWGGDPAKALGAAGQRPMPRISFDRWVEERRGHAAPWPTWADEIATSLRHAISDMMLRHLRHVKELSDQLAASNEAKSRFLANMSHELRTPLNAIIGFSDLMMSGMAGTLPPRIQDYVQSIHASGEHLLRMVVNDVLDLSRIEAGRMELSPESLDAGILAAECVGMLLPRAVRGEVLLEVQAESPLPLTADALRLRQILLNIIGNAVKFTPPGGRVDVRARALAGGGAVFTVRDTGPGMTPEEVLTAMEPFRQVAQTRAAVEGTGLGLPIAKSLVDLHAGNLAIETAPGLGTTVTIEIGA

SEQ ID NO: 6693 - protein, 657 aa, Rhodospirillum rubrum
MRHEDSLLGLCTGRPPWGAYAVNMGRGLETEKRQVMVIDRRATSADRGGRESVSEYRYPAVNYETCGNLLAMFLAQAERFGERPFLWSKSEGGYAPWSWASVHDQVIALANAMIDQGLAPGDRVVLASENGPDWTIADLAILAAGAIPVPAYATHTEADHLHVLDNVEAAMAIVSTPLVAERFLRAAARAKRRPLVVMMDFDDAVVVPAGLTVLAWNAMMAEGEGRGVPAVVHRIQTDDLASIIHTSGTGGTPKGVMLAHRSILHNCHGAFKLLETIGLEEEVFLSFLPLCHSYEHTTGLFFPISLGAQVYFAEGAETLAANMVEAKPTIMTAVPRLYEMMRARILRAVEKEGGLKEKMFREAVDLGRRRMDDPASLGVKDKLTDAALDKLVRHAVKARFGGRLKAMISGGGPLNPDVGYFFRALGIPVLQGYGLTETAPVVSCNMPKKVKMNTVGPALYGVDIRIASDGEILVKGPLVMDGYWNDPESTRAVLDPDGWLHTGDVGTLDEDGFIQITDRKKDLIVNSGGHNISPQRVEGILGLEPEIGVGVVFGDRMPHLVALIVPEKEFLARWSKETGKPADLALVYEDADLRQAIGKAVERANAKLGTVEKIRKFALLPEPMSVENDQLTHSMKARRHVLRDRYGALIAGLYSGA

SEQ ID NO: 6694 - protein, 427 aa, Raphanus sativus
DNSYTLSFLFVFYVLILLRPAFSINTLSSTESLTISSNRTLVSPGNVFELGFFRTTSSSRWYLGIWYKKLSERTYVWVANRDNPLSNSIGTLKISGNNLVLLGHSNKSVWSTNLTRGSERSTVVAELLANGNFVMRDSNNNDASEFLWQSFDFPTDTLLPEMKLGYDLKTGLNRFLTSWRSSDDPSSGDYSYKLDTQRGLPEFYLLQGDAREHRSGPWNGIGFNGIPEDQKWSYMYNFTENSEEVAYTFLMTNNSFYSRLTLSPSGYFQRLTLNPSTVDWNVFWSSPNHQCDMYRMCGPYSYCDVNTSPSCNCIQGFNPENVQQWALRISISGCIRRTRLSCSGDGFTRMKNMKLPETAMAVVDRSIGVKECKKRCLSNCNCTAFANADIRNGGTGCVIWTGRLDDMRNYVTDGQDLYVRLAAADLV

SEQ ID NO: 6695 - protein, 50 aa, Zea mays
  unsure (1)..(50): unsure at all Xaa locations
DESFVKEWKKVFWEEAGIIKAVPGXKVGKSVSNSGKWMPPASGKLPPKVW

SEQ ID NO: 6696 - protein, 448 aa, Pseudomonas putida KT2440
MNQPWSPDSWRALPIQQQPTYPDAAHLLKVEQTLASYPPLVFAGEARELRRQFAEVTEGRAFLLQGGDCAESFAEFSAAKIRDTFKVLLQMAIVMTFAAGCPVVKVGRMAGQFAKPRSSGDETIGDVTLPAYRGDIVNGIGFDAKSRIPDPERLLQAYHQATASLNLLRAFAQGGFADLHQVHKWNLDFIANSALADKYHQLANRIDETLAFMRACGLDSAPQLRETSFFTAHEALLLNYEEAFVRQDSLTGDYYDCSAHMLWIGDRTRQLDGAHVEFLRGVHNPIGVKVGPSMNPEELIRLIDTLNPANDPGRLNLIVRMGAGKVGDHLPGLIRTVEREGRKVLWSSDPMHGNTIKASSGYKTRDFAQILDEVKQFFQVHQAEGSHAGGIHIEMTGQNVTECIGGARPITEDALSDRYHTHCDPRMNADQSLELAFLIAETLKQVRR

SEQ ID NO: 6697 - protein, 435 aa, Oryza sativa
  unsure (1)..(435): unsure at all Xaa locations
MARLVLSECCGLTPLRLXXGRGAIALPAPSSLAGGPRRPVSAAAAGGAIHRERRPGVRWRRPKPAAGEVGGXXGDGFDPGAPPPFGLAEIRAAIPKHCWVKDPWRSMSYVLRDVVVVLGLAAAAARVDSWLVWPLYWAAQGTMFWALFVLGHDCGHGSFSGGPKLNSVVGHILHSSILVPYHGWRISHRTHHQNHGHVEKDESWQPLSERRYNSPDYMTKNLRFPMXPFPMLAFPLYLFARSPGKKGSHFNPSSDLFQPNEKKDVITSTASWLAMVGILAGLTFVMGPLKMLKLYAVPYVIFVMWLDXVTYLHHHGHEDKLPWYRGKEWSYLRGGLTTLDRDYGWINNVHHDIGTHVIHHLFPQIPHYHLVEATEAAKPVLGKYYKEPEKSAPLPFHLLGVLAKSLNSDHYVSDTGDVVYYQTDLKTSSSAQSSD

SEQ ID NO: 6698 - protein, 143 aa, Cytophaga hutchinsonii
MNIFVGSLPFSLEENELREFFEEYGEVSSVKIISDKFTGRSKGFGFVEMPDDAAAQKAIDELNGAEVNGRTIVVNKSEEKKDGPRRSGFSGGGNRGGGGGYSGGGNGGGGYGGNRSGGGGYGGGGNSRGFGGSGTGRNSRGDR

SEQ ID NO: 6699 - protein, 131 aa, Beta vulgaris
SVGEVVTDLQPGDHVLPVFTGECKECAHCKSEESNMCDLLRINTDRGVMLNDGKSRLSINGKPIFHFVGTSTFSEYTVVHVGCLAKINPEAPLDKVCILSCGISTGFGATVNVARPKKGQTVAIFGLGAVD

SEQ ID NO: 6700 - protein, 556 aa, Mycobacterium tuberculosis CDC1551
MPDDIAAADPTDTQPHLRRDLANRHIQLIAIGGAIGTGLFMGSGRTISLAGPAVMVVYGIIGFFVFFVLRAMGELLLSNLNYKSFVDFAADLLGPAAGFFVGWSYWFAWVVTGIADLVAITGYARFWWPGLPIWVPALVTVALILAVNLFSVRHFGELEFWFALIKVAAIVCLIAVGAILVATNFVSPHGVHATIENLWNDNGFFPTGFLGVVSGFQIAFFAYIGVELVGTAAAETADPRRTLPRAINAVPLRVAVFYIGALLAILAVVPWRQFASGESPFVTMFSLAGLAAAASVVNFVVVTAAASSANSGFFSTGRMLFGLADEGHAPAAFHQLNRGGVPAPALLLTAPLLLTSIPLLYAGRSVIGAFTLVTTVSSLLFMFVWAMIIISYLVYRRRHPQRHTDSVYKMPGGVVMCWAVLVFFAFVIWTLTTETETATALAWFPLWFVLLAVGWLVTQRRQSRRSFGFHCQVVGVRQQLGRGMARLAMKIHARPKLRSAVVVEPVSAGEPGARRSAKSVRKLASDDSQSAHCPVAVVGLADGGRDPQYHHDGPDR

SEQ ID NO: 6701 - protein, 398 aa, Zea mays
MDVPRSNKQPTSTPQNTPANAAPISSRAQQPNVGTIKEEELDRAAAGLFAANPALVSMMQAKLGSLVGRSSGYIESLPGSVRRRVAGLKGVQKEHSKLEAEFQEEVLQLEKKYFAKFTPLYEQRAKIVNGSTEPTEEQVKVGEQQDEDDEDDEEAGEKELNKDEGKGVKGIPEFWLSAMKNQISLAEMITDRDEAALKHLTDVRMEYLDRPGFRLIFEFEENEFFTNKTITKTYFYQEENGYGGDFIYDHAEGDKIDWKTGKDLTVRVESKKQRNKNTKQTRVVKKTVPTESFFNFFDPPSPPQDEDDDASSDIEERLELDYQLGEDIKEKLIPRAIDWFTGEALQYENIEDFDEGEFEDEDDEDEDGLSDDRDEDEESDDENDGTKPKQEAAECKQS

SEQ ID NO: 6702 - protein, 496 aa, Zea mays
  unsure (1)..(496): unsure at all Xaa locations
MDASAGGGGNSLPTTGADGSKRRVCYFYDAEVGNYYYGQGHPMKPHRIRMTHALLGRYGLLDQMQVFRPHPARDRDLCRFHADDYVSFLRSVTPETQQDQIRALKRFNVGEDCPVFDGLYSFCQTYAGGSVGGAVKLNHGHDIAINWAGGLHHAKKCEASGFCYVNDIVLAILELLKYHQRVLYVDIDIHHGDGVEEAFYTTDRVMTVSFHKFGDYFPGTGDIRDVGHSKGKYYSLNVPLDDGIDDESYQSLFKPIMGKVMEVFNPGAVVLQCGADSLSGDRLGCFNLSIKGHAECVRFMRSFNVPLLLLGGGGYTIRNVARCWCYETGVALGHELTDKMPPNEYYEYFGPDYTLHVAPSNMENKNTRHQLDDIKSKLLDNLSKLRHAPSVQFQERPPEAELPEQDEDKENPDERHDADSDVEMNDAKPLQDSGRMSIXVAAEHSRGTGPVADGVGSSKQTFPNATSRMAIDEPNXLRVEQEGSNKLQDQPSMHLK

SEQ ID NO: 6703 - protein, 123 aa, Zea mays
RGLQATEGMNVKEECQRWFMEMKWKKVHRFVVYKIDERSRAVLVDKVGGPGEGYEELVAALPGDDCRYAVFDFDFVSVDTCQKSPPGNKGNRERLVPLQKSATKASKRVLTLPSRLGGYCRGP

SEQ ID NO: 6704 - protein, 89 aa, Oxalis cf. melilotoides EE190
GINISGTNGEVMPGQWEYQVGPSVGIEAGDHIWASRYILERITEQAGVVLTLDPKPIDGDWNGAGCHTNYSTKSMRDEGGFEVIKKAIL

SEQ ID NO: 6705 - protein, 87 aa, Glycine max
  unsure (1)..(87): unsure at all Xaa locations
MXSTXXXMXVQEXXVXXLKEGSXGEXGLGXXVYWMFRDQXVTDNWAXIXXVXEXNKAXVXVXVVFNXFHTFLGXKXXXLGFMLRGAN

SEQ ID NO: 6706 - protein, 348 aa, Prochlorococcus marinus str. MIT 9313
MAELLITGGAGFIGSHTCLVLLEAGHRLVILDNFSNSSAIASKRVAELAGVAAQERMLVLEGDIRNSNDLDRAFNSMENGIAAVVHFAGLKAVHESVQLPLKYWDVNVAGSRCLLEAMQRHNCRTIVFSSSATLYGYPEQIPIPETTRVQPINPYGQSKAAVEQLLDDLACSEPGWRIARLRYFNPVGAHSSGCIGEDPKGIPNNLFPFVSQVAVGRRAELQVFGADWPTPDGSGVRDYIHVMDLAEGHRAALEVLQREEPQLLTLNLGSGKGHSVLEVVQAFEKASGQPVPYSINQRRAGDAACSVADPRLAAERLGWYTQRSLSDMCRDSWNWQKANPQGYSQKQQ

SEQ ID NO: 6707 - protein, 345 aa, Streptococcus pneumoniae R6
MKSAVYTKAGQVGLASIERPQIIEADDVIIRVVRACVCGSDLWRYRNPETKAGHKNSGHEAIGIVEEAGEAITTVKPGDFVIVPFTHGCGECDACLAGFDGSCDNHIGNNLGGDFQAEYIRFHYANWALVKIPGQPSDYTEGMLKSLLTLADVMPTGYHAARVANVQKGDKVVVIGDGAVGQCAVIAAKMRGASQIILMSRHEDCQKMAMESGATAVVAERGQEGITKVREILGGGADAALECVGTEAAIEQALGVLHNGGRMGFVGVPHYNNRALGSTFMQNISVAGGAASATTYDKQFLLKAVLDGDINPGRVFTSSYKLEDIDQAYKDMDERKTIKSMIVIE

SEQ ID NO: 6708 - protein, 172 aa, Magnetospirillum magnetotacticum
MAAGLGSDLFRIKTLERLNADAEAGENKLERHLGPWSLVGLGIGAVIGAGLFSLTGIAAAEHAGPAVTLSFAIAAIGCALAGMCYSELAGMIPVAGSAYTYTYATMGEFVAWIIGWDLVLEYAVGAATVSVSCRATSPASCATPSASTCPVRWCIHPSRPTSSPTARGARLS

SEQ ID NO: 6709 - protein, 281 aa, Saccharomyces cerevisiae
TYTTRQIGAKNTLEYKVYIEKDGKPVSAFHDIPLYADKENNIFNMVVEIPRWTNAKLEITREETLNPIIQDTKKGKLRFVRNCFPHHGYIHNYGAFPQTWEDPNVSHPETKAVGDNDPIDVLEIGETIAYTGQVKQVKALGIMALLDEGETDWKVIAIDINDPLAPKLNDIEDVEKYFPGLLRATNEWFRIYKIPDGKPENQFAFSGEAKNKKYALDIIKETHDSWKQLIAGKSSDSKGIDLTNVTLPDTPTYSKAASDAIPPASLKADAPIDKSIDKWFF

SEQ ID NO: 6710 - protein, 370 aa, Brucella melitensis 16M
MASRKLLLLPGDGIGPEAMAEVRKVIAFLNSDLNLGFETEEGLVGGCAYDAHGQAISDADMEKALAADAVLFGAVGGPKWDSVPYEVRPEGGLLRLRKDMQLYANLRPAICYPALAHSSSLKPEVIEGLDILILRELTGGVYFGEPKEIIDLGNGQKRGIDTQVYDTYEIERIADVAFELARTRRNKVTSMEKRNVMKSGVLWNQGVTARHKEKHADVQLEHMLADAGGMQLVRWPKQFDVILTDNLFGDLLSDVAAMLTGSLGMLPSASLGAADSKTGKRKALYEPVHGSAPDIAGKGIANPIAMIASLAMCLRYSFGLVAEADRLEAAIAGVLDDGIRTADIWSEGNTKVGTTEMGDAILAKFKALSA

SEQ ID NO: 6711 - protein, 108 aa, Glycine max
  unsure (1)..(108): unsure at all Xaa locations
MFIPNFSADMFLALDKDTNGTLSKQELREYADATLADIFIERVYDEHVRRGKXVVWNASREWHFESFFLDFVLALENIDTPEGLTYLVRCLDLQGRGYLTTADVHSLF

SEQ ID NO: 6712 - protein, 204 aa, Magnetospirillum magnetotacticum
MVPVPETLETNPINPYGRSKLMSEWMLADAAAAHGFSYGILRYFNVAGADPRGRTGQSTPNATHLIKVATQAALGQRSHLEVFGTDYPTRDGSCLRDYIQVSDLAEAHMVVLNHLRGGGESLTLNCGYGRGYSVLEVVEVVKRISGRDFEVRLSPRRPGDPAQIIAGADRIRNELGWVPKHDDLDAIVAQAFAWEDSLAKRNRR

SEQ ID NO: 6713 - protein, 96 aa, Glycine canescens
LYAGINISGTNGEVMPGQWEYQVGPSVGIEAGDHIWASRYILERITEQAGVVLSLDPKPIEGDWNGAGCHTNYSTKSMREDGGFEVIKKAILNLSL

SEQ ID NO: 6714 - protein, 136 aa, Glycine max
MAGMSDMQNRQAGPLPPGQFRGAPLTRPRSDPVDREKTCPLLLRVFTKTGGHHSDEEFATRGKEPKDEVQIYTWKDATLRELTDLVKEGALAARKRDAKLSFAFAYPDKRGRYVVRPVGMAFSYGNNRRLDDAKTL

SEQ ID NO: 6715 - protein, 294 aa, Oryza sativa
  unsure (1)..(294): unsure at all Xaa locations
VRNRSSSHTYAEFGVLNNHNSSSVPSMQSQGLSLSLNTQIMAPSLPYWSIKPDMLTPQSYHDNLRGEDMRMKNLQSEASRAIRNSRYLKAAQELLDEVVSVWKSIKQKAQKEKVESGKADGKETDGGPKSEGVSSNPQESGANAAPELSTAEKQELQNKMAKLMAMLDEVDRKYKHYYHQMQTVVSSFDVVAGPGSAKPYTAVALQTISRHFRCLKDAINDQINVIRKKLGEEENSSGKEGKLTRLRYIDQQLRQQRAFQQYGMIPQNAWRPQRGLPENSVTILRAWLFEHFXP

SEQ ID NO: 6716 - protein, 177 aa, Zea mays
  unsure (1)..(177): unsure at all Xaa locations
VHASRRAGVGPETGVLVVGAAPIGVVSLLAARXFGAPRVVVVNVKEHRLPVARSLGANAAVRVSPRAKALANXVKRIGAAMGWDIEVSLDCAGLTKPMSRALKPTGPAGKLCLVGLAPTKLPWPLRRRRARKLNVVGCSGQDPWPCDHFCQGKWTQALITPVRLSQRDVEEASRSAP

SEQ ID NO: 6717 - protein, 392 aa, Oryza sativa (japonica cultivar-group)
MSMQEMLRIGDDDGRSDALERELKEKLRLRGDASPAKCTRQEQRWRSDHGIVDARERFVQAYGRLRDDLVGDDSCELTDEARRWLAQMIDYNVPGGKLNRGLSVIDSYLLLKQGSEVTEDDFFLACVLGWCVEWFQACALLLDDIMDDSHTRRDQICWYRRPEVGLRGINDGIILKCHILIMIKKYFREKPYFLDILEIWSEIALQTSLGQMLDLISTHTGADDLAKYSIEGYRRIVKYKTAYYSFYLPVANALLLSGAKLEDFSGLKDILIEMGIYFQIQDDYLDCFADPNTIGKIGTDIEDHKCSWLIVQALGHADNNQIEVLHRNYGKKDSSSVSEVKRTYAALDLKDIFSEFERRCYNHLVTSIEAQKDHAAREILISFLKKIHQRKK

SEQ ID NO: 6718 - protein, 199 aa, Leavenworthia crassa
SVGEGVTDLQPGGHVLPIFTGECGECPHCHSEESNMCELLRINTERGGMILDGESRFSINGKPIHHFLGTSTFSEYTVVHSGQVVKINPKAPLDKVCIVSCGLTTGLGATLNVAKPKKGQSVAVFGLGAVGLGAAEGARIAGASRIIGVDLNSNRFEEAKKFGVTEFVNPKEHNKPVQQVIAEMTNGGVDRSVECTGSV

SEQ ID NO: 6719 - protein, 175 aa, Zea mays
KRSEAMSMSKTGQAAEKDEQQQSRGIALMQGICAVVYRKADNTPCPIKQGLYLGSVGAAFNKDALKSLNITHILIVAKSLDPVFPAEFNYKKIEDEAISSGGNVLVHCFAGRSRSVTIVVAYLMKKHQMSLESALSLVRSKRPQVAPNGGFISQLEKFQKSLQVEQEWRMQPVQH

SEQ ID NO: 6720 - protein, 478 aa, Zea mays
  unsure (1)..(478): unsure at all Xaa locations
MAAAASSKAPATSDSDSEGLAESLRALCARMDSAAFLGFVVARRKEADALRAEMPPALKLCVDPAKFVMDAVADVFPVDRREVRNPADLAWACVLILEAAVPALADTDPDIGPARPLVPRAARDRARGMARDWTDPLLTPVDMECAAPGARARSPAEPYAYPPAEEVVGLNVGITMPYCTPPMSYPPDHYGGYGSGMAAYANGMVPAVHQXLLPVGWQQLDAVNFAYEAGLQEKFPPVPLLKSYLEDSKKTSTAASDNSSTSSSGQSGSNANKKEQSALRAVIKCVEDRNLEAEFPLEGLRKQLEELEKAKTEKKKAASSATSGGSSSGPATKRIRASNGGPMPPAKAGRLATNACASSFPGPTTFTQSPSHAPHANTSSPSHASHAATASPSHTSYATPPPYPVGHGLYCSRSPPVIRGEPYAYPPAEEVVGFNVGITMPYSTPPMSYPPAPYGGYGSGMAAYANGMAPAFHQAYYR

SEQ ID NO: 6721 - protein, 150 aa, Sulfolobus acidocaldarius
MPEFQLQRRLAADIAGVGLNNIKFNPERLEEVEEALTREDIKKLIKERAVIVNPKRGISSGRLKERKHKRRSKGEGRKHGSRKGKSGARTGDKEIWINKIRKIRRYIRWLRDNNVIDKHTYRLLYKRAKGNYFKNLSDVKSYLRQMGHKV

SEQ ID NO: 6722 - protein, 362 aa, Mycoplasma pneumoniae
MLSAGIVGLPNVGKSTLFSAITNLQVEIANYPFATIEPNAGIVNVIDERLDKLASLIKPDKVTHTTFRFVDIAGLVKGASKGEGLGNQFLANIREVDLICHVVRCYEDKKIVHVNNQVDPVFDFEIIVNELIQADIEVVNTRIGKIKRKAESGDKQSKEEYQLLAPVLQGLQQNQMVLHLVNEVDLKKLKSLNLLTAKPILVVANVSEADLSNLDHNPHLTQLNQFLKQHNLPHAIPVCALLENELSSLDANGRQDWLKELGLSDYQGLNQLIKTAYDAIGLWSFFTFGKQEVRAWAFKKGWLAPQCAGEIHTDFERGFIKVEVISWNQLYELKSLQEAKKQGLVRLRGQGLRDARWWCVSL

SEQ ID NO: 6723 - protein, 1130 aa, Physcomitrella patens
MSTPKLAYSSGSSVKSKHSVRVAQTTADAKLQAVYEESGDSGDSFDYSKSVHASKSTGENVSAQAVTAYLQRMQRGGLMQTFGCMLCVEESNFRVIAFSENAPEMLDLMPQAVPSVGQQEVLGIGTDARTLFTPSSAAALEKCAGTVDVTMLNPISVHCRSSGKPFYAILHRIDVGLVIDFEPVRSNDAIVSSAGVLQSHKLAAKAISRLQALPGGDIGLLCDIVVQEVRELSGYDRVMAYKFHEDEHGEVLAEIRRSDLEPYLGLHYPATDIPQASRFLFMKNKVRMIGDCFASPVKVIQDKDLRQPISLAGSTLRAPHGCHAQYMGNMNSIASLVMAVIVNDPDEDPNARGGQQRGRKLWGLVVCHHTSPRTVSFPLRSACEFLMQVFGLQLNMEVELAAQLREKHILRTQTLLCDMLLRDAPIGIVSQSPNIMDLVKCDGAALHYGKRFWLLGITPNDAQIKEIADWLLEHHQDSTGLSTDSLADAGYPGAAQLGDAVCGMAAAKITSKDFLFWFRSHTAKEIKWGGAKHDPDEKDDGRKMHPRSSFKAFLVVVKRRSLPWEDIEMDAIHSLQLILRGSFQDIDDSDTKTMIHARLNDLKLQDMDELSTVANEMVRLIETATAPILAVDSGGFINGWNAKVAELTGLPVEEAMGRSLVKDLILNESIDVVQRLLHLALQGDEEQNIEIQLKTFGPQKEKGAVILIVNACSSRDVQDNVVGVCFVGQDVTGQKQVLDKFTRIQGDYKAIVQNPNPLIPPIFGTDEYGYCSEWNPSMEKLTGWKREEVIGKLLVGEIFGIQLMCCRLKSQDAMTKFMIVLNGAMDGQDTDRFPFSFFDRQGKYVDPLLTVNKRTDAEGSITGVFCFLHTTSVELLQALTVQRSTEKVAFAKLKELAYIRQEIKNPLYGIVFTRNLMEDTDLSVDQRQLVETSAVCERQLRKILDDLDLESIEDGYLELDTTEFEMGTVMDAVVSQGMITSREKGLQLIRETPSEIKNMCLYGDQVRLQQVLADFLLNAVRFTPSSEGWVGIKVVPTKKRLGRGVHVMHVEFRVTHPGLGLPEELVHEMFGRGRGMTQEGLGLSMCRKLVKLMNGTVQYIRETGKSCFLVEVELPLAQRDDAGSVRSTVV

SEQ ID NO: 6724 - protein, 326 aa, Rudbeckia hirta
  unsure (1)..(326): unsure at all Xaa locations
KAIPPHCFERSVIRSSYYVVHDLIVAYVFYFLANTYIPLLPTPWAYLAWPVYWFCQASILTGLWVIGHECGHHAFSDYQLIDDLVGFVLHSALFTPYFSWKYSHRNHHANTNSLDNDEVYIPKRKAKVAAYSKLLNXPPGRVFTLVFRLTLGFPLYLLTNISGKKYGRFANHFDPLSPIFTDRERVQVLLSDLGLLAAFYAIKLLVAAKGFAWVTSMYLIPVMGVHMFFVLITYLHHTHLSLPHYDSTEWNWIKGALSTIDRDFGFLNRVFHDVTHTHVLHHLISYIPHYHAKEARDAIKPVLGEFYKIDRTPIFKAMWRXAKEXV

SEQ ID NO: 6725 - protein, 128 aa, Glycine max
NVSASEHTTNIVVNNNVENGESSRRSECHCCCRNFPTSQALGGHQNAHKRERQHAKRHLQSTLISDANAYSFVNYRFGSTAMSNYSDSSYPTWNSSNSSSAMLGNTGGTGRIYGNSYSQQLQTINGSP

SEQ ID NO: 6726 - protein, 245 aa, Goupia glabra
ALSIAGAVQSQKLAVRAISQLQSLPGGDIKVLCDTVVESVRELTGYDRVMVYKFHEDEHGEVVAENKRPDLEPYIGLHYPSTDIPQASRFLFKQNRVRMIVDCHATPVRVIQDKGLMQPLCLVGSTLRAPHGCHAQYMANMGPTASLAMAVIITGNDEEAIGGRNSMRLWGLVVCHHTSARCIPFPLRYACEFLMQAFGLQLNMELQLASQLSEKRVLRTQTLLCGMLLRDSPTGIVTQSPSIMD

SEQ ID NO: 6727 - protein, 140 aa, Zea mays
MEKMNVVASRKQGGDWICRSCQYVNFCKRDACQRCGEARLGVERTDYGALGGDWDVKPGDWYCYRCGVNNYASRAGCFKCGAAKNESPPAAVAQGWGYTAAGQAGMKPGDWICPRLGCNVQNYANRTECFRCSMPKSYYG

SEQ ID NO: 6728 - protein, 281 aa, Microbulbifer degradans 2-40
MLINWYPGHMNKARNKVKEIMPAVDVVIEVLDARLPASSTNPMIETLRGDKPYLKVLSKSDLADPTITKAWQAFFREQRNMDSLAITTDKVSIAKTIPDRIRKLLPNRGTSLKPIRALIMGIPNVGKSTLINTLAGKKIAPVGNEPAVTKAQQKIRISDNFFLIDTPGMTWPGSKNEMINYRLAASGAIRDTALEYDDLAVFAMDYMLQRYPEAIRKRYQFDELCESATAMLEELAMKRGCKKNGLPDLTRIGELFVRELRAGKLGRFSLEEPLVSYRKRE

SEQ ID NO: 6729 - protein, 397 aa, Zea mays
MGDAGEIQLQIAGIRCQEAGDDHGQRAESGGACPGPATEAPRPPLSKRLAWWAVVLINVVFILGGQSVATLLGRIYYDQGGNSLWMQTVVQSCGTPLAIPLLLYFRFRVRPTSSSAVAASRPPLVKLAAIYAGLGVLLAADNLMYSYGLLYLPMSTYSIICASQVSFNAVFAYFLNKEKFRALVLNSVVLLTFSAALVGVNHGSDETGSSIPKGKFPAGFALTLSASALFSLILSLTQLTFDEVLKSDALQTVLEMQFWSNTAAACVSVAGLFASGEWRTIAGEMEAYKKGEVAYAMTLASTAFSWQLCTMGLMGLVAAVSSLFTNVISTVGTPLSPVLAVIFLGDRMDGVKLMAMLIAVWGLLSYVYQHYLDDRAKAKRITEKSDEQYQAAKISVE

SEQ ID NO: 6730 - protein, 173 aa, Zea mays
  unsure (1)..(173): unsure at all Xaa locations
PGCFLEVGWLLLPHRFVFRFWFVGEREEMAASDVEYRCFVGGLAWATDDHSLNNAFSTYGEVLESKIILDRETQRSRGFGFVTFSTEDAMRSXHRGXNGKELDGRNITVNEAQSRRGRGGGGGGYGGGRRDGGGYGGGGGGYGGGRGGYXGGGGYCGANRGGCYCNNDGNWKN

SEQ ID NO: 6731 - protein, 227 aa, Ceratopteris richardii
RRSPPKEELDDDDLGDELSNPTEKNRRLTAEQVNFLEMSFNIDLKLEPERKALLAKKLGIRPRQVAIWFQNRRARWKNKQIEQDYESLKTKYEAVIKEREVILLQHEAAMQENKRLQAEVRRLMDLVEATGVGACDVTGVSEGKSELMSPSKSTGRSRVTCKTRVKCHSIAVSASGADVPMPRFELDYGFCRSNDMGVDLHECPTFSLWRIFLGLICPCLFVKFASK

SEQ ID NO: 6732 - protein, 371 aa, Oryza sativa; identical to SEQ ID NO: 3844

SEQ ID NO: 6733 - protein, 396 aa, Triticum aestivum
  unsure (1)..(396): unsure at all Xaa locations
MWGDEMGYVGSHGVATLRKYKYSGVDHSIVAKYILQPFWSRFVNVFPLWFPPNMITLSGFMFLLTSAFLGFLYSPHLDTAPPRWVHLDQHLSLLGHHPLKFKSALKVVLTSKQCXVKQLAKFCCXLIEQTLDTLVLGGTASCLTAAAWVWVISAVPFYFATWEHYFTNTLVLPIVNGXPTEGLMLIYVCHIVTFFTGAEWWAQDFRKSVPLLNWVPLVPEISLYGIVLFLMIAFAVIPTIGSNTHNVYKVVEARKGSMVLALAMLFPFGVLMAGTLVWSYLSPSDIMRNQPHLLIIGTGFAFGYLVGRMILAHLCDEPKGLKTGMCMALAYFPFAIANALTARLDDGNPLXDEXSFVLLIYCLFTVALYMHFATSVIHEITNALGIHCFRITRKKA

SEQ ID NO: 6734 - protein, 1142 aa, Mesotaenium caldariorum
MSTSRMSQSSGESTAKTKREVRVAQATADAKLNTAFEASAAVGGSFDYTKSVGASLNAGSEAIPSSAVTAYLQRMQRGGITQTFGCMLMVEEGSFRVRAFSENAGEMLDLVPQAVPSMGQQSLIAVGTDIRTLFTSASVSLLEKAAMATDVSVMNPVSLQSRAAKKPFFAVLHRIDVGLVVDLEPVRPSDPNVSAAGAMQSHKLAAKAISRLQSLPGGDIGLLCDAVVEEVRELTGYDRVMAYKFHEDEHGEVIAEIRRSDLEPYLGLHYPATDIPQAARFLFMKNRVRIICDCSAPPVKVIQDPTMKHPISLAGSTLRGVHGCHAQYMANMGSVASLVMAVIINDNSSEEGATAAGGILHKGRKLWGLVVCHHSSPRYVPFPLRSACEFLMQVFGLQLNMEVELSSQLREKHILRTQTLLCDMLLRDAPMGIVSQSPNITDLVKCDGAALFYHGRAWLLGVTPSEAQVRDIAAWLLDSHKDSTGLSTDSLADAGYPNADSLGVSVCGMAAARITSKDFLFWFRSHAQKEVKWAGAKQEPGDRDREEGEEGGRMHPRSSFQAFLEVVKQRSLPWEDVEMDAIHSLQLILRGSFQDMEGEGGGSQQGNKRMINARLNDLKLQGMDELSTVANEMVRLIETATAPILAVDSLGCVNGWNAKVSELTGLPVSEAMGKSLVKDLVQRESREAVERVLYMALNGEEEQNVEIQLKTWGPQLHSHGGTVILVVNACASRDVSESVVGVCFVGQDVTGEKEVLDKFIRIQGDYTTIVRSRNSLIPPIFGSDEYGCCTEWNPAMEKLTGVRREDVIGRMLMGDVFGSALRLRGSDGLTQFMIVLNRAMDGADTDKFPFTFYDREGKCVDSLLTANKRTDADGAITGVFCFLHTVSLELQQALSVQKAAERVAEAKAKELAYIRQEIQNPLDGIHFARSFIEHTELSEDQKQLMETSATCEKQLRRILDDMDLESIEEGYLELETGEFMMATVMNSVVSQGMVQSSKKGLQLFCDTPPEFKSMCVFGDQVRLQQVLADFLMNAVQFTPASGWVEIKVVPNVRSLPGGITMAHMEFRVTHSGEGLPEDLVHQMFDRADAHSKSQEGLGLSMCRKIVRLMSGEVRYVREPGKSYFLVLLDLPLAQREDAGSAM

SEQ ID NO: 6735 - protein, 396 aa, Amylomyces rouxii
MATKRNVTSNAPAAEDISISNKAVIDEAIERNWEIPNFTIKEIRDAIPAHCFRRDTFRSFTHVLHDIIIMSILAIGASYIDSIPNTYARIALWPLYWIAQGIVGTGVWVIGHECGHQAFSPSKTINNSVGYVLHTALLVPYHSWRFSHSKHHKATGHMSKDQVFVPSTRKEYGLPPREQDPEVDGPHDALDEVPLLSCIACSFNLPLAGLFISSPMSLVKITPVGLLISTPSVLSTIENQFWDVMSSTAGVLGMIGFLAYCGQVLALLLSSSTMLFPYLNVNFWLVLITYLQHTDPKLPHYRENVWNFQRGAALTVDRSYGFLLDYFHHHISDTHVAHHFFSTMPHYHAEEATVHIKKALGKHYHCDNTPVPIALWKVWKSCRFVEDEGDVVFFKN

SEQ ID NO: 6736 - protein, 137 aa, Zea mays
SIRQDWEPVVVRKKAPTAAAKKDEKAVNAARRAGAEIETMKKYNAGTNKAASSGTSLNTKRLDDDTENLAHERVPSDLKKNLMQARLDKKMTQAQLAQMINEKPQVIQEYESGKAIPNQQIIGKLERALGTKLRGKK

SEQ ID NO: 6737 - protein, 298 aa, Triticum aestivum
  unsure (1)..(298): unsure at all Xaa locations
MRAMASGGGNWLGFSLSPHMAMEVPSSEPDHAQAQPASASAMSASPTNAATCNLLFSQPAQMAAPPPGYYYVGGAYGDGTSTAGVYYSHHSVMPITSDGSLCIMEGMMPSSSPKLEDFLGGGNGSGHDAVTYYSHHQQQQDQQDQEASRIYQHHQQQLAPYNFQXLDTFGQRTSQYRGVTSRHRWTGRYEAHLWDNSCKKDGQTRKGRQVYLGGYDNEDKAARAYDLAALKYWGPSTNTNFPLENYREEVEEMKSMTRQEFVAHLRRRSSGFSRGASIYRGVTRHHQHGRWQARIGRV

SEQ ID NO: 6738 - protein, 182 aa, Zea mays
  unsure (1)..(182): unsure at all Xaa locations
MNRKPGDWDCRSCQHLNFSRRDLCQRCGEPRSAADRGSVGGALGGDYANFGGRGVGGSSFGTGFGAGSDVRPGDWYCTCGAHNFASRSSCFKCAAFKEEATVNGGAGGFDGDMSRSRGFGFGAVGGMGGGMGAGAAGGRASRPGWKSGDWICTRSGCNEXNNFASRQECFRCNAPRDSGTEV

SEQ ID NO: 6739 - protein, 380 aa, Pseudomonas aeruginosa PAO1
MTRRTAFFFDELCLWHAAGPHALTLPVGGWVQPPAAAGHAESPETKRRLKSLLDVSGLTARLQLRSAPPASDEDLLRVHPAHYLERFKALSDAGGGSLGQDAPIGPGSYEIARLSAGLAIAALDAVLAGEADNAYSLSRPPGHHCLPDQAMGFCFFANIAVAIEAAKARHGVERVAVLDWDVHHGNGTQAIYYRRDDVLSISLHQDGCFPPGYSGAEDIGEDRGRGFNLNVPLLPGGGHDAYMQAMQRIVLPALERFRPQLIVVASGFDANAVDPLARMQLHSDSFRAMTAMVRDAAERHAGGRLVVVHEGGYSEAYVPFCGLAVIEELSGVRSAVRDPLRDFIELQQPNAAFRDFQRQRLEELAAQFGLCPAQPLQAAR

SEQ ID NO: 6740 - protein, 305 aa, Pyrococcus abyssi
MVAIIVHGGAGTIRKEERIPKVLEGVREAVLAGWKELKKGSALDAVEEAIKVLEDNPIFNAGTGSVLTIDGKVEMDAAIMRGKTLEAGAVAGIWGVKNPISVARKVMEKTDHVLLVGEGAVKFARIMGFPEYDPTTEERRKQWQELKEKLMKGEVRHWKKLGELIKEHPEVLRSTVGAVAFDGEEVVAGTSTGGVFLKMFGRVGDTPIIGAGTYANEVAGASCTGLGEVAIKLALAKTATDFVRLGLDAQAASEAAIELATKHFGKDTMGIIMVDSRGNVGFAKNTKHMSYAFMKEGMNEPEAGV

SEQ ID NO: 6741 - protein, 454 aa, Cicer arietinum
TDELRTVLETNLPKVKEGKKPKFSLGVAESKLGSQIHDVTKIPCQCNEFVGELLRGVRQHFVDSVGDLKPGDLIKAQLGLSHSYSRAKVKFNVNRVDNMVIQAIFLLDTLDKDINSFSMRVREWYSWHFPELVKIVNDNYLYCKVAKFIEDKSKLSEDKLEGLTDQVGDEDKAKEIIEAAKASMGQDLSPVDLINVHMFAQRVMDLSDYRRRLYDYLTTKMNDIAPNLASLIGEVVGARLISHAGSLTNLAKCPSSTLQILCAEKALFRAFKTRRNTPKYGLIFHSSFIGRASAKNKGRMARYLANKCSIASRIDCFSENGSTIFGEKLREQVEERLDFYDKGVAPRKNIDVMKSAIEIADNKDTEMETEEASAKKSKKKKQKATDEDDMAVDNAAEVTNGDATEDHKSEKKKKKKEKRKVDLEVETQDPSVDEGANGDSSKKKKKKSKRMDVD

SEQ ID NO: 6742 - protein, 228 aa, Pseudomonas aeruginosa PAO1
MSLDKQALFWLAATVGGYLLSRQLYRRVKWYWLSPIVFVPVLLYALAIPTHTRYADYARDTNWLVALLGPATVAFAIPIWQQRELLMRHWPALLAGMFAGTAVAIGSSWALAQALALDGQVTLSLLPRSITTPFAMEMSHDLGGVPELTAAFVMITGVFGAVIGGTLLRVLRLRTPLARGALFGVGAHGAGTSRAYEFGGEEGSAAGLLMVLTGLFNLLVAPLVAHCL

SEQ ID NO: 6743 - protein, 466 aa, Sinorhizobium fredii
MSKRFRSRSAARAARHRLRRGEQDMSNRLNTTPNDLSAFWMPFTANRQFKKEPRLFVGAKDMYYTTHDGRTVLDGTAGLWCVNAGHCRPKITEAIREQAGELDYAPAFQLGHPKAFELANRLVDIAPEGLNHVLYTNSGSESVDTALKVALAYHRAKGNGSRFRLIGRERGYHGVNFGGISVGGIVANRKMFGTLLTGVDHLPHTHLPAKNAFTRGEPEHGGDLASELERIVTLHDASTIAAVIVEPVAGSTGVLIPPKGYLQKLREICTKHGILLIFDEVITGYGRLGTPFAAQYFDVKPDIITTAKGLTNGVIPMGAVFVTSEIHDAFMTGPEHLIEFFHGYTYSGNPIASAAALGTLDTYKEEGLLTRAAELASYWEEALHSLKDCPHVIDIRNIGLIGAVELEPIAGEPTKRAFSAFLKAYEKGLLIRTTGDIIALSPPLIIEKKQIDELIDKLRDVLKNNI

SEQ ID NO: 6744 - protein, 125 aa, Zea mays
MVDAWWPLLGAAIPALVAGQFVRIKRRRDEEQRLKAARGREKSSDEVFVCERVCTSKRMLKKVGAFSKDPIPETCVTVCGVSELDACADACARTVCVNQHQVPNWNDVCLKRCQSECLKLSSNLM

SEQ ID NO: 6745 - protein, 523 aa, Candida maltosa
MAIEQIIEEVLPYLTKWYTILFGAAFTYFLSIALRNKYYEYKLKCENPPYFKTAGFVGIPGLIDVIKAKNAGKLADYADQTFDEYPHHSFYMTVAGMLKIVLTVDPENIKAVLATQFNDFALGARHAHFDPLLGDGIFTLDGEGWKHSRAMLRPQFAREQIAHVKALEPHVQVLAKQIKLNKGETFDLQELFFRFTVDTATEFLFGESVHSLYDEKLGVPPPNNIPGRENFAKAFNTSQHYLATRTYSQMFYFLTNPKEFRDCNAKVHKLAQYFVNKALDASEDEVAEKSKGGYVFLYELVKQTRDPKVLQDQLLNIMVAGRDTTAGLLSFAMFELARNPKIWNKLREEIEVNFGLGEEARVDEISFETLKKCEYLKAVLNETLRMYPSVPVNFRTATRDTTLPRGGGKDGTSPIFVPKGSSVVYTVYKTHRLEEYYGKDAYEFRPERWFEPSTRKLGWAYVPFNGGPRICLGQQFALTEASYVITRLAQMFEHLESKDETYPPNKCIHLTMNHNEGVFISAK

SEQ ID NO: 6746 - protein, 438 aa, Brassica rapa
YHHSYTFSFLLVFLALILFHPALSIYVNTLSSSESLTISSNRTLVSPGGVFELGFFKPSGRSRWYLGIWYKKLSQKTYAWVANRDNPLSNSIGTLKISGNNLVLLGQSNNTVWSTNLTRCNARSPVVAELLPNGNFVMRHSSNRDSSGFLWQSFDFPTDTLLPEMKLGYDLKTGRNRFLTSWKGSDDPSSGNFVYKLDLRRGLPEFILINQFLNQRIETQRSGPWNGIEFSGIPEVQGLNYMVYNYTENSEEIAYSFQMTNQSIYSRLTVSEFTLDRFTWIPPSWGWSLFWTLPTDVCDPLYLCGSYSYCDLNTSPNCNCIKGFVPKNPQQWDLRDGTQGCVRTTQMSCSGDGFLRLNNMNLPDTKTATVDRTIDVKKCEEKCLSDCNCTSFAIADVRNGGLGCVFWTGELVEMRKYTVGGQDLYVRLNAADLGTCTG

SEQ ID NO: 6747 - protein, 111 aa, Sulfolobus acidocaldarius
MKFCPKCGSMMMPRKENGKTVYKCSKCAYIDTENQKEAKITTVIKHSAKAKTLVLASDMPNPGVQLTRGISCPSCGNDEAYFWILQTRSADEPATRFYKCTKCGKVWREYE

SEQ ID NO: 6748 - protein, 347 aa, Staphylococcus aureus subsp. aureus Mu50
MKALKLYGVEDLRYEDNEKPVIESANDVIVKVRATGICGSDTSRYKKMGPYIKGMPFGHEFSGVVDAIGSDVTHVNVGDKVTGCPAIPCYQCEYCLKGEYARCEKLFVIGSYEPGSFAEYVKLPAQNVLKVPDNVDYIEAAMVEPSAVVAHGFYKSNIQPGMTVAVMGCGSIGLLAIQWARIFGAAHIIAIDIDAHKLDIATSLGAHQTINSKEENLEKFIENHYANQIDLAIESSGAKVTIGQILTLPKKGGEVVLLGIPYDDIEIDRVHFEKILRNELTVCGSWNCLSSNFPGKEWTATLHYMKTKDINVKPIISHFLPLEKGPETFDKLVNKKERFDKVMFTIY

SEQ ID NO: 6749 - protein, 751 aa, Geobacillus stearothermophilus
MENQNRQNAAQCPFHGSVTNQSSNRTTNKDWWPNQLNLSILHQHDRKTNPHDEEFNYAEEFQKLDYWALKEDLRKLMTESQDWWPADYGHYGPLFIRMAWHSAGTYRIGDGRGGASTGTQRFAPLNSWPDNANLDKARRLLWPIKKKYGNKISWADLFILAGNVAIESMGGKTIGFGGGRVDVWHPEEDVYWGSEKEWLASERYSGDRELENPLAAVQMGLIYVNPEGPDGKPDPKAAARDIRETFRRMGMNDEETVALIAGGHTFGKAHGAGPATHVGPEPEAAPIEAQGLGWISSYGKGKGSDTITSGIEGAWTPTPTQWDTSYFDMLFGYDWWLTKSPAGAWQWMAVDPDEKDLAPDAEDPSKKVPTMMMTTDLALRFDPEYEKIARRFHQNPEEFAEAFARAWFKLTHRDMGPKTRYLGPEVPKEDFIWQDPIPEVDYELTEAEIEEIKAKILNSGLTVSELVKTAWASASTFRNSDKRGGANGARIRLAPQKDWEVNEPERLAKVLSVYEDIQRELPKKVSIADLIVLGGSAAVEKAARDAGFDVKVPFFPGRGDATQEQTDVESFAVLEPFADGFRNYQKQEYSVPPEELLVDKAQLLGLTAPEMTVLVGGLRVLGANYRDLPHGVFTDRIGVLTNDFFVNLLDMNYEWVPTDSGIYEIRDRKTGEVRWTATRVDLIFGSNSILRSYAEFYAQDDNQEKFVRDFINAWVKVMNADRFDLVKKARESVTALQCIIFSRSDVAIALQ

SEQ ID NO: 6750 - protein, 923 aa, Vicia hirsuta
MELQALWITRLAVACVLCLCIFIRSGSSATGGFESIACCADSNYTDPKTNLNYTTDYKWFSDKSSCRQIPEILLSHRSNVNFRLFDIDEGKRCYSLPTIKDQVYLIRGTFPFDSVNSSFYVSIGATELGEVTSSRLEDLEIEGVFKATKDSVDFCLLKEDVNPFISQLELRPLPEEYLRDFSTDVLKLISRNNLCGIEDDIRFPVDQNDRIWKATSTPSYALPLSLNVSNVDLKGKVTPPLQVLQTALTHPERLEFVHDGLETDDYEYSVLLYFLELNNTLTAGQRVFDIYLNSEIKKENFDVLEGGSKYSYTALNITANGSLNMTLVKASGSKFGPLLNAYEILQARPWIDETSQPDVEVIQKMRKELLLQNQDNEALESWSGDPCMIFPWKGVACDGSNGSSVITKLDLSFNDLKGTIPSSVTEMTNLQILNLSHNHFDGYIPSFPSSSLLISVDLSYNDLTGQLPESIISLPHLKSLYFGCNQHMSDDDEAKLNSSLIITDYGRCKAKKNKFGQVFVIGAITSGSILITLAVGILCFCRYRHRTITLEGFGGKTYPMATNIIFSLPSKDDFFIKSVSVKPFTLEYIELATEKYKTLIGEGGFGSVYRGTLDDGQEVAVKVRSATSTQGTREFDNELNLLSAIQHENLVPLLGYCNEYDQQILVYPFMSNGSLLDRLYGEPAKRKILDWPTRLSIALGAARGLAYLHTFPGRSVIHRDVKSSNILLDNSMCAKVADFGFSKYAPQEGDSYVSLEVRGTAGYLDPEYYKTQQLSEKSDVFSFGVVLLEIVSGREPLNIKRPRVEWSLVEWAKPYIRASKVDEIVDPGIKGGYHAEALWRVVEVALQCLEPYSTYRPCMVDIVRELEDALIIENNASEYMKSIDSLGGSNRYSIVMDKRVLPSTTTMAESTITTQNVSHPQPR

SEQ ID NO: 6751 - protein, 111 aa, Zea mays
  unsure (1)..(111): unsure at all Xaa locations
MRRLRVQAIRTQREKQRTEVPVXESAPARDAVAPLDGNGAVADGYLVPSSDDSWVIKLEHSFNIFDTDSVIMVLKGVYGDRYYARFFALETIARVPYFAFISVLHLYATFG

SEQ ID NO: 6752 - protein, 821 aa, Listeria monocytogenes EGD-e
MKSKNNYFKQITTIMTVVSLLIMVLGIQGNNDVKAAPQVAPPASINQIFPDADLAEGIRAELQKSSVTDVVTKEELESISQLSVYAKKIASIEGLEYLTNLKFLNLNGNQITDLSPLSNLTKLTEIYIGDNKISDISPLQNLTNVTDLYLVDNDISDLRPLANLTQMYSLRLGGNSNISDLNPVRNMTRLNNLEVTGSILKDLTPLADVTSLTRLTLSDNQIEDLSPLAGLTKLDNIAAYSNKITDITPVTNLTRLQYLDLGSNEITDLSPVANLQKLTSLHLANNQITNISMLEDLTNLTSLGLQNNKISDISVLKNLTHVTYLQLGYNQIVDVKIIGGLTNLTSLQLTQNHITDISPLANLTKIQYSDFSNQMITNLERNFSKTLSVPNNITSIDGTLIAPETISNNGTYDAPNLKWSLPNYLPEVKYTFSQKIPIGTGTSNYSGFITQPLKELLDYKVTFNVEGNTSEVETVTEENLIPEPTSPTKQGYTFDGWYDAETGGTKWDFTTGQMPANDLTLYAHFSVNSYQANFDIDGVVTNEAVVYDTLLNEPTTPTKQGYTFDGWYDAETGGNKWDFKTMKMPANDVAFYAHFTINNYQANFDIDGEVKNETIAYDTLLNEPTTPTKQGYTFDGWYDAETGGTKWDFKTKEMPANDVTLYAHFTINNYQANFDIDGAVTEEVVNYDALIPEPTSPSKTGFTFEGWYDAEVGGTKWDFKTMKMPANDITLYAHFSKETPIIPSPDEGLDSDSTNGPITINEPSATSTPSQNNNITVTAGENTTELATAKLPKTGDNAPWKTLFAGILLSSSAFYIWRKKA

SEQ ID NO: 6753 - protein, 246 aa, Triticum aestivum
  unsure (1)..(246): unsure at all Xaa locations
MAPLLKDELDIVIPTIRNLDFLEMWRPFFQPYHLIIVQDGDPTRTVMVPEGFDYELYNRNDINRILGPKASCISFKDSACRCFGYMVSKKKYVYTIDDDCFVAKDPTGKDIDALAKHIQNLLCPSTPLFFNTLYDPYQEGADFVRGYPFSLREGVPTAVSHGLWLNIPDYDAPTQLVKPRERNGRYVDAVMTIPKGSLFPMCGMNLAFDRQLIGPAMYFGLMGDGQPIGRYDDMWAGWXXKXICDT

SEQ ID NO: 6754 - protein, 646 aa, Neurospora crassa
MPSTFTDPAGVARDEPLYTVVHNDKKRVAYFYDSDIGNYAYVTGHPMKPHRIRLAHSLVMNYNVYKFLEVYFHTDEYIEFLQKVTPDNMDGFMREQGKYNVGDDCPVFDGLFEFCGISAGGSMEGAARLNRDKCDIAINWAGGLHHAKKSEASGFCYVNDIVLAILELLRFKKRVLYIDIDVHHGDGVEEAFYTTDRVMTVSFHKYGEYFPGTGELRDIGIGSGKNYAVNFPLRDGIDDTTYSSIFQPVISAVMQYFQPEAVVLQCGGDSLSGDRLGCFNLSMRGHANCVNYVRSFGLPTLVLGGGGYTMRNVARTWAYETGRLVGVEMNPVLPYNEYYDYYGPDYELDVRSSNMENANSPEYLEKIKISVIENLKKTAPVPSVQMQDVPRQGFGMSDDQEDELDDMDEDENKDVRRTQRQWEKERARQDEFEESDDEDMAQANGVFKPNGPQRRSILDFKNPKAVEDMDLDIGEPAPPSIAATAAAAAAKPAEPTAVDNDETMIDNDEAQPAAAEPEAEAPATTAAQPAVSSAAKVDEDGDVDMGEADEKPAEPEAEIKTEEIETAPAPEPEAERRPSPAAATAEPATEAAAAAAASPKAASPVPDANTEKPVAEEPSKVAEEASDKAPAATTDDKEKEADKPQE

SEQ ID NO: 6755 - protein, 337 aa, Bradyrhizobium japonicum
MTVLVTGGAGYIGSHMVHALVDAGESVVVIDNLSTGFSAFLPEGVPLFIGDAGDENLVEGVIAQHGIDSIIHFAGSVVVPDSMRDPLGYYRNNTMTTGSLLNAAVKGGVSRFIFSSTAAVYGNPDRVPVPEIAPTRPLSPYGSSKLMTEIMLHDVASAHGMSYVVLRYFNVAGADPKGRVGLATTGATHLLKIAVEAATGQRAKIDVFGTDYPTQDGSCIRDFIHVSDLVEAHRAALSYLRAGGQSVTLNCGYGRGYSVLETIEAVRRVSMRNFAVAYAARRPGDIMTMVADTTRIRSLLDWTPRFDDLETIASHALAWEEKLFRERAGSARQAESA

SEQ ID NO: 6756 - protein, 166 aa, Zea mays
MMMACALAVAQPAASLAPPSGKRTLSGGRPPRLPPPRLSGKLALATPCCARGAGKLIRSRAVVAKAAQDGSESSGTGSIVKYVTSSFSTAEDIFALAGIGFAAVAALWASVNLIEIIDKLPVLPLLFELVGILVAWLFIYNNLLFKPKRKEFLENIKSSGSRILGQ

SEQ ID NO: 6757 - protein, 524 aa, Oryza sativa; identical to SEQ ID NO: 4815

SEQ ID NO: 6758 - protein, 543 aa, Schizosaccharomyces pombe
MPAMKRKKLDMESSRWFPKGETCFQRWYRSFLPPEDGKPQKLKRTLTARHIQMIGIGGAIGTGVWVGSKNTLREGGAASVLICYSLVGSMVLMTVYSLGELAVAFPINGSFHTYGTRFIHPSWGFTLGWNYLASFLATYPLELITASICLQFWININSGIWITVFIALLCFVNMFGVRGYGEVEFFVSSLKVMAMVGFIICGIVIDCGGVRTDHRGYIGATIFRKNAFIHGFHGFCSVFSTAAFSYAGTEYIGIAASETKNPAKAFPKAVKQVFIRVSLFYILALFVVSLLISGRDERLTTLSATAASPFILALMDAKIRGLPHVLNAVILISVLTAANGITYTGSRTLHSMAEQGHAPKWFKYVDREGRPLLAMAFVLCFGALGYICESAQSDTVFDWLLSISNLATLFVWLSINVSYIIYRLAFKKQGKSYDEVGYHSPFGIYGACYGAFIIILVFITEFYVSIFPIGASPDAGAFFQSYLCFPVVVIVFIAHALITRQKFRKLSEIDLDTGFSKYDRLEESDKGPMTAKSLAKSVLSFCV

SEQ ID NO: 6759 - protein, 143 aa, Glycine max; identical to SEQ ID NO: 4154

SEQ ID NO: 6760 - protein, 344 aa, Sulfolobus solfataricus
MCSRFIHMKYVNLGESGVKVSQVAIGTWFLPRLQEKDELGIYKVDKETTLKILKRAYDEGVNFIDTANRYHGAMAPVDLPHVGNAERIVGEFLKTVDRESVVISTKVRGKMGDFVNGEGLSRKHILWQIKESLKRLGTSYIDVYFIHWPDPDTPKLETLRTLNSLVNNGLVYYLGVSNHSAVDVMEFLQLSERHNLEKFIVMQEKYNMLERDIEKDKAIIAKRFGLAIMAYSPLAQGFLTGKYVDKNGWKIEELSRASITEDLKKRYFTEANLRILLGLKDVASELGITLSQLAISWLLKRGEQLGITVIPLIGASKIEHLEDNLSALNINLRDDYMKRIEQIF

SEQ ID NO: 6761 - protein, 377 aa, Bacillus subtilis subsp. subtilis str. 168
MSLNSSPSYRRRAGKGLVLCVCRKAFGKWAGFSNGWVYWTSEMLITGSQLTAISLFTKHWFPQVPLWVFASIYAVLGLLIIFTGLAVFEKTENVLAVIKTAAIFMFIVIAILALCGILSGGNHGIHVPNKTSEFFPYGAMGLWTGLIYAFYAFGGIEVMGLMAVHLKKPEEASKSGKLMLATLAIIYIISIGLALLLVPLHTFTEQDSPFITSLKGYNLEIILDIFNGIFIIAGFSTLIASLFAVTTLLCTMADDGDAPKCFTLKEGKKICWPALGLTFAGLVLSIILSLVLPKNIYEHMTTAAGLMLLYTWLFILFSSKKLTDPEGMGKTQIYLAMVLIAAAVSGTLFEKSSRPGFFVSIGFLVIIAIVTMIYQKK

SEQ ID NO: 6762 - protein, 446 aa, Lactococcus lactis subsp. lactis
METNQSLKKKMAARHITMIALGGAIGAGLFKGSSSAIAAAGPSVLIAYFIGGIVLYFVMKSLEKLVLSSKDPHGLSGLVQPYLGNHTADFTDWVYWSMWMINIIAEAVAAASFLQLWFANVPTWVFVLIIALLTSLINLFSVALFAETEYWLAFIKISVVILLIIFGVFLVAKQIFDTNLVTTFSGMTAHGGFAPHGFKGVINSLLIVIYSYGGSELIAITVSETEDPKRAIPKAIRGVIGRIISFYIIPMFLLLVIYNWQTLATSSMSPFVMVFNKMHIPFAGDIVNLIIILALFSSINSGIYASSRLLYFRLKNRQGKMAQRMAHLNKHHVPQRAVIFCSGTLYIGVVLSYFVGDRLFNYLAGSLSYTVLAVWILISLAGFGLSLKTKSLSGRTMSLLALIALFLILIGILFTNPIGVTVFTAILYFIIFISYQKKNDSVSNLN

SEQ ID NO: 6763 - protein, 382 aa, Corynebacterium glutamicum
MRHNWPCDTRMDNGMTITTEHSTHPDLDFNDEIYRELNRICASLSQQCSTYPPEFRTCLDAAFQALRGGKLIRPRMLLGLYDALVDDDIEVKLNTVLQVAAALELLHFSLLVHDDVIDGDLYRRGKLNFIGQILIHRTPESFAQTQRDPEHLDWAQSNGLLMGNLFLAATHQIFARLDLPHPQRVRLLDLLNHTMNDTIVGEFLDVGLSSKAISPNMDIALEMSRLKTATYSFELPMRAAAILAELPQEIETQIGEIGTNLGIAYQLQDDYLSTFGDAAEHGKDAFSDLREGKETTIIAYARNTAKWNDIEDIFGSADLSTSQAERIQHLLIQCGAKNHSLNAISDHLNICRSMIETLSTQVYPKAQKLLLKHVEQLASRKS

SEQ ID NO: 6764 - protein, 344 aa, Bradyrhizobium japonicum USDA 110
MTKYKLEYIWLDGYTPTPNLRGKTQIKEFASFPTLEQLPLWGFDGSSTQQAEGHSSDCVLKPVAVFPDAARTNGVLVMCEVMMPDGKTPHASNKRATILDDAGAWFGFEQEYFFYKDGRPLGFPTSGYPAPQGPYYTGVGFSNVGDVARKIVEEHLDLCLAAGINHEGINAEVAKGQWEFQIFGKGSKKAADEMWMARYLMLRLTEKYGIDIEFHCKPLGDTDWNGSGMHANFSTEYMRTVGGKEYFEALMAAFDKNLMDHIAVYGPDNDKRLTGKHETAPWNKFSYGVADRGASIRVPHSFVNNGYKGYLEDRRPNSQGDPYQIASQILKTISSVPTEKKAVA

SEQ ID NO: 6765 - protein, 428 aa, Oryza sativa; identical to SEQ ID NO: 511

SEQ ID NO: 6766 - protein, 395 aa, Pseudowintera axillaris
  unsure (1)..(395): unsure at all Xaa locations
DLEPVNPADVPVTAAGALKSYKLAAKAISKLQSLPSGNISLLCDVLVREVSELTGYDRVMTYKFHEDEHGEVIAECRRNDMEPYLGLHYPATDIPQASRFLFMKNKVRMICDCTARPVEVIQDKKLAQPLSLCGSTLTAPHGCHAQYMANMGSXASLVMSVTISEDDDEASSEEHRQKGRKLWGLVVCHHMTPRFVPFPLRYACEFLIQVFGIQLNKEVELAAQLREKNMLRTQTMLCDMLLRDAPVGIVTQSPNVMDLVKCDGAALYYRNQFWLLGTTPTEVQIRDIAEWLLEYHNNTTGLSTDSLMEAAYPGASILGDAVCGMAAVKITNKDFLFWFRSHTAKEIKWGGAKHDPSDKDGDGRKMHPRSSFMAFLDVVKRRSLPWEDVEMDAIQ

SEQ ID NO: 6767 - protein, 369 aa, Xanthomonas axonopodis pv. citri str. 306
MKSRAAVAFGPGKPLEIVEIDVAPPKAGEVLVRITHTGVCHTDAFTLSGDDPEGIFPSVLGHEGGGIVEQVGEGVTSVKIGDHVIPLYTAECRKCKFCLSGKTNLCQAVRATQGKGLMPDGTTRFSYNGEPIYHYMGCSTFSEYTVVPEISLAVVNPEAPLEKVCLLGCGVTTGIGAVHNTAKVKPGESVAVFGLGGIGLAVIQGAVQAKAGRILAIDTNPGKFDLARSMGATDCINPKDYDKPIQEVIVELTDGGVDFSFECIGNVNVMRSALECCHKGWGESVIIGVAGAGQEISTRPFQLVTGRVWRGSAFGGVKGRTQLPGMVEQSMKGAIDLDPFITHTMPLEEINEAFHLMHEGKSIRTVIHF

SEQ ID NO: 6768 - protein, 169 aa, Oryza sativa (japonica cultivar-group)
MAATADNGEKMILLISSDGERFELSEAAASQSKTLSHMIEDDCTDNGVPLPNVTAVVLAKVVEYFKKHAAVTPKPATEAVAADKAKREEELKSFDAEFVDVDRTMVFELILAANFLNAQDLLDLTCQHAADLIKDMSVEEVREVFNITNDFTPEEEAEVRKENAWAFDN

SEQ ID NO: 6769 - protein, 323 aa, Nostoc punctiforme
MKYVNFGKTGLKVSRLCLGTLSYGSPQWEEWILPEETSRPFIQKALELGINFFDTADMYSQGVSEQILGRSLKDFAKREQVVIATKVYYPMGDSPNDKGLSRKHIMNSIDASLRRLQTDYVDIYQIHRWDYETPIEETLAALHDIVKAGKARYIGASSMYAWQFAKALYLADMHGWTRFVSMQNLYNLIYREEEREMLPLCQTEGIAVIPWSPIARGFLAGNQPRHSPAKTIRARTDYQLDYEEFDFEIVDRVMNIAKQRGVSAAQISLAWLLHQPSVTAPIIGATKIEHLEEAVATLDLVMDNDERTLLEQPYKPRAIFGLD

SEQ ID NO: 6770 - protein, 132 aa, Zea mays
MALEWVVLGYAAGAEAIMLLLLTLPGLDGLRRGMISVVRSALKPMMSVVPFCLFLLMDIYWKYETRPTCDDEHACTPSEHLRHQKSIMKSQRNALLIAAALLLYWILFSVTQLVVRLEQMQQRVDKLRKRDD

SEQ ID NO: 6771 - protein, 377 aa, Oryza sativa
  unsure (1)..(377): unsure at all Xaa locations
MATPRTLVPILPPVAALLLLLVAASSIPILAAAQPADACGGAPDQAAADGACHDVPRALRLKLIAIPTILVSSVVGVCLPLLSRSVPALRPDGGLFAVVKAFASGVILATGYMHVLPDAFNNLTSPCLPRKPWSEFPFAAFVAMLAAVSTLMADSLMLTYYNRSKRGDVAAVADHGESPDQGHRHGHGHGHGHGMAVAKPDDVEATQVQLRRNRVVVQVLEIGIVVHSVVIGLGMGASQNVCTIRPLVAAMCFHQMFEGMGLGGCILQAEYGRRMRSVLVFFFSTTTPFGIALGLALTRVYRDSSPTALVVVGLLNAASAGLLHYMALVELLAADFMGPKLQGNVRLQLAASPSRRDAXFLAVLLGAGGMSVMAKWA

SEQ ID NO: 6772 - protein, 519 aa, Debaryomyces hansenii
MSELLDSIQPYLTKWYVVISALLVSFFIAHKISVARFKATHNCAASPEYYKVNWFSLPLLYRLIQVKREGRLLDFAQKIYDDVKALTFVIKIVGVPVIITRDPENMKAVLATQFNDFALGTRHAHFKPLLGDGIFTLDGNGWKQSRSMLRPQFSREQVAHVQALEPHLQRLAKHIRLADGETINIQDLFFKLTVDTATEFLFGQSVYSLKDAAINDPPTEDFDGRSSFANSFNTAQTYLGTRAYLQMFYFIVNNSDFRKCCKQVHDFTRFYVQKGLDMTPEELEKKSENGYVFLYELVKQTRDPKVLQDQLLNILLAGRDTTAGLLSFTFFELARHPRVFNKLKEEIYEAFGKGDDARVSEITFESLKKCEYLKWVMNEMLRLYPSVPVNFRVATKRTTLPRGGGPDGNSPIYVGKGTTVAYSVYSTHRMEEYYGKDADEFKPERWAESRKLGWAYVPFNGGPRICLGQQFALTEASYIVTRLLQMFDKLELHDDRPYPPAKSVHLTMCHQDGVYVSLS

SEQ ID NO: 6773 - protein, 255 aa, Triticum aestivum
RKRPSTDFLETIQKDVNPSMRAILIDWLVEVAEEYRLVPDTLYLTVNYIDRYLSGNEINRQRLQLLGVACMLIAAKYEEICAPQVEEFCYITDNTYFKDEVLDMEASVLNYLKFEMTAPTAKCFLRRFVRAAQVCDEDPPLHLEFLANYVAELSLLEYSLLAYPPSLVAASAIFLSKFILQPAKHPWNSTLAHYTQYKPSELCDCVKALHRLFSVGPGSNLPAIREKYSQHKYKFVGKKQCPTSVPAEFFRDAAC

SEQ ID NO: 6774 - protein, 253 aa, Pseudomonas aeruginosa UCBPP-PA14
MRRLENRVALVTGAGQGIGRAIAECFAAEGARVLLATRTASRGQAVLEAIRLGGGTAELLAVDLSEHDAARRAVSATLERFGQLDILLHNAAAFPQCALAELDEGTLERTLAVNLKSCFRLTQAALPALRRSVAGRVLVTSSVTGPRTAIPGLSHYAASKAGVNGFIRAAALELAGDGITVNGVEPGLVATPALGSLGDAAALAAHIPLGRVGQPLDIAHAMLFLASDEASYITGQTLVVDGGALLPENGGLA

SEQ ID NO: 6775 - protein, 471 aa, Bacillus cereus ATCC 14579
MSNLLKKKSVTQLLEHNQSKTLTKTLGAFDLIMLGVGSIVGTGVLVLTGLVAARNAGPAVVFSFILAAIICGFIALCYAEIASTLPASGSVYTYSYATIGEFVAHLVGWSLLLIYIVATAAVAAGWTGYFHNLIKGFGLEIPKALVTIPSHGGIVNLPAVIITLILAWMLSRGTRESKRINNIMVLIKIGMILLFITVGIFYVKPMNWIPIAPYGLSGVFTGGAAILFAFTGFDILATSAEEVKDPKRNLPIGIIASLIICTIIYVMVCLVMTGMVSYKELNVPEAMAYVMEVVGQGKVAGAIAAGAVIGLMAVIFSNMYAATRVFFAMSRDGLLPKSFAKVNKKTGAPTFITGLAGIGSSIIAGFIDLKELVNLVNIGSLVTFALVCLSVIILRKSHPNLKRGFMVPFVPVLPCVAIVCCVFLMLNLPLRTWVYFSIWITIGVVVYFLYSIKYSNLNEETISKLHDKIAR

SEQ ID NO: 6776 - protein, 168 aa, Archaeoglobus fulgidus DSM 4304
MRVLILAENEFEDLELFYPLYRLREEGLEVKVASSSLEVRVGKKGYQVRPDLTYEDVKVEDYAGLVIPGGKSPERVRINERAVEIVKDFLELGKPVAAICHGPQLLISAMAVKGRRMTSWIGIRDDLIAAGALYEDRPVVVDGNVITSRMPDDLPYFCGELIKILKRY

SEQ ID NO: 6777 - protein, 286 aa, Cucurbita cv. Kurokawa Amakuri
MALPVVDTEYLKEIEKARRDLRALIANRNCAPIMLRLAWHDAGTYDVSTKTGGPNGSIRNQEEYSHGSNNGLKKAIDFCEEVKSKHPKITYADLYQLAGVVAVEVTGGPTIDFVSGRKDSRISPREGRLPDAKKGAPHLRDIFYRMGLSDKDIVALSGGHTLGRAHPERSGFDGPWTEDPLKFDNSYFVELLKGESEGLLKLPTDKALLEDPEFRPYVELYAKDEDAFFKDYAESHKKLSELGFTPGSARAIANDSTVLAQGAVGVAVAAAVVILSYFYEIRKNLK

SEQ ID NO: 6778 - protein, 345 aa, Hernandia lychnifera
DLEPVNPAEVPVTAAGALKSYKLAAKAISLLLSLPSGNISVLCDVLVCEVSDLTGYDRVMAYKFHEDEHGEVIAECCRPDLEPYLGLHYPATDIPQASRFLFMKNKVRMICDCSAFPVKVVQDKRLAQPLSLCGSTLRAAHGCHAQYMANMDSVASLMMSVTIIEDDDEVGSDPQQQQKGRKLWGLVVCHHTSPRFVPLPLRYACELLIQVFGMQLNKEVELANQMREKHILRMQAVPCDMLLRDTPVGIMTRSPNIMDLVKCDGAALYYHNQFWLLGINPTEAQIRDIARWLLERHNGSTGLSTDSLMEAGYPGASFLGNAVCGMAAVRISSNDFLSWFRSHTA

SEQ ID NO: 6779 - protein, 336 aa, Novosphingobium aromaticivorans
MTENRFWRLDRHPEGSDFASALSLQTETLPALGEGEVRVRVGWLSMDAGTRMWMSPRTDGYQPPLPLGSKMAGLVLGRVSESRDPAFPAGTLVRGFGQWADYATVVPALSGLEAVDDGIADIRQHFGALGMNAWTAFVGVREVAAISPGEWLVVSAAAGATGSMACQVGRNLGAKVVGIAGGAEKCRYLVEELGVDIAIDYKNEDVAARLAEVPGGVNAYFDNVGGPMLDAVLPNMAHYGRVAVCGMVAAYDNDAPLPGPARFDQVLMRRLRIEGFFIPDFLHRGAEFMPILREWVDAGKLTVRLNETVGLENVLEGYERMLSGKAIGKVIVKVGD

SEQ ID NO: 6780 - protein, 406 aa, Mycobacterium leprae
MNNPIEGHAGGRLRVLVLGSTGSIGTQALEVIAANPDRFEVVGLAAGGAQLDTLLRQRAATGVTNIAIADDRAAQLAGDIPYHGTDAVTRLVEETEADVVLNALVGALGLRPTLAALHTGARLALANKESLVAGGSLVLAAAQPGQIVPVDSEHSALAQCLRGGTPDEVAKLVLTASGGPFRGWNAGDLERVTPEQAGVHPTWSMGTMNTLNSASLVNKGLELIEANLLFGIPYDRIEVVVHPQSIVHSMVTFIDGSTIAQASPPDMKLPISLALGWPQRVGGAARACAFTTASTWEFEPLDIDVFPAVELARHAGQIGGCMTAIYDAANEEAAEAFLQGRIGFPAIVATIADVLQRADQWAPQWGEGPATVDDVLDAQRWARERALCAVATASSGKVSDMVLERS

SEQ ID NO: 6781 - protein, 394 aa, Zea mays subsp. mays
LGAERRARLPPGEMGWPLVGGMWAFLRAFKSGKPDAFIASFVRRFGRTGVYRSFMFSSPTVLVTTAEGYKQVLMDDDAFVTGWPKATVALVGPRSFVAMPHDERRRIRKLTAAPINGFDALTGYLPFIDSTVTSSLRAWADHGGSVEFLTELRRMTFKIIVQIFLGGADQATTRALERSYTELNYGMRAMAINLPGFAYRGALRARRRLVAVLQDVLDERRAARAKGVSGGGVDMMDRLIEAQDERGRHLDDDEIIDVLVMYLNAGHESSGHITMWATVFLQENPDMFARAKAEQEAIMRSIPSSQQGLTLRDFRKMEYLSQVIDETLRLVNISFVSFRQATRDVFVNGYLIPKGWKVQLWYRSVHMDPHVYPDPTKFDPSRWEGHSPRAGTFL

SEQ ID NO: 6782 - protein, 269 aa, Azoarcus evansii
MTTTLGRNRENAAPLAGRHALVTGAGSGIGRACAIELARLGATLTLVGRRAALLESACAELPGDGHGFAAADITDFAALRAAFDAATAARGPVAILVNNAGAAKSAPFGRTEPELWNEMLAVNLTGTYNCTHAVLAGMQAAGWGRIVNIASTAGLAGYAYVAAYCAAKHGVVGLTRALALEVAKQGITVNAVCPGYTDTPLIEGAVDNIVAKTGRSTDDAKAALAARNPQGRLVQPEDVAGTVGWLCLPSSDAIHGQSIAVAGGEVMCG

SEQ ID NO: 6783 - protein, 164 aa, Triticum aestivum
  unsure (1)..(164): unsure at all Xaa locations
MAIPNAFDSPLAARSAVGAALAAVIAVRAVRRRSLDASGGVAGFVVMAVHISCGYRYGALLLAFFFSSSKVTKIGEDHKRRIEENFKEGGQRNWXILANSTIATVLXVVIFALNDWEGKIKCMDSNGSKLITGIISGIIGTTLLQWNTCHLNRVLIMNNQGYNP

SEQ ID NO: 6784 - protein, 219 aa, Cichorium intybus x Cichorium endivia
MAGSEVVLLDTWVSLFGMRVRIALAEKDVHYERREEDLTNKSSLLLQMNPVHKKVPVLIHDGKPICESNIIVQYIDEAWQNNSPPLLPSDPYLKAQARFWADFIDKKIYDAGTRIWRRKGEEQEIAKKEFIDWMKVLEGQLGENSYLMGKSFGYVDIAMVPFYCWFYALEKIGNISIEKECPKLVAWAKRCMERESVSKTLPDPHKVYEYALELMKKLG

SEQ ID NO: 6785 - protein, 156 aa, Zea mays
RFWFVGEREEMAASDVEYRCFVGGLAWATDDHSLNNAFSTYGEVLESKIILDRETQRSRGFGFVTFSTEDAMRSAIEGMNGKELDGRNITVNEAQSRGGRGGGGGGYGGGRRDGGGYGGGGGGYGGGRGGYGGGGGGYGGGNRGGGYGNNDGNWRN

SEQ ID NO: 6786 - protein, 295 aa, Pseudomonas fluorescens PfO-1
MGNLTKADLTPLRDSRPVADDSASPAPTRLIPTRSKTLENIMTDFKNSTPNEVAGKVALVTGAASGIGKAIALLLHARGAQVIAEDINPEVEALARPGLVPLVADITQDGAAERAVALAVEQFGRLDILVNNAGIIINKLVIDMTREDWERIQAVNATAAFLHSREAVKAMMPNKSGSIVNIASYASYFAFPTIAAYTASKGALAQLTRTLALEVIGHGIRVNAVGVGDVVTNILNNVVDDGPAFLAQHGEAAPIGRAAQPEEIAEVVAFIASDRASFMVGSVVMADGGMTVTAG

SEQ ID NO: 6787 - protein, 256 aa, Triticum aestivum
  unsure (1)..(256): unsure at all Xaa locations
MASNYTVRKVAAPNTLEHRVYVEKDGQPVSPFHDIPLYANQEQTILNMVVEIPRWTNAKLEISKEELLNPIKQDIKKGKLRYVRNCFPHKGYLWNYGAFPQTWEDPNTVHPETKAKGDNDPLDVCEIGELVGYPGQIKQVKVLGVMALLDEEETDWKVIVIDVNDPLASKLNDVEDVERHLPGLLRATNEWFRIYKIPDGKPENQFAFTGECKNKDYALDVVRECAEAWERLVTGKTPXGGVSTTNVTVQHSPTRV

SEQ ID NO: 6788 - protein, 394 aa, Eremitis sp. nov. Doell
EPARTEDPALSIAGSVQSQKLAVRAISRLQALPGGDVKLLCDTVVENIRELTGYDRVMGYRFHDDEHGEVVAESRRADLEPYLGLHYPATDIPQASRFLFRQNRVRMIADCHTAPVRVIQDPVLPQPLCLVGSTLRAPHGCHAQYMANMGSIASLVMAVIISSGGDDSHNSSRGGIPSAMKLWGLVVCHHTSPRCIPFPLRYACEFLMQAFGLQLNMELQLAHQLSEKHILRTQTLLCDMLLRDSPTGIVTQSPSIMDLVKCDGAALYYHGKYYPLGVTPTEAQIKDIIEWLTLCHGDSTGLSTDSLADAGYPGAAALGDAVCGMAVAYITPSDYLFWFRSHTAKEIKWGGAKHHPEDKDDGQRMHPRSSFKAFLEVVKSRSLPWESAEMDAIH

SEQ ID NO: 6789 - protein, 33 aa, Zea mays
DLDDMNIEIMRNTLYKAYLEDFYKFCQKLGGAT

SEQ ID NO: 6790 - protein, 342 aa, Oceanobacillus iheyensis HTE831
MKAVFVEDAEKIIVKDIEVPELKPNEVQIKVNVAGICGSDIHTYKGLHPFRKPPVVIGHEVAGEVVEVGSSVTKFKVGDRVTVEPQIGTGESEGVMTGNVNYSDTRLAPGMGDWLGTMAEYFASPEEQVIKLPDSVSYDQGVLVEPLAVGVHAAFKGDVQPTDRVAILGAGPIGLLTLIAVKAKGVKDIVVTDVLDYSLQVAKEMGASEVINIKDNSNWIHDAKQSLDKGSFDKVFITAGVPGIVNDSLNLLRKGGRVVTVAMFHGQQSVDIEQLQQNEKEIIGCMTYNRPDTEEALEIIASGKLDVEKVISHKLHYEEAAKGFTIVDKKKDKSVKVLVSFE

SEQ ID NO: 6791 - protein, 354 aa, Streptococcus mutans UA159
MQVSASSFLFCSVVYGLGILIMAILVLGGAGYIGSHMVDRLIEKGEEEVVVVDSLVTGHRAAVHPAAKFYQGDLADREFMSMVFRENPDVDAVIHFAAYSLVAESMKKPLKYFDNNTAGMIKLLEVMSEFGVKYIVFSSTAATYGIPDEIPIKETTPQRPINPYGESKLMMETIMKWSDRAYGIKFVPLRYFNVAGAKPDGSIGEDHSPETHLLPIILQVAQGVREKIMIFGDDYNTPDGTNVRDYVHPFDLADAHLLALNYLRQGNPSTAFNLGSSTGFSNLQILEAARKVTGQKIPAEKAARRSGDPDTLIASSEKAREVLGWKPQFDDIEKIIASAWAWHSSYPKGYDDRD

SEQ ID NO: 6792 - protein, 295 aa, Chryseobacterium meningosepticum
TTNKPIVLSTWNFGLHANVEAWKVLSKGGKALDAVEKGVRLVEDDPTERSVGYGGRPDRDGRVTLDACIMDENYNIGSVACMEHIKNPISVARAVMEKTPHVMLVGDGALEFALSQGFKKENLLTAESEKEWKEWLKTSQYKPIVNIENHDCIGMIALDAQGNLSGACTTSGMAYKMHGRVGDSPIIGAGLFVDNEIGAATATGHGEEVIRTVGTHLVVELMNQGRTPQQACKEAVERIVKIVNRRGKNLKDIQVGFIALNKKGEYGAYCIQDGFNFAVHDQKGNRLETPGFALK

SEQ ID NO: 6793 - protein, 263 aa, Zea mays
MLELRLVQGSLLKKVLEAIRELVNDANFDCSGTGFSLQAMDSSHVALVALLLRAEGFEHYRCDRNLSMGMNLNNMAKMLRCAGNDDIITIKADDGSDTVTFMFESPKQDKIADFEMKLMDIDSEHLGIPDSEYQAIVRMPSSEFMRICKDLSSIGDTVVISVTKEGVKFSTSGEIGSANIVCRQNQTIDKPEEATIIEMQEPVSLTFALRYMNSFTKASSLSEQVTISLSSELPVVVEYKIAEMGYIRFYLAPKIEDDEEMKP

SEQ ID NO: 6794 - protein, 394 aa, Pseudomonas syringae
MLKMSGLSASEARGDGAWVEDTQGGRWLDFGSFGVHLLGHSHSGVVSALVEQIQRFGLSDENLSNEPIVLAAERLLVMAGPEKDKVIFGNTGSEVVEAALKLARIVTGRRRVIAFEQAYHGRTAAALSVSHGYMRHAGLLTEGDVVFCPIDDLDAVANALEAGDIAAIIIEPIQGEGGIRPVENEFLRGLGDLAQAFDCRLIFDEIQTGLGRIGSLRVDVPCDILLLGKVLGGGVFPISAALFTSKRFDAAARDPVVHASSFAGSALAGAVVNAVLDVVSAPDFTLRVQRLGDRVLSYLGQRLADNPLITDIRGQGLMIGVEFKRLDHVGEMIIEAAKRDLLLAFCLTDPKVLRLYPPAVISDADLETGLEHFCQSVEAITRTEFDKEIPLCQQ

SEQ ID NO: 6795 - protein, 518 aa, Agrobacterium tumefaciens str. C58 (Cereon)
MADWLVFFLSGEKGMDSSSSGVSYKKADASYFEKRGLSRYAGVWSLWALGVGAVISGHFSGWNFGFSTGGWGGMLVAGIIIAIMYLGLTFSIAEMSPALPHTGAAYSFARTAMGPWGGFVTGLCENVEYVLTPAVVVTFITAYVNSILGLDPAYSPFVWIVFYAIFLALNVFGLELSFKVTLVITLISLAVLVFFWISAIPNIDFSRFALNIGVGPDGKAVELPEGGGSFFPFGFSGVLATLPFAVWLFLAIEQLPLAAEESVDPKRDMPKGIILGMVTLMVSAFMIVLLNPSLPGVGAFHLSSSLEPLLDGFKAIYGDGGVVLLGLVALTGLIASFHTILYAQGRQIYSLSRAGYFPTVLSITHSKYRTPYVANITGAIVGLAVMLVIWFSLGAEQGGSIIGSVLLNMAVFGAMFSYIMQAISFILLRKNLPNIERPFRSPFGIPGALLTIIIAIVTLLYQIQDPNFTKGVLWVAVWFAVAIAYFAFVGRHRLILSPEEEFALEHKQAAVAAAAAKA

SEQ ID NO: 6796 - protein, 384 aa, Clostridium tetani E88
MKNICILGATGSIGTQTLEVIREEKENLKLYAASANKSSEKIISIIEEFEPKYVSMTDKEAFLKVKEFCMKNNKNTEVLYGIEGMNTIASLDKVDIVLTSVVGMIGLEPTLKAIRNKKDIALANKETLVVAGEIIKKEAHENKVNILPVDSEHGAIFQCLLGNLKGDINKIHLTASGGPFRGKKREELENVTVEQALKHPNWNMGKKISIDSATLMNKGLEVIEAHFLFDVDYEDIEVVVHPESIIHSMVEYKDGSVIAQLASPDMKLPIQYALNYPIRKDRVIEKLNLFEIEKLTFYKPDLKTFKCLDLAYRAGKIGGMMPTILNSSNEYAVELFLNKKIGFLEIPKIIEECMKKFYTKEEQSVEKIIHMDKIIGEYIREKYN

SEQ ID NO: 6797 - protein, 265 aa, Ralstonia metallidurans
MPAAGWRRSWRRGGCGRARTEHSEMPALSGLHLAPSVASFLCLAWTVALYFAVKPLYQRLPRIWLSPAIVVPALTIPLLLITGIPYAEYVADTRWMVWLLGPATIAFAVPIYEHREIVRRHWIALALGVIAGMLVAMLSARLLAEAFHFSSEVSSSLMARSVSTPFAVAVVAHTGGSAELVSLFTVMTGLAGMIVGDTVLGLLRLRSPVAQGASLGTAAHGFGTARARQRHAEEGVVASLTMVLAGVLMVIAGPTLTGWVTALVG

SEQ ID NO: 6798 - protein, 512 aa, Glomerella cingulata
MKRKNVKGLALTPAAPKPPPTAETSRHGYDPRDKDGGEQSAQLEIGIEYKLDLRPEDLEILKELGSGNGGTVSKVKHVLTGTVMARKVIHVEAKKEMRKRIVRELQIMHGCSSEYIVNFYGAFLNPHNDVIMCMEYMDVGSLDRVSKVFGPVRVDVLGKIAVATLGGLTYLYSKHHIMHRDIKPSNILVNSRGSIKLCDFGVSGELINSVADTFVGTSTYMAPERIQGEKYTVKSDVWSFGLSIMELAIGKFPFNASEQLSDGECAPAAFGSVTADCTEPGPKLPKSDAFPSILEDMIQKCLFKNPDERPTPQELFDRDPFVQAAKRTPVDLREWAVGLMERDNRKSHLAPQLSPATRDLLNSSDSPTYQGGSTNDRSLDTPTSGEIPIAGAGIISPREPATHSNRSPTRNGINAISSRQQAAGHPGMGQRIVTTNSIPKVGEYPNSAGPVSANAASFSLPVRPAPGGPLPPAPPRKGTPDETRRENRRQATFGMPPAPRSYASDVYNGTSN

SEQ ID NO: 6799 - protein, 177 aa, Brassica oleracea
ENMGTRVIEPLIVGRVVGDVLDNFTPTIKMNVSYNKKQVSNGHELFPLAVSSKPRVETHDGDLRSFFTQVMTDPDVPNPSDPFLKERLHRLVMNIPGTTDATLGKEVVSYELPKPNIGIHRYVFVLFRQKQRRVKFPSNIISRDQFNTREFAIENDLGLPVAAVFFNAQRETASRRR

SEQ ID NO: 6800 - protein, 112 aa, Zea mays
QVFGESKITEYTVQENPMGPGKTEVVIQNKQHYKVLGKPVDLTSLIRLQLQDGKVVKHEDWWHGKPLKNRDTVGVPLVGRLAEASRRGAMLLTHALMGFGKDPTQPPPPPTH

SEQ ID NO: 6801 - protein, 354 aa, Bacillus subtilis subsp. subtilis str. 168
MTMKQFEIAAIPGDGVGKEVVAAAEKVLHTAAEVHGGLSFSFTAFPWSCDYYLEHGKMMPEDGIHTLTQFEAVFLGAVGNPKLVPDHISLWGLLLKIRRELELSINMRPAKQMAGITSPLLHPNDFDFVVIRENSEGEYSEVGGRIHRGDDEIAIQNAVFTRKATERVMRFAFELAKKRRSHVTSATKSNGIYHAMPFWDEVFQQTAADYSGIETSSQHIDALAAFFVTRPETFDVIVASKLFGDILTDISSSLMESIGIAPPANINPSGKYPSMFEPVHGSAPDIAGQGLANPIGQIWTAKLMLDHFGEEELGAKILDVMEQVTADGIKTRDIGGQSTTAEVTDEICSRLRKL

SEQ ID NO: 6802 - protein, 133 aa, Glycine max
MQLVFAPKQFDVIVTDNLFGDILSDQASMLTGSIGMLPSASLDANNKGMYEPCHGSAPDIAGQGIANPLATILSVSMMLRYSFNLFFSADAIEKAVSLVLDQGLRTDNIWSQGCTKVGTQEMGDAVVAALRNL

SEQ ID NO: 6803 - protein, 95 aa, Fagopyrum statice
GRLYEYANHSVKATIDRYKKACSDSAGVTSVAEANAQYYQQEAAKLRSQIRTLQNNSRNLSRHMMGEGLSSLSMKDLKNLETRLEKGISRIRAKK

SEQ ID NO: 6804 - protein, 138 aa, Nicotiana tabacum
AFFLVLDDIMDGSHTRRGQPCWFRLPKVGMIAANDGILLRNHIPRILKNHFRGKPYYVDLLELFNEVEFQTASGQMIDLITTLVGEKDLSKYLLPIHRRIVQYKTAYYSFYLPVACALLMAGESLDNHVNVRTYLLKW

SEQ ID NO: 6805 - protein, 343 aa, Zea mays
AAAAAAPPPAAKEKEKDAEEAPATGDMVSAGFAELERQQQLLATCTRLYQQLSDHFGSLERGLAARSDALRVRRRAFDARTHRALDSLHRREASIDASVSRALDHLHSISASAAAAASSKAPATSDSDSEGLAESLRALCARMDSAAFLGFVVARRKEADALRAEMPPALKLCVDPAKFVMDAVADVFPVDRREVRNPADLAWACVLILEAAVPALADTDPDIGPARPLVPRAARDRARGMARDWKEAAEKKGGVEGAKPPDAHAFLQLVATFAVAEREDRPLYRRIVVSFSWRRQMPRLALTLGLEEQMAGICASFMFCCCLHFHFVLQFFSLGTTIDSSLR

SEQ ID NO: 6806 - protein, 376 aa, Chrysopogon fulvus
ALSMAGAVQSQKLAVRAISRLQALPGGDVKLLCDTVVEHVRELTGYDRVMVYRFHEDEHGEVVAESRRDNLEPYLGLHYPSTDIPQASRFLFRQNRVRMIADCHATPVRVIQDPGLSQPLCLVGSTLRAPHGCHAQYMANMGSIASLVMAVIISSGGDDEQTGRGGISSAMKLWGLVVCHHTSPRCIPFPLRYACEFLMQAFGLQLNMELQLAHQLSEKHILRTQTLLCDMLLRDSPTGIVTQSPSIMDLVKCDGAALYYHGKYYPLGVTPTESQIKDIIEWLTVCHGDSTGLSTDSLADAGYLGAAALGDAVCGMAVAYITPSDYLFWFRSHTAKEIKWGGAKHHPEDKDDGQRMHPRSSFKAFLEVVKSRSLPW

SEQ ID NO: 6807 - protein, 409 aa, Zea mays
  unsure (1)..(409): unsure at all Xaa locations
MRSMESTDSSSGELPPQKQPSSAPDLPPGFRFHPTDEELVVHYLKKKAASVPLPVAIIAEVDLYKFDPWELPDKATFGEQEWYFFSPRDRKYPNGARPNRAATSGYWKATGTDKPIMASGGNREKVGVKKALVFYRGKPPKGLKTNWIMHEYRLADAASSTTSRPPPPCNAGGKATSLRLDDWVLCRIYKKIDKLGVGDPPRIMECGEDSVENAVAAYPTHAAAAAMGXSQSQAEGGAYHTGNYTSLIHHHHEDSFLVDGLLTAEDAGGSSLSQLAAAARAAAPTDTTKQLLVPSSTTPFNWLDASALTILPPAKRFHGYNRDTTDGGGTSLPSPSERNNLQAAVGAVDSGASGGTSAVIPSFLNPLGVQGATTYHHHAIFGTPVTPEAAAAAACSFQHPYQLSGVNWN

SEQ ID NO: 6808 - protein, 346 aa, Thermus thermophilus
MKVAVLPGDGIGPEVTEAALKVLRALDEAEGLGLAYEVFPFGGAAIDAFGEPFPEPTRKGVEEAEAVLLGSVGGPKWDGLPRKIRPETGLLSLRKSQDLFANLRPAKVFPGLERLSPLKEEIARGVDVLIVRELTGGIYFGEPRGMSEAEAWNTERYSKPEVERVARVAFELARKRRKHVVSVDKANVLEVGEFWRKTVEEVGRGYPDVALEHQYVDAMAMHLVRSPARFDVVVTGNIFGDILSDLASVLPGSLGLLPSASLGRGTPVFEPVHGSAPDIAGKGIANPTAAILSAAMMLEHAFGLVELARKVEDAVAKALLETPPPDLGGSAGTEAFTATVTATVGI

SEQ ID NO: 6809 - protein, 523 aa, Glycyrrhiza echinata
MEPQLVAVSVLVSALICYFFFRPYFHRYGKNLPPSPFFRLPIIGHMHMLGPLLHQSFHNLSHRYGPLFSLNFGSVLCVVASTPHFAKQLLQTNELAFNCRIESTAVKKLTYESSLAFAPYGDYWRFIKKLSMNELLGSRSINNFQHLRAQETHQLLRLLSNRARAFEAVNITEELLKLTNNVISIMMVGEAEEARDVVRDVTEIFGEFNVSDFIWLFKKMDLQGFGKRIEDLFQRFDTLVERIISKREQTRKDRRRNGKKGEQESGDGIRDFLDILLDCTEDENSEIKIQRVHIKALIMDFFTAGTDTTAISTEWALVELVKKPSVLQKVREEIDNVVGKDRLVEESDCPNLPYLQAILKETFRLHPPVPMVTRRCVAECTVENYVIPEDSLLFVNVWSIGRNPKFWDNPLEFCPERFLKLEGDSSGVVDVRGSHFQLLPFGSGRRMCPGVSLAMQEVPALLGAIIQCFDFQVVGPKGEILKGDDIVINVDERPGLTAPRAHNLVCVPVERRSGGGPLKIIEC

SEQ ID NO: 6810 - protein, 228 aa, Glycine max; identical to SEQ ID NO: 2956

SEQ ID NO: 6811 - protein, 482 aa, Glycine max
MTGSLAARLVLRRCRSPASQFFFRREASWPATERTTKDVVTSPPKELPAFDYSPPAYSGPSRDEIIAKRREYLSPSIFHNYKSPLNVVEGKRQYLFDDKGRRYLDAFGGIATVCCGHCHPDVVEAIVEQTKRLQHSTVLYLNHAITDFAEALAAKLPGNLKVAFFTNSGTEANELAILIAKLYTGSHDIISLRNSYHGNGGGTMGTTAQSIWKYNVVQSGVHHAVNPDPYRGLFGSDGEKYVRDVQEIINFGTSGNVAAFISEAIQGVGGIVELAPGYLPAAYDIVRKAGGLCIADEVQTGIARTGSHFWGFEAHGVVPDIVTIAKSIGNGIPLGAVVTTPEIAKALTRRSYFNTFGGNPVCTAAGLAVLRVIEKEKLQENAFVVGSYLKERLNALKDKYELIGDVRGRGMMLGVELVSDGKLKTPAQSETLHVMDQMKELGVLIGKGGYYGNVFRITPPLCFTKEDADFLVDAMDYTFSRM

SEQ ID NO: 6812 - protein, 434 aa, Mycobacterium tuberculosis H37Rv
MIAIGGVIGAGLFVGSGVVIRATGPAAFLTYALCGALIVLVMRMLGEMAAANPSTGAFADYAAKALGGWAGFSVGWLYWYFWVIVVGFEAVAGGKVLTYWIDAPLWLASLCLMMMMTATNLVSVSSFGEFEFWFAGVKVATIVGFLVLGTAFAFGLLPGHGMDFSNLSAHGGFFPDGVGAVFAAIVVAIFSMTGTEVVTIAAAEAPDPQRAVQRAMSTVVARIVIFFVGSVFLLTVILPWNSLELGASPYVAALRHMGIGGADQIMNAVVLTAVLSCLNSGLYTASRMLFVLAARQEAPAQLVKVNRRGVPTFAIMGSSVVGFLCVIMAWVSPATVFVFLLNSSGAVILFVYLLIALSQIVLRRQTSGQNLGVRMWLFPGLSIVTVTGIVAVLARMAFDYAARSQLWLSLLSWAVVVGCYLVTTLVRRPLNRPW

SEQ ID NO: 6813 - protein, 491 aa, Zea mays
  unsure (1)..(491): unsure at all Xaa locations
MSTASGDGTDAGGDEASSAAAAASAPAGRRIPPASSMPWVRNLRRFVGMGAGLGSEALMELETKRILLEIFKERQRKSAEAGSIPSFYKKKPEEGSISSRVQRLAKYRFLKKQSEMLLNADDLDAMWVCLRENCVIDDATGAEKMNYEDFCHIATVCTEQIGQKCKRFFSPSNFMKFEKDDSGRIAILPFYLYVMRTVSLTQARIDMSELDEDSDGFLQPHEMEAYIRGLIPNLAQLRDMPTAFVQMFCRIAARKFFFFCDPHKRGKACIXKKVLLSNCLQELMELHQESEEEVTDVEQAENWFSLTSAQRICDMFLALDKDTNGTLSKQELKEYADGTLTEIFIERVFDEHVRRSKVGGGNSREMDFESFLDFVLALENKDTPEGLTYLFRCLDLNGRGFLTTADIHTLFRDVHQKWIEGGNYELCIEDVRDEIWDMVKPADPLRISLSDLLSCKQGGTIASMLVDVRGFWAHDNRENLLQEEEEQVEET

SEQ ID NO: 6814 - protein, 467 aa, Glycine max
  unsure (1)..(467): unsure at all Xaa locations
VLWVDVFLICSNAMQYNSSDTIYHRQARAMQEIARKDFENLRQDSDDDSEPQPKIVQKGRPPGKHSRKSLGLGMPPSERVGPESSSDATLASGADIGSGSNGYNLGSGPSKFQPTDSSARAYFLHXNSGGYTGCSDWENEFPASVVKAVLRYGKKQFAVDETRRDTYKNPVTLGNERPMLSTVEDEFKQLLAVGVHMKHSYARSLAHFAANLGPVVWKIAASKIRGVLPAGHEFGPGWVSEDDGSSQRQHFPVRDEGRTSDHPVPEDYRSRFSSPSGSLPLANRPVYQSGDMAIDNYQNELNPVINIPGGSESITPMRIQQESMVHSDDFGSRDRLGSNFPSQMKMVRLADLTGTSSAGVVPQMFDMDPISNRIVHTNVDSSFKGQHLSKLSQLDSGNLLSREPGFEPQSWPQGLAGKSSWQGLEVPTKQNSFALANDLNGRIGTTNSPSSNVEAGSQLQPNLALQL

SEQ ID NO: 6815 - protein, 312 aa, Arabidopsis lyrata
YLSGMDILLTVDPVNIHYILSSNFANYPKGMEFKKIFEVVGDSIFNVDSGLWEDMRNSSHAIFSHQDFQRFWVSTSVNKLRQGLVPIIENAADKNILVDLQDLFQRFLFDTSLILMTGYDPKCLSIEMPKVEFGDAVDGVSDGVFYRHVKPVFLWRLQYWIGVGVEKRLKRGLAVFDQLLEKIITAKREEIKSLGTQHHSRGEAIDVLTYYMTMDTTEYKYLKPSDDKFIKDTILGFLIAARDTTSSALTWFFWLLSKNPEAMNKIRQEVNKKMPRFDPADLDKLVYLHGAVCETLRLYPPVPFNHKSPAKP

SEQ ID NO: 6816 - protein, 282 aa, Lactococcus lactis subsp. lactis
MVIQWFPGHMSKARRQVQENLKYVDFVIELVDARLPISSRNPMLGQIIGDKPRIIALNKADLADSNAVAQWIEFFDEQGFVTLAINSKEEYTAKRLTVAAKKLMADKVAHDKERGIAHTTLRTMIIGIPNAGKSTLMNRLAGKKVAVTGNRPGVTKGQQWIRTNKELELLDTPGILWPKFEDQLVGLKLALTGAIKDDLLPMDEVTIFGLNYFLKNYRTVTMKRYRMTEEDLELEIPDLIMELTARFGFRDDYDRFYNMFVKDVRDGKLGLFCLDEVGVDGL

SEQ ID NO: 6817 - protein, 306 aa, Lactobacillus plantarum WCFS1
MKTINLGHSNIQASSVALGIMRMDALDVAQATKVIDTAADLGINYVDSADIYGGGQSSTIFGQALKQAHVSRDQLYIQSKGGIVPGKRYDFSKQHILAAVDGELQRLGVDYLDTFLLHRPDALMEPEEVAAAFDKLQTSGKVRHFGVSNFNPMQVDMLQAALNQRLIINQLQFGIMHTGAIDFGLHTNMQDERSLNHDGEMIEYSRLHKMTIQAWSPYQYGNFAGIFLDNPKFPELNNAMQALADEKQVTKSAIATAWILRHPAHFQVVLGTMNPEHLAQNAAGADVTLSRQEWYDIYFAAGNDLP

SEQ ID NO: 6818 - protein, 411 aa, Burkholderia fungorum
MNDLTVTRQTFDEVMVPVFSPAAFVPDRGLGSRVWDTQGRDYIDFAGGIAVTALGHGHPELLKVLHEQGAKLWHIGNGYTNEPVLRLAKRLEELTFADRAFFANSGAEANEAALKLARRVAFERHGADKFEIVSFTQSFHGRTFFTVSVGGQPKYSEGFGPVPAGITHLPYNDIEAAKKAIGAQTCAVIVEPVQGEGGVIPADPAFLAALREACDQHGALLIFDEVQTGVGRSGYFYAYQETGVTPDILTTAKALGNGFPIGAMLTTNELAAYFKVGVHGTTYGGNPLGAAIAEKVVELISDPKLLEGVRSLSEALKGHLAKLNDRFGLFTEVRGRGLLIGAELTDAFKGRAKDFVTAAGQHGVIMLMAGPDVLRFVPSLIMPLDDMNEGFARLASAIEGIVGAKAEAASH

SEQ ID NO: 6819 - protein, 152 aa, Triticum aestivum
MVKAVAVLTGSEGVKGTIFFTQEGDGPTTVTGSVTGLKEGLHGFHVHALGDTTNGCMSTGPHFNPAGHVHGAPEDEIRHAGDLGNVTAGADGVANINVTDCHIPLTGPNSIVGRAVVVHGDADDLGKGGHELSKSTGNAGARVACGIIGLQG

SEQ ID NO: 6820 - protein, 78 aa, Glycine max
MDLSDLNSADLQKFYSEEQQRAMVNEMVAKLTSECWDKCITGTPGNKFSSSESNCLSNCAQRYLEMSMLIMKRFQGMQ

SEQ ID NO: 6821 - protein, 367 aa, Pseudomonas syringae pv. syringae B728a
MHKIEDVMSKQILILPGDGIGPEIMTEAVKVLELANEKYQLGFELTHDVIGGAAIDKHGVPLADETLERARAADAVLLGAVGGPKWDTIERDIRPERGLLKIRSQLGLFGNLRPAILYPQLADASSLKPEIVAGLDIMIVRELTGGIYFGAPRGTRVLDNGERQAYDTLPYSESEIRRIAKVGFDMAMVRGKKLCSVDKANVLASSQLWREIVEQVARDYPEVELSHMYVDNAAMQLVRAPKQFDVIVTDNLFGDILSDQASMLTGSIGMLPSASLDTANKGMYEPCHGSAPDIAGKGIANPLATILSVSMMLRYSFNLTDAADAIEKAVSLVLDQGIRTGDIWSEGKVKVGTQEMGDAVVAALRNL

SEQ ID NO: 6822 - protein, 308 aa, Glycine max
MEGRRRGGYSGRRIVASRRGSGKSNANNNNNNNNKNNNNINVIKKLQSREIWSKPHRAFASVTASHRFRSMCLTHQYDTHDPSKTPSSLWPFLMKRTKVVEIVAAKNVVFALYHSGLCAAFSRETDERICFLNVCPDEIIRSLFYNKNNDSLITVSVYASENFSSLKCRSTKIEYLRRGKPDAGFPLFQSESLKWPGFVEFDDVNGKVLTYSAQDCIYKVFDLKNYTMLYSILDRNVQEIKISPGIMLLIYNRTSGHIPLKIISIEDGTVLKVFNHLLHRNKKVDFIEQFNEKLIVENDRFLIIFFYV

SEQ ID NO: 6823 - protein, 99 aa, Zea mays
TASKVKQDMPPPGGYGPIDYKRNLPRRGLSGYSMLAIGIGTLIYGHWSIMKWNRERRRLQIEDFEARIALLPLLQAETDRRTLQMLREDLEEEAIIMKD

SEQ ID NO: 6824 - protein, 367 aa, Glycine max
MATSENNSSARPQREAKKRAAAAISQIHGNAAKKKRVVLGDVTNVSSSDVAVSVSKKPVQTHKNVKLEKPAAPVATPEKVEERHDPQLCGPYVSDIYEYLRGMEVDPSKRPLMDYVQKIQRDVNANMRGVLVDWLVEVAEEYKLVSDTLYFSVAYIDRFLSLNILSRQRLQLLGVASMLIASKYEEIKPPEVEDFCYITDNTYSKEEVVNMEAEILKALKFELGGPTVKTFLRRFSRVGQEGVDTSDLQFEFLSCYLAELSLLDYNCIKFLPSLVAASVVFLARFMFSTKTHPWNSALHQLTRYKPADLKECVLNLHDLYLSRRGASLQAVREKYKQHKFKCVATTPSPPEIPLSFFEFEGQILRQL

SEQ ID NO: 6825 - protein, 480 aa, Zea mays
  unsure (1)..(480): unsure at all Xaa locations
MALQTLNPYRHAAAVSPVPSPVPHRGHPPPHAVLHLPPRRRLAGGAARPLAVAAAVSGAVNEARRRGVPQEGGEDGRKDTDLATLGNLCVDVVLSVPQLPPAQQEERKAYMERLAASPPDQKFWEAGGNCNLAFAAARLGLNCSTLGHVLLPKWLKFLCQCSKQWGISVVGMLENTKSXLKETPHETLLCWVLVDTNGLHGLVGDVPITGVVSELWPRKLPVDIRTAIHHSKILFCNGYAFDEFFPDVIASSIDCAICSGTAVFFDPGPRGKSLLHGTLGEQRALEHALRLSDVLLLTSDEAESLTNIRNPVQAGQELLKRGIRTKQVVIKMGSRGSIMITKNTISCAPAFKIDVVDTVGCGDSFTAAIAFGFLHDLPAVNTLTLANAVGAATATGCGAGRNVARLDKVLQLVREADLNEDITLWTELTEGNSLRIEVSILSGIARNGFSENIVAVPVTKVVSELLPMFEAVPVRSAVQA

SEQ ID NO: 6826 - protein, 438 aa, Capsicum annuum
MASWVLSECGVRPLPRIYPKPRPGLASSTATTNINMRISPTRTDLVSRNCWALRVSAPLRIQTVGEEERDIKDRQYDEYFDPGAPPPFKLSDIRAAIPKHCWVKNPWRSMSYVVRDVAIVLGLAAAAAYLNNWVVWPLYWFAQSTMFWALFVLGHDCGHGSFSNNHKLNSVAGHILHSSILVPYHGWRISHRTHHQNHGHVENDESWHPLSEKVYNSLDYATKKLRFTLPFPLLAYPFYLWGRSPGKKGSHFDSNSDLFVPSEKKDVITSTLCWTAMAAFLVGLSFVMGPIQLLKLYVIPYWGFVMWLDIVTYLHHHGHDDKLPWYRGEEWSYLRGGLTTLDRDYGWINNIHHDIGTHVIHHLFPQIPHYHLVEATEAAKPVLGKYYKEPKKSGPLPFYLLGYLIKSMEEDHYVSDTGNVVYYQLILTFWMSEIEFLV

SEQ ID NO: 6827 - protein, 350 aa, Listeria monocytogenes EGD-e
MTYKITSLAGDGIGPEIMTSGLQVLEAVAKKYNHTFEIESHPFGGAGIDVAQDPIPSSTLKACQDADAILLGAIGGPKWDNAPKRPEDGLLALRKALGLFANIRPIQVPSSITHLSPLKKEIVENTDFVVVRELTGGLYFGEPKHWDESAAVDSLTYTRAEIERIIEKAFEIAATRNKKVTSVDKANVLASSKLWRKIAEEVASRHPDITLEHLYIDAAAMLMIQRPTTFDVIVTENLFGDILSDEASVITGSLGMLPSASHAENGPSLYEPIHGSAPDIANQNIANPMSMISSVSMMLRQSFSLFKEADAIDAAATRTMQAGFLTADLGGNTTTTDFTNEVLKQIEGGE

SEQ ID NO: 6828 - protein, 199 aa, Leavenworthia stylosa
SVGEGVTDLEPGDHVLPIFTGECGHCPHCHSEESNMCELLRINTERGGMILDGESRFSINGKPIHHFLGTSTFSEYTVVHSGQVVKINPKAPLDKVCIVSCGLTTGLGATLNVAKPKKGQSVAVFGLGAVGLGAAEGARIAGASRIIGVDLNSKRFEEAKKFGVTEFVNPKEHNKPVQQVIAEMTNGGVDRSVECTGSV

SEQ ID NO: 6829 - protein, 404 aa, Methanosarcina barkeri
MSYMSSKTTFEIEDKCLPPFFVKQKISIEKGDGVYVWDEEGKMYIDFTAGWGVTCIGHANPVITEALIDQGKKIIQNPNSGLTYSPARARLLSLLAEILPLNLTRVFFTNSGAEANDAAIKLARKVTGRPDIISTDQSFHGRTISTTSATGQAKHRDRYSPLMPNYRFVPYDDLEAMENSLDENVAAVILEPIQGEGGVCIPSEGYLKEVSNLCKKNGSLLIVDEIQTGFFRTGPAFVTSSYGVRADFMTMAKGIAGGFPFGAFALSENVAKKLEIGDHGGTYCGNPLGCAVSYAVIKYLIDNNISRNVEEMGCFALKRMSLWPNIYGNVIADIRGKGLLIMVEFQSEEIATNVKNECLARGLFVTQTQGNGIRIFPALNVKKEELEEGLLIIEDVVKKINLTF

SEQ ID NO: 6830 - protein, 142 aa, Oryza sativa (japonica cultivar-group)
MAAAEEKKKKKMIKVMSSDGETFEMTEAAASMTAAPTAAPASLSKIIEYCTKHAAVEGRSTAAAELKRFDEELIDVDTDTLYHLLMAGNLMGVEGVLELAVQRTAELIRGKSPEEIRDTFKIANDFTPEEEEIIKENAWALQ

SEQ ID NO: 6831 - protein, 391 aa, Magnolia x soulangeana
DFEPVKPYEVPMTAAGALQSYKLAAKAIARLQALSSGSMEKLVDTVVQEVFELTGYDRVMAYKFHEDDHGEVISEITKPGLEPYLGLHYPATDIPQAARFLFMKNKVRMICDCNAKPVKVYQDEKLTFDLTLCGSTLRAPHSCHSQYMENMSSIASLVMAVVINEGVDEEEGMEPAQQEQQQLKRKRLWGLVVCHNTTPRFVPFPLRYACEFLMQVFAIHVNKELELENQIQEKNILRTQTLLCDMLLRDALVGIRTQNPNIMDLVKCDGAALFYNNKIWRLGLTPTDSQMRDISVWLSEYHMDSTGLSTDSLYDAGYPGALALGDVVCGMAAVRINPKDMLFWFRSHTAAEVKWGGAKHDPSDKDDGRRMHPRSSFKAFLEVVKTKSLPW

SEQ ID NO: 6832 - protein, 401 aa, Vibrio parahaemolyticus RIMD 2210633
MQKLTILGATGSIGASTLKVVEQNPELFSVVALAAGTNVEKMVALCRQWQPKFAVMADKAAAVALQSEIHTISPNTEVLGGVDALCHVASLEEVDSVMAAIVGAAGLLPTMAAVKAGKRVLLANKEALVMSGQLFIDAVEQYGAELLPVDSEHNAIFQCLPQQVQTNLGRCNLDEHGISSILLTGSGGPFRYADIADLDSVTPAQAIAHPNWSMGPKISVDSATMMNKGLEYIEAKWLFNAARDQLKVIIHPQSVIHSMVQYRDGSVLAQMGEPDMATPIALTMSYPSRVDAGVKPLDFTQVGELTFLQPDFARYPCLKLAIDACYEGQHATTALNAANEVAVDAFLNNRLGFTDIARINELVLHKITASCKPENANSLESLLELDRMSRTIALEIIRERS

SEQ ID NO: 6833 - protein, 338 aa, Escherichia coli K12
MRVLVTGGSGYIGSHTCVQLLQNGHDVIILDNLCNSKRSVLPVIERLGGKHPTFVEGDIRNEALMTEILHDHAIDTVIHFAGLKAVGESVQKPLEYYDNNVNGTLRLISAMRAANVKNFIFSSSATVYGDQPKIPYVESFPTGTPQSPYGKSKLMVEQILTDLQKAQPDWSIALLRYFNPVGAHPSGDMGEDPQGIPNNLMPYIAQVAVGRRDSLAIFGNDYPTEDGTGVRDYIHVMDLADGHVVAMEKLANKPGVHIYNLGAGVGNSVLDVVNAFSKACGKPVNYHFAPRREGDLPAYWADASKADRELNWRVTRTLDEMAQDTWHWQSRHPQGYPD

SEQ ID NO: 6834 - protein, 374 aa, Elaeodendron xylocarpum
ALSIAGAVQSQKLAVCAISQLQSLPGGDIKLLCDTVVESVGDLTGYDRVMVYKFHEDEHGEVVAESKRPDLEPYIGLHYPSTDIPQASRFLFKQNRVRIIVDCHASPVRVIQDGGLTQPLCLVGSTLRAPHGCHAQYMENMGSIASLAMAVVINGNDEEVIGGRNPTRLWGLVVCHHTSARCIPFPLRYACEFLMQAFGLQLNMELQLAAQLLEKHVLKTQTLLCDMLLRDSPIGIVTQSPSIMDLVKCDGAALYYQGNYYPLGVTPSEAQIKDIVEWLLAFHGDSTGLSTDSLADAGYPGAALLGDAVCGMAVAYITNRDFLFWFRSHTAKEIKWGGAKHHPEDEDDGERMHPRSSFKAFLEVVKSRSLPWEN

SEQ ID NO: 6835 - protein, 914 aa, Saccharomyces cerevisiae
MTDQRGPPPPHPQQANGYKKFPPHDNQYSGANNSQPNNHYNENLYSAREPHNNKQYQSKNGKYGTNKYNNRNNSQGNAQYYNNRFNNGYRLNNNDYNPAMLPGMQWPANYYAPQMYYIPQQMVPVASPPYTHQPLNTNPEPPSTPKTTKIEITTKTGERLNLKKFHEEKKASKGEEKNDGVEQKSKSGTPFEKEATPVLPANEAVKDTLTETSNEKSTSEAENTKRLFLEQVRLRKAAMERKKNGLISETEKKQETSNHDNTDTTKPNSVIESEPIKEAPKPTGEANEVVIDGKSGASVKTPQHVTGSVTKSVTFNEPENESSSQDVDELVKDDDTTEISDTTGGKTVNKSDDETINSVITTEENTVKETEPSTSDIEMPTVSQLLETLGKAQPISDIYEFAYPENVERPDIKYKKPSVKYTYGPTFLLQFKDKLKFRPDPAWVEAVSSKIVIPPHIARNKPKDSGRFGGDFRSPSMRGMDHTSSSRVSSKRRSKRMGDDRRSNRGYTSRKDREKAAEKAEEQAPKEEIAPLVPSANRWIPKSRVKKTEKKLAPDGKTELFDKEEVERKMKSLLNKLTLEMFDSISSEILDIANQSKWEDDGETLKIVIEQIFHKACDEPHWSSMYAQLCGKVVKDLDPNIKDKENEGKNGPKLVLHYLVARCHEEFEKGWADKLPAGEDGNPLEPEMMSDEYYIAAAAKRRGLGLVRFIGYLYCLNLLTGKMMFECFRRLMKDLNNDPSEETLESVIELLNTVGEQFEHDKFVTPQATLEGSVLLDNLFMLLQHIIDGGTISNRIKFKLIDVKELREIKHWNSAKKDAGPKTIQQIHQEEEQLRQKKNSQRSNSRFNNHNQSNSNRYSSNRRNMQNTQRDSFASTKTGSFRNNQRNARKVEEVSQAPRANMFDALMNNDGDSD

SEQ ID NO: 6836 - protein, 370 aa, Glycine max
  unsure (1)..(370): unsure at all Xaa locations
MDRSAMTVGPGMDMPIMHDSDKYELVRDIGSGNFGVARLMRDKHTEELVAVKYIERGDKIDENVRREIINHRSLRHPNIVRFKEIILTPTHLAIVMEYASGGELFERICNAGRFSEDEARFFFQQLISGVSYCHAMQVCHRDLKLENTLLDGSPAPRLKICDFGYSKSSVLHSQPKSTVGTPAYIAPEVLLKKEYDGKNLXELNIADVWSCGVTLYVMLVGAYPFEDPEEPKNFRKTIHRILKVQYSIPDYVHISSECRHLISRIFVADPAQRISIPEIRNHEWFLKNLPADLMVENTMNRQFEEPDQPMQSIEEIMQIISEATIPAAGTQSLNQYLTGSLDIDDDDMDEDLETDPDLDIDSSGEIVYAI

SEQ ID NO: 6837 - protein, 250 aa, Capsicum annuum
MGKCYPTVSEEYLKAVDKCKRKLRGLIAEKNCAPLMLRLAWHSAGTYDVCSKTGGPFGTMRFKTEQSHGANNGIDIALRLLEPLGEQFPILSYADFYQLAGVVAVEVTGGPDVPFHPGREDKPEPPVEGRLPDATKGSDHLRDVFVKQMGLSDQDIVALSGGHTLGRCHKERSGFEGPWTANPLIFDNSYFKELLGGEKEGLLQLPSDKALLSDPAFRPLVEKYAADEDAFFADYAEAHLKLSELGFAEA

SEQ ID NO: 6838 - protein, 169 aa, Leavenworthia stylosa
NTDRVGMIHDGESRFSIKGKPINHFLGTSTFSEYTVVHSGQVAKINPEAPLDKVCIVSCGLSTGLGATLNVAKPKKGQSVAVFGLGAVGLGAAEGARIAGASRIIGVDLNSNRFEQAKKFGVTEFVNPKEHDKPVQQVIADMTNGGVDRSVECTGSVQAMIQAFECVHD

SEQ ID NO: 6839 - protein, 107 aa, Zea mays
DCFGDPEFIGKIGTDIEDYKCSWLVVQALERAAENQKSILFENYGKSDPACVAKVKDLYKELKLEEVFHEYERESYNKLIADIEAQPSKAVQTVLKSFLHKIYKRDK

SEQ ID NO: 6840 - protein, 354 aa, Pyrococcus abyssi
MKLRIAVIPGDGIGKEVVAEGLKVLKKLEELSRVSFEFKEYPFGAEHYLKTGETLPDWAIEEFKKFDAIYFGAIGDPRVKPGILERGILLKMRFELDLYVNLRPVKLYHPRLTPLKGKNKIDIVFVRENTEGLYAGAGGFLRKGTPQEIAVQEMINTRFGVERVIRFAFEYAKRSGRKKVTLVDKANVLTYAHDLWERVFAEVSQEYDLETDHYYVDAMAMKMIRSPESFDVVVTPNMFGDILTDLGAEIVGGLGIAASGNINPETTGMFEPVHGSAPDIAGKRIANPLAAILSASMMLEYLNLEKESKWIEEAVKRAIAENKVTPDMNGNLKTYEVGDWVVKFLEVVANEEEG

SEQ ID NO: 6841 - protein, 326 aa, Ralstonia solanacearum
MADVNLVEAVNLALAHALEHDPSVVLLGEDIGVNGGVFRATVGLQARFGAERVIDTPLAETALAGAAIGMAAMGLRPVVEIQFSGFIYPAIDHVLNHAARLRHRTRGRLSCPLVIRSPCGAGIHAPEHHSESPEALFAHMPGLRVVIPSSPARAYGLLLAAIRDPDPVIVFEPTRLYRVFRQPVEDNGEALPLDTCFTLRDGTDVTLVSWGGALQAAQAAADQLAQDGVLAEVIDVATLKPLDMETILASVAKTGRCVIVHEAPRTSGFGAEIAANLAEHGLYSLLAPVQRVTGYDVVMPLPRLENQYLPGVERILAAVRKTLEAA

SEQ ID NO: 6842 - protein, 232 aa, Leptospira interrogans serovar lai str. 56601
MKTEPTQLQKPNLTIHRIFETLSVVAFILLSIYFGYQLTLLFLDYFIVHSYLAWAIPLVVLLSWLGADFLSGLVHFLGDSVGSENTPIFGPAFIFPFRDHHVDPKGITRHDFIETNGNNCLVSLPILVYYVFFWESAGAFSYLLASFWFFLLLGIFATNQIHKWAHQDSPAVFIKILQKYKLILGPKHHGVHHTAPHDTYFCITTGWLNPILKYLKFYEILRWILRIPPAVR

SEQ ID NO: 6843 - protein, 317 aa, Zea mays
  unsure (1)..(317): unsure at all Xaa locations
MKFLYLPPFKQMVDYNVLGGKCNRGLSVVDSYKLLKGADALGEEETFLACTLGWCIEWLQAFFLVLDDIMDDSHTRRGQPCWFRVPQVGLIAANDGIILRNHISRILRRHFKGKPYYADLLDLFNEVEFKTASGQLLDLITTHEGEKDLTKYNITVHGRIVQYKTAYYSFYLPVACALLLSGENLDNYGDVENILVEMGTYFQVQDDYLDCYGDPEFIGKIGTDIEDYKCSWLVVQALERADESQKRILFENYGKKAAXCSGVIEDPVQSTSXLEAVFHESDNERSKKXITVREGHPSIAVQKVVISHLAKSIKRQK

SEQ ID NO: 6844 - protein, 95 aa, Oxalis tuberosa
  unsure (1)..(95): unsure at all Xaa locations
LYAGINISGTNXEVMPGQWEYQVGPSVGIEAGDHIWASRYILERITEQAGVVLTLDPKPIDGDWNGAGCHTNYSTKSMRDEGGFEVIKKAIFNLS

SEQ ID NO: 6845 - protein, 339 aa, Klebsiella pneumoniae
MTIKTYREAVKEALAQEMERDERVVLIGEDLRGGHGGNAPEEAKIEAFGGVLGVTKGLWTQFGSDRVIDTPITESAIIGMAAGAAATGLRPVAELMFMDFFGVSHDALYNQAAKFRYMFGGKARAPLVMRGMIGAGFSAAAQHSQSPYNIFATTPGLKVVVPSTPYDVKGLLIQSIRDDDPVVFCEHKMLYDLKGEVPDEIYTIPLGVANYTREGEDVTIIALSAMVHKANQVADKLAREGISVEVVDPRTISPLDEEGILESVASTGRVVIVDESAARFGFAHDVAALIASQAFHFLKAPVLLVTPPHTPVPFSPALEKLWIPGVERIEAAVRQVLED

SEQ ID NO: 6846 - protein, 72 aa, Amphicarpaea edgeworthii
WEYQVGPSVGIEAGDHIWASRYILERITEQAGVVLTLDPKPIEGDWNGAGCHTNYSTKTMREDGGFEVIKKA

SEQ ID NO: 6847 - protein, 772 aa, Oryza sativa
MLTSSLPPPTVPGSKPRPAAATSVSTAATADAAVAGGRSGSGSGSGIGRLSALIRSLCSAGRTAEAARALADAGDAAGVVAYNAMVAGYCRAGQLAAARRLAAAVPVPPNAYTFFPVVRGLCTRGRIADALEVLDEMSFKGCAPIPPMYHVILEAACRSGGFRNSVRVLEAMHAKGCTLDTGNCNLVLNAICEQGCVDEAVGLLRKLAFFGCEADIVSYNAVLKGLCMAKRWGDVEELMDEMVRVDCAPNIVTFNTLIGYLCRNGLFERVHEVLAQMSEHGCTPDIRMYATIIDGICKEGHLEVANEILNRMPSYGLKPNVVCYNTVLKGLCSAERWKEAEELLSEMFQKDCPLDDVTFNILVDFFCQNGLVDRVIELLEQMLSHGCMPDVITYTTVINGFCKEGLIDEAVMLLKSMSSCGCKPNTVSYTIVLKGLCSAGRWVDAEELMSQMIQQGCPPNPVTFNTLINFLCKKGLVEQAIELLKQMLVNGCSPDLISYSTVIDGLGKAGKTEEALELLNVMVNKGISPNTIIYSSIACALSREGRVNKVIQMFDNIKDTTIRSDAVLYNAVISSLCKRWETDRAIDFFAYMVSNGCMPNESTYTMLIKGLASEGLAKEAQELLSELCSRGALRKHLMRHFGISNCTQENGKQKCEENLTSAVDNNYKLPIEILGFLEIQNLRPGEKQFLTHFLSSSWFWTAGLMEVVAAAAAVCSVLNISGYEASVPVTISVQFSDVATENEYFVTFSLDENSKTQGVDSCLIINRIFHCD

SEQ ID NO: 6848 - protein, 119 aa, Zea mays
VSGLKPGLHGFHVHALGDTTNGCMSTGPHYNPASKEHGAPEDENRHAGDLGNVTAGADGVANINVTDSQIPLTGPNSIIGRAVVVHADPDDLGKGGHELSKSTGNAGGRVACGIIGLQG

SEQ ID NO: 6849 - protein, 508 aa, Bifidobacterium longum NCC2705
MQLFRTKSVEQTIAETGEEGRKLKRNLTWWDLSIMGVAVAVGAGIFSVGAQAAAFHAGPAVIISFLIAGIVCGAAVMCYAEFASMIPVAGSAYTFTYTTVGEIMAWIIGWDLILEMLMAGSVISKYWGVYLNDFMRLMGWNANTNLTFGSFHIDIAPIIIVAFFTTLLVFGTKIGARVDGAMTVLKIAIVFFVVIVGFFYVKASNFTPFIPPSQPASTVEGSSAVTGVMTQPLWQFATGMTPSVYGVPGILSGAALVFFAFIGFDVVATASEETKNPHKNVPLGIGVGMLLIIVMYMLVAVVTTGMVSYADLAKQDSPSLATAFELVGADWAAKIISFGIVLGLATVVMVLLLGLTRIVFAMSRDGLLPRGLSKTGKHGTPAALQIVVGAVVALVAAFFDIGVLSDMVNIGTLSAFTLVAISIPIMRKKRPDLPRAFKMPGSPWIPILIAVANFWLMLNLSVLTWIRFVVWLVVGFAIYFGYGYWHARLGKGDLTETLSAETDKAVNG

SEQ ID NO: 6850 - protein, 371 aa, Eriobotrya japonica
MGKGGMSDGDHADRCCGEAINGDVQQENMAAWLLGVKNLKIQPYKLPNLGPHDVRVRLKAVGICGSDVHHFKNMRCVDFIVKEPMVIGHECAGIIEEVGSEVEDLVPGDRVALEPGISCKRCNLCKQGRYNLCRKMKFFGSPPNNGCLANQVVHPGDLCFKLPDNVSLEEGAMCEPLSVGIHACRRANVCQETNVLVVGAGPIGLVTLLAARAFGAPRIVIADVNDERLSIAKSLGADEVVKVSTNIEDLAEEVATIQKVLENGVDVSFDCAGFDKTITTALSATRPGGKVCLVGMGQREMTLPLATREIDVIGIFRYQNTWPLCLEFLRSGKIDVKPLITHRFGFSQKEVEEAFETSARGGNAIKVMFNL

SEQ ID NO: 6851 - protein, 266 aa, Gossypioides kirkii
LSVEEIEVAPPQKNEVRVKIHFTSLCHTDVYFWEAKGQNPLFPRILGHEAGGVVESVGEGVKDVQLGDHVLPIFTGECNECPHCLSEASNMCDLLRINTERGGMLHDGKTRFSKDGKPIYHFLGTSTFSEYTVVHVGQVAKINPEAPLDKVCVLSCGMSTGFGATVNVAKPKKGGSVAVFGLGAVGLAAAEGARVCEASRIIGIDLNPNRFEEAKKFGCTEFVNPKDHDKPVQEVIAEMTGGGVDCSIECTGSIQAMISAFECVHD

SEQ ID NO: 6852 - protein, 161 aa, Oryza sativa
  unsure (1)..(161): unsure at all Xaa locations
MVGTSSWSSSSSSSLGSLDDDIIVACVVKAADAAVEGACVKFLCSYGGRILPRHADGALRYVGGDNRVVSVDRSLPFHELQRKLREMCGWEAVCLRCQLPTEDLDALVSVTGDDYLANLVEESDAGSRDPLXIRSRXGPFLVPRXTTTTTVPPSPCQSSTI

SEQ ID NO: 6853 - protein, 777 aa, Hordeum vulgare
MATAARPPFLAMAAAALLVAAWWGGNAGAAEAQAQAPVFACDASNATLAAYGFCNRKATASARARDLVSRLTLAEKVGFLVNKQPALGRLGIPAYEWWSEALHGVSYVGPGTRFSPLVPGATSFPQPILTAASFNASLFRAIGEVVSTEARAMHNVGLAGLTFWSPNINIFRDPRWGRGQETPGEDPLLASKYAVGYVTGLQDAGAGGVTDGALKVAACCKHYTAYDVDNWKGVERYTFDAKVSQQDLDDTFQPPFKSCVLDGNVASVMCSYNKVNGKPTCADKDLLEGVIRGDWKLNGYIVSDCDSVDVLYTQQHYTKTPEEAAAITIKSGVDLNCGNFLAQHTVAAVQAGELSEEDVDRAITNNFIMLMRLGFFDGDPRQLAFGSLGPKDVCTSSNRELARETARQGIVLLKNSGALPLSAKSIKSMAVIGPNANASFTMIGNYEGTPCKYTTPLQGLGAKVNTVYQPGCTNVGCSGNSLQLSTAVAAAASADVTVLVVGADQSIERESLDRTSLLLPGQQTQLVSAVANASSGPVILVVMSGGPFDISFAKASDKIAATLWVGYPGEAGGAALDDTLFGSHNPSGRLPVTWYPASYADTVTMTDMRMRPDTSTGYPGRTYRFYTGDTVFAFGDGLSYTKMSHSLVSAPPSYVSMRLAEDHLCRAEECASVEAAGDHCDDLALDVKLQVRNAGEVAGAHSVLLFSSPPPAHNAPAKHLVGFEKVSLAPGEAGTVAFRVDVCRDLSVVDELGGRKVALGGHTLHDGDLKHTVELRV

SEQ ID NO: 6854 - protein, 352 aa, Nostoc punctiforme
MKAQVFRGVNQLSYEDIPVPTVEPDEVLVQVRVVGLCQSDIKKIRYPLYEPPRIFGHETAGTIAAIGNNVKGWQVGQRVAVMHHIPCMRCAYCLNDNFSMCDVYKNISTTAGFNASGGGFADYVKVPGHIVENGGLIPIPDNISFEEASFVEPTNCCLKAVRKAQIAPGQTVLVTGAGPIGLMFIMLVKYFGAKAIATDLLPSRIDKALSVGAEAAFDARDPDLPAKISALTGGLGVDVTLLAVPSEKAFFQALDSTRKGGKILFFAEFPDEVEIPINPNILYRREIDLIGSYSSSYRLQNLSADIVFNQRIDVKALISDRYPLKDLSAAVEQAIAPTPDTYKILIYPQKED

SEQ ID NO: 6855 - protein, 225 aa, Triticum aestivum
MDAAGESAVTCVDFWANGFGMRARIALRELGVAFEYVEEDLRVGVRSDLVRRMNPVHRSVPILIHRGRPVCGSLNILEYIDEVWSAPGETRRLLPGDPAGRADARFWADFVDHKVFPTQTRFLKSKGEEKKAAKEELVEQLKLLEEVLGDKVFFSGEEFGFLDIVLIPFSSMFRGYEQHGGFDLEVECPNLMRWVKRCKERESVGAVLPDETKMYQLHKEWYGIE

SEQ ID NO: 6856 - protein, 74 aa, Actinobacillus pleuropneumoniae serovar 1 str. 4074
MRAWTVSVGATAPKAAAVIHTDFEKGFIRAEVIAYDDFIQFKGENGAKDAGKWRLEGKDYIVQDGDVMHFRFNV

SEQ ID NO: 6857 - protein, 163 aa, Glycine max
  unsure (1)..(163): unsure at all Xaa locations
LLELGIRLEVTALTPVLTNRMHCQGHVAAALTRGGVDITGPYAHTINDYGTTDTLPFAAMGSGLQAGMPVFEAKYSEXRSSDEGIGLDDDAICAGVFNELGRDRHVDVGVIAKGHNEYHRNHLLPGPRTYDNPHGVRFPKQTAVLLTXITPSKEKVEVIEGYA

SEQ ID NO: 6858 - protein, 143 aa, Fusobacterium nucleatum subsp. vincentii ATCC 49256
MSMTQINWYPGHMKKTKDLIEENLKLIDVVLEIVDARIPLSSKNPNIASLSKNKKRIIVLNKSDLVSKQELDKWKKYFKEQDFADEVVEMSAETGYNVKKLYEAIEFVSKERKEKLLKKGLKKVSTRIIVLGIPNVGKCKINK

SEQ ID NO: 6859 - protein, 429 aa, Yersinia pestis CO92
MSHRELEQRRKEATPRGIGVLCDFYAVRAENATLWDEQGREYIDFTAGIATLNIGHRHPKVMAAVRQQLDQFTHTAYQVVPYASYVTLAEKINSLAPISDSNMTAAGNSKTAFFTTGVEAIENAVKIARAATGRPGVIAFSGAFHGRTLLAMALTGRAVPYKVGFGPFPASIFHALYPNELYGVSVEEAISSVERLFRCDISPTQVAAILFEPIQGEGGFNIAPPEFVSALRTLCDEHGILLIADEVQTGFARTGKLFAMEYYPDTKVDVITMAKSLGGGMPISAVTGRADIMDAPLPGSLGGTYAGNPLAVAASLAVLDIIAEEKLCERALILGAKLVDVLEKAQMSNAAIVGIRARGSMVAVEFNDPVSGKPSPELTRAYQRQALEEGLLLLSCGVHSNVIRFLYPLTIPDKQFKQAMNILTRLLAS

SEQ ID NO: 6860 - protein, 176 aa, Bacillus cereus ATCC 14579
MITELHSQRLYLRKMKASDSLSMFKIWSDPDVTKFMNISNFTDENQAKDMIQFLNELAQNNKAIRFTIIEKESNHIIGSCGYNSLDFENSKTEIGYDISKTFWGKGYAPEAISSLLDYAFTHLKLNRVEAKVEPANVNSIKVLEKLNFTFEGTLRKSEKSAGKLIDLNIYSKLISD

SEQ ID NO: 6861 - protein, 140 aa, Oryza sativa
MVSFEMNDLKKIGLGLTGFGVFFSFLGIIFFFDKGLIAMGNILFLSGLGLTIGLKSTMQFFTKPKNYKGTISFGAGFFLVLIGWPFFGMLLEAYGFVVLFSGFWPTLVVFLQRIPIIGWIFQQPFVTSFLDRYRGKRVPV

SEQ ID NO: 6862 - protein, 151 aa, Zea mays; identical to SEQ ID NO: 743

SEQ ID NO: 6863 - protein, 373 aa, Hordeum vulgare
MATAGKVIKCKAAVAWEAGKPLSMEEVEDAPPQAMEVRDKILYTALCHTDVYFWEANGQTPVFPRILGHEAGGIVESVGEGVTELVPGDHVLPVFTGECKECAHCMSEESNLCDLLRINVDRGVMIDDGQSRFTIDGKPIFHFLGTSTFSEYTVIHVGCVAKIDPEAPLDKVCLLSCGISTGLGATLNVTKPKKGMTVAIFGLGAVGLAAMEGARMSGASRIIGVDLNPAKHEQAKKFGCTDFVNPKDHTKPVQEVIVEMTDGGVNRAVECTGNADAMISAFECVHDGWGVAHKEAVFKTHPMNFLNERTLRGTFFGNYKPRTGLPGVVDMYMRKELELDKFITHSLPFSQINTAFDLMLRGEGLRCVIRSEE

SEQ ID NO: 6864 - protein, 213 aa, Pseudananas sagenarius
AVPQSIDWRDYGAVNEVKNQGPCGGCWAFAAIATVEGIYKIRKGNLVYLSEQEVLDCAVSYGCKGGWVNRAYDFIISNNGVTTDENYPYRAYQGTCNANYFPNSAYITGYSYVRRNDESHMMYAVSNQPIAALIDASGDNFQYYKGGVYSGPCGFSLNHAITIIGYGRDSYWIVRNSWGSSWGQGGYVRIRRDVSHSGGVCGIAMSPLFPTLQ

SEQ ID NO: 6865 - protein, 266 aa, Gossypium tomentosum
LSVEEIEVAPPQKNEVRVKIHFTSLCHTDVYFWEAKGQNPLFPRILGHEAGGVVESVGEGVMDVEPGDHVLPIFTGECKECPHCLSEASNMCDLLRINTERGGMLHDGQTRFSKDGKPIYHFLGTSTFSEYTVVHVGQVAKINPEAPLDKVCVLSCGMSTGFGATVNVAKPKKGGSVAVFGLGAVGLAAAEGARVCEASRIIGIDLNPNRFEEAKKFGCTEFVNPKDHNKPVQEVISEMTGGGVDCSIECTGSTQAMVSAFECVHD

SEQ ID NO: 6866 - protein, 73 aa, SINNINGIA DOUGLASII
  unsure (1)..(73): unsure at all Xaa locations
ISGTNGEVMPGQWEFQVGPSVGIEAGDHIWCARYLLERITXXTGVVLSLDPKPIEGDWNGAGCHTNYSTKSMR

SEQ ID NO: 6867 - protein, 347 aa, Bacillus subtilis subsp. subtilis str. 168
MQSGKMKALMKKDGAFGAVLTEVPIPEIDKHEVLIKVKAASICGTDVHIYNWDQWARQRIKTPYVFGHEFSGIVEGVGENVSSVKVGEYVSAETHIVCGECVPCLTGKSHVCTNTAIIGVDTAGCFAEYVKVPADNIWRNPADMDPSIASIQEPLGNAVHTVLESQPAGGTTAVIGCGPIGLMAVAVAKAAGASQVIAIDKNEYRLRLAKQMGATCTVSIEKEDPLKIVSALTSGEGADLVCEMSGHPSAIAQGLAMAANGGRFHILSLPEHPVTIDLTNKVVFKGLTIQGITGRKMFSTWRQVSQLISSNMIDLAPVITHQFPLEEFEKGFELMRSGQCGKVILIP

SEQ ID NO: 6868 - protein, 369 aa, Neisseria meningitidis MC58
MSLTRLILKFYALLRLFLGKNARTAWISHPACAGHEPGANHPDSPDRILCIEQALRRAGIWQHLQTIEAEEISDTRLALVHSSKYLNRLESCLPQKGKISRLDNDTAISTGSLSAARFAAGSAVQAVDMVMNRKAWHAFCAARPPGHHAGSGKAGGFCLLNNVAAGVMHAIAEYRLKRIAVIDFDVHYGDGTAEIFKDDPRILFFNLFETDLFPFPENNDMPDGGNMVHLPLPPGTGSRTFREAVRRQWLPRLAAFKPELVLLSAGFDAHRLDESGRLNLHEADFAWLTHKIIQTASGCPGKIISVLEGGYTLEPLAQSAAEHIRVLAGLGKSDAATAYQKTLDPTKKRFAKPKTGQVRQPTQSDRYDI

SEQ ID NO: 6869 - protein, 262 aa, Zea mays
  unsure (1)..(262): unsure at all Xaa locations
MANAGGGAAGEGEWLKVAQLRALVQEDHRAKEVDNLTLRRFLRARGHNVDKAAAMLLKFLRWRAEAAPGGGTVREEQVRGELEQDKIYMGGVDRTGRPIIVGLLAKHYSANRDMAEFKSFVVYFFDKICARIPRGQEKFLAIMDLKGWGYANFDVRAYIAAIEIMQNYYPERLGKALMINVPYIFLKVWKTMIYPFIDANTRDKVMSMSCHAARXFVFVDDKSLRETLRREIDESQLPEFLGGKMPLVSLKDYAQQPQPVCE

SEQ ID NO: 6870 - protein, 465 aa, Zea mays
MPSTFYIRRPRPQPPRPASPRGLGARGAAAGPCPCPSTVRSGMAQAVVPAMQCRVGVKAAAGRVWSAGRTRTGRGGASPGFKVMAVSTGSTGVVPRLEQLLNMDTTPYTDKVIAEYIWVGGSGIDIRSKSRTISKPVEDPSELPKWNYDGSSTGQAPGEDSEVILYPQAIFKDPFRGGNNVLVICDTYTPQGEPLPTNKRHRAAQIFSDPKVAEQVPWFGIEQEYTLLQKDVNWPLGWPVGGFPGPQGPYYCAVGADKSFGRDISDAHYKACLYAGINISGTNGEVMPGQWEYQVGPSVGIEAGDHIWISRYILERITEQAGVVLTLDPKPIQGDWNGAGCHTNYSTKTMREDGGFEEIKRAILNLSLRHDLHISAYGEGNERRLTGKHETASIGTFSWGVANRGCSIRVGRDTEAKGKGYLEDRRPASNMDPYIVTGLLAETTILWQPSLEAEALAAKKLALKV

SEQ ID NO: 6871 - protein, 129 aa, Malus x domestica
MMTCKLKFLELKAKRTYRFIVFKIDEKKNEVIVEKLGEPAESYEDFTANLPDNECRYAVYDFDFVTVENCHKSRIFFVGWSPDTARVRNKMIYASSKDRFKRELDGIQVELQATDPSEIGLDVIKSRAN

SEQ ID NO: 6872 - protein, 252 aa, Zea mays
  unsure (1)..(252): unsure at all Xaa locations
MAKNYPTVSAEYSEAVEKARRKLRALIAEKSCAPLMLRLAWHSAGTVRRVVEDRAVPFGTMKCPAELAHGANAGLDIAVRLLEPIKEEFPTLSYADFYQLAGVVAVEVTGGPEIPFHPGREDKPQPPPEGRLPDATKGSDHLRQVFAXKQMGLSDQDIVALSGGHTLGRCHKERSGFEGAWTTNPLVFDNSYFKELLSGDKEGLLQLPSDKALLSDPVFRPLVEKYAADEKAFFDDYKEAHLKLSELGYADA

SEQ ID NO: 6873 - protein, 145 aa, Oryza sativa
LGRGSAGRVVEKQPIAPSPAAVRRRAPMEVTLRRFELSDVDAMMAWASDPAAAAFCRWEPYQSTEPLLAYLRDTVLPYPRFRAIWLATGAGASNCDCRPVAKKTMDTTGDASHVEFWYVVVRAHVQRPPPCHCCRSVPRLRPPRG

SEQ ID NO: 6874 - protein, 309 aa, Glycine max
MYSLAQHKYIPRFHLQACKNHPPHHPSSPVFCSTTTTTSRDKPNPKPLVIEPWLVPVPPTVVTADNPRPMNNDPSLQSTWSHRAWVAAGCTTLLISLGESIKGAMDLNMWAEPILAGWVGYILADLGSGVYHWAIDNYGDASIPIVGTQIEAFQGHHKWPWTITKRQFANNLHALARAVTFTVLPIVLLCHDPIVEGFVGMCSGCIMFSQQFHAWSHGTKSRLPPLVVALQEAGVLVSRSQHAAHHRPPYNNNYCIVSGVWNEFLDKHKVFEALEMVLYFKTGVRPRSWSETASEWIEEIETPSQIQAQ

SEQ ID NO: 6875 - protein, 506 aa, Triticum aestivum
  unsure (1)..(506): unsure at all Xaa locations
MARTGPAQARSGPARAGRRSEGLPGAPRSAPAPSPSTPSVKLALSRLDALAKSPAPKRDREDGDGPPSPPPPPSDDVAEGLAALCAAMDPAGFLAFVVERXKEVDALRAELPAALQRCVDPARFAMDAVSEVFPVDRRAVRSPTDLAWACVLILEAVVPALADPDPEIGAARPMVPQAARDRARGMAAEWKEVAERKGGVEGAKPPDAHAFLQHVATFAVAEKEDKELYKRIVLSFSWRRQMPRLALTLGLEDDMEEIIEELITKGQQLDAVNFAYEAGLLEKFSPVPLLKSYLEDSKKIYCTSDNVSTSSGQSGVNANKKEQSALRAVIKCVEDHKLEAEFPLEDLRKRLEDLEMAKTEKKKAASSCSSGGPASKRIKGSTGGAMSPSKSGRLSDNTGAPSSPATATSSSTATAFIGSPASHVSYGTGSPYSYDRSAGHALYCGQSPLPMREPYAYPPAVPVPNVGLGMPYQAPPMTYPIYAGYNSGLGAYGNAMAPAFHQAYYR

SEQ ID NO: 6876 - protein, 214 aa, Paeonia brownii
IVESVGEGVTDVKPGDHVLPIFTGECKECRHCKSEESNMCDLLRINTDRGVMLNDGKSRFSINGQPIFHFVGTSTFSEYTVLHVGCLAKINPEAPLDKVCVLSCGISTGLGATLNVAKPKKGSTVAIFGLGAVGLAAAEGARIAGASRIIGVDLNPKRFDEARKFGVTEFVNPKDYNKPVQEVIAEMTGGGVDRSVECTGSVMAMMSAFECVHD

SEQ ID NO: 6877 - protein, 244 aa, Methanothermobacter thermautotrophicus str. Delta H
MFKAELNDPNILRTSFDAISSIVDEVQIQLSAEGLRLDALDRSHITYVHLELKAELFDEYVCDEPERINVDTEELMKVLKRAKANDRVILSTDEGNLIIQFEGEAVRTFKIRLIDIEYETPSPPEIEYENEFEVPFQLLKDSIADIDIFSDKITFRVDEDRFIASAEGEFGDAQIEYLHGERIDKPARSIYSLDKIKEMLKADKFSETAIINLGDDMPLKLTLKMASKEGELSFLLAPRIEAEE

SEQ ID NO: 6878 - protein, 409 aa, Brassica napus
MKGVRKTYDNSCTLSFLLVFFVLILFHPALSIYINTLSSTESLTISNNRTLVSPGNVFELGFFRTTSSSRWYLGIWYKKVSERPYVWVANRDNPLSNSIGTLKISCNNLVLLGHSNKSVWSTNLTRRNERSPVVAELLANGNFVIRYSNNNDASGFLWQSFDFPTDTLLPEMKLGYDRKKGLNRFLTAWRNSDDPSSGEISYQLNTQRGMPEFYLLKNGLRVHRSGPWNGVRFNGIPEDQKLSYMVYNFIENSEEVAYTFRVTNNSIYSILKISSEGFLERLTWTPTSTAWNLFWSSPVDTRCDVYMTCGPNAYCDVSTSRVCNCIQGFMPSNAQQWDLREGSSGCIRRTRLTCSGDGFTRMRRMKLPETTKAIVDRSIGVKECEKRCLSDCNCTAFANADIVMVGRIV

SEQ ID NO: 6879 - protein, 408 aa, Rhodobacter sphaeroides
MTGIWWRAGPRRCGRRTARSWAGSRRSCREAGRVTQTAAVAFPAAPLYIGSEIYRRSSYGGRHPLRVPRVSTVTDLGRALGWLPAASFRTAPRAKPAALTLWHDPAYVAALAAAEAGLAAPELLAAHGLGTLSNPVFPEMFRRPATGAGGVMLAAELLRGGGAIHVPGGGTHHGMRDRANGFCYLNDPVLGMLVLRRMGLRRIAYVDIDAHHPDGVEAAFAGDPEVLLISVHEEGRWPFTGALEDEGGGTCFNLPVPRGFNDTEMRAVLEELILPRLAAFRPEAVVLQCGADALEEDPLSRLSLSNNAHFEVVAALRPVAPRFLVLGGGGYNPWSVGRCWAGVWATLAGHEIPDRLPEAARAVLAGLDWGGGGRPPPAPPLIETLRDAPREGPVRPEIRERLARLARR

SEQ ID NO: 6880 - protein, 144 aa, Glycine max; identical to SEQ ID NO: 5649

SEQ ID NO: 6881 - protein, 261 aa, Streptomyces galilaeus
MPPASERVAIVTGATSGIGLAVARSLAEGGARVFICARDGDRVAHTVKELREAGHDVDGASCDVRDTARVRAFVQEARDRFGPVDALVNNAGRSGGGHTAQIADELWLDVIETNLNSVFRMTREVLTTGGMLERGAGRIVNIASTGGKQGVALGAPYSASKHGVVGFTKALGLELAKTGITVNAVCPGYVETPMAERVRQGYAGAWDITEDEVLERFEAKIPLGRYSTPDEVAGLVGYLLSSTAASITAQAMNVCGGLGNY

SEQ ID NO: 6882 - protein, 178 aa, Oryza sativa
  unsure (1)..(178): unsure at all Xaa locations
MNRKPGDWDCRACQHLNFSRRDLCQRCGEPRGAADRGSGGGGDYANFGGRGGSSFGGGFGTGSDVRPGDWYCNCGAHNFASRSSCFKCAAFKDDAAVNSGGAGAFDGGDMSRSRGYGFGSGAVRASRPGWKSGDWICTRSGCNEHNFASRMECFRCNAPRDSGTEVXFAVRVRSIWIR

SEQ ID NO: 6883 - protein, 741 aa, Listeria monocytogenes
MKTVLGKTNVTDTVSQTDLDQVTTLQADRLGIKSIDGVEYLNNLTQINFSNNQLTDITPLKNLTKLVDILMNNNQIADITPLANLTNLTGLTLFNNQITDLDPLKNLTNLNRLELSSNTISDISALSGLTSLQQLSFGNQVTDLKPLANLTTLERLDISSNKVSDISVLAKLTNLESLIATNNQISDITPLGILTNLDELSLNGNQLKDIGTLASLTNLTDLDLANNQISNLAPLSGLTKLTELKLGANQISNISPLAGLTALTNLELNENQLEDISPISNLKNLTYLTLYFNNISDISPVSSLTKLQRLFFYNNKVSDVSSLANLTNINWLSAGHNQISDLTPLANLTRITQLGLNDQAWTNAPVNYKANVSIPNTVKNVTGALIAPATISDGGSYTEPDITWNLPSYTNEVSYTFSQPVTIGKGTTTFSGTVTQPLKAIFNAKFHVDGKETTKEVEAGNLLTEPAKPVKEGHTFVGWFDAQTGGTKWNFSTDKMPTNDINLYAQFSINSYTATFDNDGVTTSQTVDYQGLLQEPTPPTKEGYTFKGWYDAKTGGDKWDFATSKMPAKNITLYAQYSANSYTATFDIDGKTTTQTVDYQGLLKEPKTPTKAGYTFKGWYDEKTDGKKWDFATDKMPANDITLYAQFTKNPVAPPTTGGNTPPTTNNGGNTTPPSANIPGSNTSTGNSASTTSTMNAYDPYNSKEASLPTTGDSDNALYLLLGLLAVGTAMALTKKARASK

SEQ ID NO: 6884 - protein, 211 aa, Zea mays
GTSRPAGVPCTNQQAAMSNLRSQKRLAASVLGVGKRKIYLDPSHISEIGQANSRQNIRRLRKDGYIIVKPQVVHSRVRAREHDAAKAKGRHTGTGKRKGSAEARMPTKVLWMRRQRVLRRLLRKYREEGKINRHLYHELYMKAKGNVFKNKRVLMDHIHKAKAEQNRTKVLADQMEARRAANKAARARRAERVAEKRSAILAVEAEGETRE

SEQ ID NO: 6885 - protein, 359 aa, Nostoc sp. PCC 7120
MQSTTIPSDNSPSFGQSENTTTLPFTLQDLKAAIPAECFQPNVSKSLFYFFRDVLIVGLLYAVAHYLDSWYFWPIFWLIQGTMFWALFVVGHDCGHQSFSKHKWLNDLIGHLTHTFILVPYHGWRISHRTHHKNTGNIDNDESWYPVTQSQYKEMPLGQKIGRYYVFLLAYPVYLFKRSPNKEGSHFLPSSSLFKPSEKWDVITSTVLWSCMVGLLGFLTYQWGWMWLLKYYAAPYIVFVIWLDLVTFLHHTEADLPWYRGEDWTFLKGAISSIDRNYGLVNHIHHDIGTHVAHHIFLNIPHYNLLKATEAIKPVMGEYYRKSEEPIWKSLWRSCVSCHFVPDTGGKVYYTSNNQVVNK

SEQ ID NO: 6886 - protein, 234 aa, Nicotiana tabacum
LPLPFFNMDTSHWPQGIGLAKAVEPSKPVPVTERKPRPQKEQAINCPRCNSTNTKFCYYNNYSLSQPRYFCKTCRRYWTDGGSLRNVPVGGGSRKNKRSNSSSNNSSSSTSSSYKKIPDLTIPTSSSTQNPKIINEPHDLNLTFNPSTTSNFSNISEFMALPLMNPNSTTSFMSSIMPQISDSNNIMYSSSSTGLPNLHDLKPTLNFSLDGFDNNNGYGSLQGETAGAKLFFPL

SEQ ID NO: 6887 - protein, 465 aa, Coptis trifolia
SGKPFYAIAHRVTGSLIIDFEPVKPYEVPMTAAGALQSYKLAAKAITRLQSLPGGSMERLCDAVVQEVYELTGYDRVMAYKFHEDDHGEVVSEVTKEGLEPYLGLHYPATDIPQAARFLFMKNKIRMICDCRAKHVRVLQDEKLSFDLTLCGSTLRAPHSCHLQYMENMDSIASLVMAVVVNDDDEDDEGTRPSQPQKRKRLWGHAVCHNTTPRFVPFPLRYACEFLIQVFAIHVSKEFELENQILEKNILRTQTLLCDMLMRNVPLGIVSQSPNIMDLVKCDGAALLYKNKIWRLGSSPNEIQIRDIASWLSDYHMDSTGLSSDSLYDAGFPGALSIADTVCGMAAVRINSKDMLFWFRSHTAAEVRWGGAKHDPGEKDDGRKMHPRSSFKAFLEVVKTRSAPWKDYEMDAIHSLQLILRSAFKDIETTDGNTKAFHSQLDNLKINGMEELEAVTNEMVRLIET

SEQ ID NO: 6888 - protein, 800 aa, Nostoc punctiforme
MLSVKLFVLHSSLFSYSRYSSFDAPGQQRRIFMEMNLQFPGINLISLKEAPIHISSQIQPHGVLLVLEEPELKILQVSTNTLKVFGIAPENMLHKKLEDLLDPFQIERIKTGLSGENLDFINPTKVWVRKKGDEYVVFDAIFHRNIEGFLILELEPAITQENIPFLSFYHLARASINQLEKTANLRDFCQVIVQEVRKITEFDRVMLYKFDDDGHGSVIAEEKLESLEPYLGLHYPESDIPKPARKLFAANSIRIIPDAYSQPVKLFPVNNPISDRPINLTNSILRSAASCHTEYLHNMGVGASLTISLIKDQKLWGLIACHHQSPKYVSYELRKACEFLGRVIFAEISAREETEDYYHRINLTHLQSILIEYMSQEENFIDGLVKNPQHLLDLASAQGAAVCFAGNCTVVGETPREEDLNFLVQWLKNNVEEEVFYTDSLPQIYPDAESFKNVASGLLAIPIAKRTYVLWFRPEVIQTVNWGGDPNKAFEVSQSEGNVRLCPRKSFELWKETVRLTSLPWKDVEVKAALELRKAIVNIVLRQADELAQLAQDLERSNAELKKFAYVASHDLQEPLNQVVNYVQLLEMRYSEELDEDAQEFISYAVQGVSLMQTLIDDVLAYSKVDMQAIAFQMNDVETALMRGLGNLRQRINETGATITHDPLPTVMADSTQLMQLFQNLIGNAIKFHSDQPPQIHVGAERIEDAWLFSVRDNGIGIDPKFSDRIFVIFQRLHTRDEYTGTGMGLAICKKIVECHRGRIWVESELGQGATFYFTIPVGGRELERRNGRKTQNHLFGRGQ

SEQ ID NO: 6889 - protein, 437 aa, Coxiella burnetii RSA 493
MHSRFQKGKIPNSVLKRDLGLIGATMMGLGSIVGTGIFVSIGVAAGVTGPSVVLAIVLAALVATCNALSSAQLAASHPVSGGTHEYGYRYLHPALGFTAGWMFLCAKIASAATAALGFAGYLLHLLGITSISMIPIAVSIAILLTLLVLSGLKKSNLANLIIVSIILISLITFVLSGLPHLFSMGLPHFKPFFPTAAPSGLRNFLYATALMFVAYTGYARIATLGEEVKNPKRFIPQAIILTLIISAVLYIAVAVVAISIVGADHLSQAAQNRATPLETAARALNRRGLDIILAFGACTAMLGVLLNLMLGLSRMALAMGRKRDLPSMFGTLSKKQRTPSAAILGVGLAIIGLSLIGNVEITWAFSAFTVLIYYFITNLAALQLPKADRLYPRIFPVGGLIACLFLAFWVPLMIWSIGIGLIAVGLAWKYFMARLWI

SEQ ID NO: 6890 - protein, 396 aa, Rhodospirillum rubrum
MSTVPAVMPTYSRVDLSFDRGEGAWLLANDGRRFLDFASGIAVTGLGHAHPHLVEALTSQAAKLWHCSNLFRIPGQERLAQRLVDGSFADSVFFTNSGAEAIEAALKLARRHQHVVRGETARYRTIVTRNAFHGRTLATVTAGGQAKHVKGFEPLVEGFDRVDFGDLDAARAAVTEETAAILVEPIQGEGGIFPAPEGYLSGLRRLADEHGLLLILDEVQTGVGRTGKLFAHEWDGIIPDVVAIAKGIGAGFPMGACLAREPYASALVAGSHGSTFGGNPLAMAVGNAVLDIILAEGFLDGVSARGADLIARLDGLVHRHPTILAGVRGRGLMIGLVCAAPNGVVLNALREQGLLAVPAEAGVVRLLPPMIIGEAEVTAAEEMIDRACVHLEREAA

SEQ ID NO: 6891 - protein, 492 aa, Candida albicans
MPQVTKTNNENEFRLTRSKVQHQESISTIKNTTISNSQHKQQTQQQISSPPQVSVTSSEGVSHVNTRQYLGDVSNQYITNAKPTNKRKPLGGDNAPLQKQQHRPSRPIPIASDNNNNGSTSSSSNSSNNNNNDANRLASLAVPSRLPQKRQATESSTNLVEKLRVPQPEVGERSQSYHKKSRLIDYEWQDLDEEDNDDQLMVSEYVNEIFSYYYELETRMLPDPQYLFKQTLLKPRMRSILVDWLVEMHLKFKLLPESLFLAVNVMDRFMSVEVVQIDKLQLLATAALFTAAKNEEVFSPSVKNYAYFTDGSYTPEEVVQAEKYMLTILNFDLNYPNPMNFLRRISKADDYDVQSRTLGKYLLEITIVDYKFIGMRPSLCCASAMYLARLILGKLPVWNGNLIHYSGGYRISDMRECIELMFQYLIAPIEHDEFFKKYAMRKFMRASTLCRNWAKKFQASGRDLFDERLSTHRLTLEDDDEEEEIVVAEAEE

SEQ ID NO: 6892 - protein, 356 aa, Oryza sativa
  unsure (1)..(356): unsure at all Xaa locations
MRKKKKAFAVAAATTLLSPPRSSSSSSSTASSCIVPPRTESGKKKSKHRKRAKDGXRRXRRRRRRSAPRKGSSIYKGVARHRGSGKYEAHLWDKQGWNPNQTRKRGRQGAYDTEEAAARTYDLAALKIWGSDHVLNFPIDTYRKELERMQRMTREEYLATLRRKSSGFSRGVSKYRGVAKHHHNGRWEARIGRAVGKKYLYLGTFDTQEEAATAYDLAAIQLRGRSAVTNFDASCYTYTDHLPPPPPPQPPSVCKTEPELEPPQPAAPPGSESLLRPKMEPCDDWEPRQTTWASSTTSRASSWTRPARPPPPPPPRXPDDVERAVQRAPSAASRRANAAAVSYAISSLASGRWWYX

SEQ ID NO: 6893 - protein, 1117 aa, Adiantum capillus-veneris
MSSTRHSYSSGGSGKSKHGRRIAQTSANAKLYAAYEESSESGSFDYSQSVSAGKEGISSQLVTAYLQRMQRGGLVQQFGCLIAVEEETFRVLHMCEAPEMLDVATQAVPTMGQYSRLCIGADVRTLLSPASASALDRVIGVVDVSMFNPITVQSRSSGKPFYAILHRNDVGLVIDLEPIRPDDASITGGALQSHKLAAKAIARLQSLPGGDIGLLCDSVVEEVHELTGFDRVMAYKFHEDEHGEVVAEIRRTDLEPYIGLHYPATDIPQAARFLFMKNRVRMICDCRLPPVKLIQDKTLSQPMSLTGSTLRAPHGCHTQYMANMNSISSLVMAVIVNDSDDDSAGHSSQGIKLWGLVVCHHTSPRYVPFPVRSACEFLMQVFSLQLNMEVGMAAQVREKHILRTQTLLCDMLLRDAPIGIVSQSPNIMDLVTCDGAALYYGKKCWLLGTTPTEAQIVDIAAWLLDCHKDSTGLSTDSLAKTGYPEASCLGDAVCGLAAAKITATDFLFWFRSHTAKEVRWGGARHDPEERDDGRRMHPRSSFKAFLEVVKQQSLPWEDVEMDAIHSLQLILRGSFQDIDDSNTKTMIHARLNDLKLQGLDELSTVASEMVRLIETATAPILAVDGQGLINGWNGKVAELTGLSFETAMGKSLAKELVHEESKTIVERVLHLALEGEEEQDIEIHLRTYDQHKQKGVVILIVNTCCSRDVSNNVVGVCFVGQDVTGQKLVLDRFIRIQGDYKAIVQSLNPLIPPIFGADEYGFCSEWNAAMEKLSNWRREEVLGKMLVGEIFGLQMVCCRLQGQDVVTKLMIVLNDAVNGQESEKFPLVFYDRNGRRVEALLIASKRTDADGRITGVFCFLHTASPELLQALIIKRAKEKVDKELSYVKEELKKPLEGLAFTRTVLEGTNLTIEQRQLIKTNAWCERQLRKILEDDLNNIEEGYMDLEMSEFFMGSVIDAVISQGMAASRGKGVQILTEIPNDVKLMCLFGDQARLQQVLADLLFCAINHATTTNEDEKDWVTIKVSRTKTRLDDGVHLMHFESRISHSGQGISEALVEEMTNKSQKWTPEGLAISISCTLIRLMNGDVKYTTDAGNKCFLVTIQFPLAHRDDATSVR

SEQ ID NO: 6894 - protein, 426 aa, Aeromonas salmonicida
MSALKKDLGLWQRMGLLTTSLLGTGIFVVPATAASLAGGASLWAWVLLIVLVLPIAFTFARLGRRYPHAGGAPHLIGLAFGNGAERFSAFLFLTVLPVGLPAALTIAAGFWHALFDLGEWTLWAIQLLTLLGVFLLGLRGARSSGNLQLLIALAILGLTLLIWFKGDLSWRDAAQPLPTAAEWPAMGTALAVMFWCFVGLEAFAHMGEEFKRPERDYPLALLGGVLLAGLIYWVHSLVVLKYGLYGDEAKNATAIPALLSLLFGPTAKWLVAILGYLSCFGSINIYLQGFARLIWSMAREGKLPTSLARLSARGAPLNALCWVLAICLVSITLILWLRLPLDELIRYANGNFVLVYLLCMAAGWRLLGGMGKGLAGLSVLLCLAVLVALASQVFYAVLLSAGYGLFSLWRRYLRRTRATENICAIK

SEQ ID NO: 6895 - protein, 287 aa, Methanosarcina barkeri
MFFIAVIGAVTGSLFESIPSKIDKNISVPLGAGMTMWIFEDFRYWVSPEKMVVALVFSFILGVLAYRAKIADVSALLSAALLGVLIIVFSGLSWYLLLLTFFILGGGFTKYKYAYKESIGIAQAKDGIRSYENVFSNSTAALALAVAYGVFPEHSLPIIYAYMGTVATATGDTLASEIGTTAKGRPRMITTLRLSEPGVDGAVSLLGEFAAIFGSAVIGVLAYLLGISDNFILTVLITTAGGFFGTNVDSFLGATLQKRGVLSNSGVNLMATFAGAGISAVLYFLIT

SEQ ID NO: 6896 - protein, 563 aa, Thermoplasma acidophilum
MGEQSSIPSDANISYAENQDKKLRKALSTWDLLMLSVGGIIGSGWLFAAYAASVLSGPASILAWVLGGIIVIFIALVYAELGSMIPRSGAIVRYGHLSHGSFAGFLFGWAYFLSAVSVPAIEAEAVVTYAASYVTKPALIANGIMTGLGTLIAMILMIGFFFLNYAGVHIMGKTNQGLTWVKVIIPVITILVLIFVHFNPSEIIPSNGFMPYGWAPVFAAISSTGIVFSYFGFRQAIDYGGEARNPQRSIPIATIGSVLIGMLIYSLLQVVFVGGIDWSKVGLLPGQWQQLSSLASSSNAATAYPYAYDLMNAPFATVALSAGLVWLTYTLYASAYLAPSGTLNVYMGTSARTLYGMAVNGHLPKTFAKIEERNRIPLIPLITTLLVGFLFFLPFPSWYKMVGFISGATVFTYIVGGAALMNLRKQAPELKRPFRLPAADVFAPIAFILASEAVYWTGWPTTLYLAIGIFAGLVLYGILAALHKIEQSFNSTNVKAGLWVPFFIIVLTVLSYLGEYGGIDVIKFPLDLIVVAIVSALFYFWAIRSGIKTEEIAAMVANEDQYV

SEQ ID NO: 6897 - protein, 257 aa, Heliobacillus mobilis
MTWKISKVPWARLNIDRSVGRLKCWQGGASAAKGLLDRFIATKLEHYGERRNDPSLEYVSSLSPYLHFGQISPLYMALRVQESNIRASVDAYLEELIVRRELSINFVHYNLRYDEFTALPEWARQTLYTHRVDCREFNYGLSELENGLTDDPFFNAAQTELRKRGIIHGYMRMYWGKKILEWSPSPEEAFQIALYLNDKYALDGRDPNGYTGVAWCFGKHDRPWGERAIFGKVRYMNAAGLRRKFNAMAYVQKVEEL

SEQ ID NO: 6898 - protein, 433 aa, Glycine max
MAQILAPSTQWQMRISKSSPNASPITSNMWSSLLWKQNKKVSPTSSAKFRVMLAIKSDNSIINRLEGLLNLDITPFTDKIIAEYIWIGGTGIDVRSKSRTISKPVEHPSELPKWNYDGSSTGQAPGDDSEVILYPQAIFKDPFRGGNNILVICDSYTPQGEPIPTNKRHRAAEIFSNPKVQAEVPWYGIEQEYTLLQTNVKWPLGWPVGGYPGPQGPYYCSAGADKSFGRDISDAHYKACLYAGINISGTNGEVMPGQWEYQVGPSVGIEAGDHIWASRYILERITEQAGVVLSLDPKPIEGDWNGAGCHTNYSTKSMREDGGFEVIKKAILNLSLRHKDHISAYGEGNERRLTGKHETASINTFSWGVANRGCSIRVGRDTEKNGKGYLEDRRPASNMDPYVVTSLLAETTLLWEPTLEAEALAAQKLALKV

SEQ ID NO: 6899 - protein, 188 aa, Zea mays
  unsure (1)..(188): unsure at all Xaa locations
MSSDGEKVPKRAESPVADSENDGGNTDGLHRRLNNRQVQLLSIGGTVGTGLFIGIGXGLAKSGPGSLLVCTALYAMVLGLTNNSIAEMNTYMPXSGGFIRLAGHWVDDALGFMVGWNFFLYEALLIPFEIVAXNLVVSFWSDNVTQAGPTAGFIIAGIIAYGVLNLLAVGVFGEAEFWLALGKALLIF

SEQ ID NO: 6900 - protein, 583 aa, Lycopersicon esculentum
MTRVEDFFSKQIDFCKRKKKIYLAIVASVLLVAAVIGVVAGVKSHSKNSDDHADIMAISSSAHAIVKSACSNTLHPELCYSAIVNVSDFSKKVTSQKDVIELSLNITVKAVRRNYYAVKELIKTRKGLTPREKVALHDCLETMDETLDELHTAVEDLELYPNKKSLKEHVEDLKTLISSAITNQETCLDGFSHDEADKKVRKVLLKGQKHVEKMCSNALAMICNMTDTDIANEMKLSAPANNRKLVEDNGEWPEWLSAGDRRLLQSSTVTPDVVVAADGSGDYKTVSEAVRKAPEKSSKRYVIRIKAGVYRENVDVPKKKTNIMFMGDGKSNTIITASRNVQDGSTTFHSATVVRVAGKVLARDITFQNTAGASKHQAVALCVGSDLSAFYRCDMLAYQDTLYVHSNRQFFVQCLVAGTVDFIFGNGAAVFQDCDIHARRPGSGQKNMVTAQGRTDPNQNTGIVIQKCRIGATSDLRPVQKSFPTYLGRPWKEYSRTVIMQSSITDVIQPAGWHEWNGNFALDTLFYGEYANTGAGAPTSGRVKWKGHKVITSSTEAQAYTPGRFIAGGSWLSSTGFPFSLGL

SEQ ID NO: 6901 - protein, 420 aa, Methanopyrus kandleri AV19
MGVYVAENFTGVYAFDEEGNLIDHEPFPKDPDEIVERLLKRERGEVLEEEEALLSRLDADVINFEGTKADRERLEEVFDGELVVEFPNVAGEVLRERARELAVEVGVVDSEEEYSELVYEVGMKLSKEKVRATVEERDQMIIQAINTIDDIDRILNILTDRVREWYGIHFPEINKIVKKHDDFVTLVAELGHRKNFTYDNIKEVLPEFPDHLAEKLEEAAKDSMGAEMDEKDLAAVQRIAEVARELYEIRRKTADYIDESMDDVAPNVKALVGPLIGARLIALAGGLKEMAKLPASTIQLLGAEKALFRHLTKGTKPPKHGVIFQHPLIHRSPWWQRGKIARALAGKLAIAARIDAYSGEYRGDELRRQLEQRVKEIKEKYPKPPKRKRGGRPPRGRRPRRRRSPRRSRRDRRRRSRRRR

SEQ ID NO: 6902 - protein, 359 aa, Fragaria x ananassa
MAIEQEHRKKASGWAARDSSGVLSPFNFYRRETGEKDVTFKVLYCGICHSDLHMVKNEWGFSTYPLVPGHEIVGEVTEVGSKVQKFKVGDRVGVGCIVGSCRSCENCTDHLENYCPKQILTYGAKYYDGSTTYGGYSDIMVADEHFIVRIPDNLPLDGAAPLLCAGITTYSPLRYFGLDKPGMHVGVVGLGGLGHVAVKFAKAMGVKVTVISTSPKKEEEALKHLGADSFLVSRDQDQMQAAIGTMDGIIDTVSAQHPLLPLIGLLNSHGKLVMVGAPEKPLELPVFPLLMGRKMVAGSGIGGMKETQEMIDFAARHNITADIEVIPIDYLNTAMERLVKADVRYRFVIDIGNTLKVRS

SEQ ID NO: 6903 - protein, 249 aa, Mesorhizobium loti
MPNFAGRFAGRSAVITGGASGIGLAVAQRIVEEGGRISVWDRDPAQIEQAKTVIPGLHGVAIDVADAAGVEGAAARTIEALGGVDILVTSAAITGPNMTTWAYSTEDWQKVIDININGVFYCNRALVPHMLERNYGRIVNIASIAGKEGNPNASAYSTSKAAVIGLTKSLGKELAKTKVTVNCVTPAAVRTAIFKQMSQEHIDFMLSKIPMARFGEVEEVAALICWIASEECSFTTAAVFDVSGGRATY

SEQ ID NO: 6904 - protein, 177 aa, Cicer arietinum
LDIAVRLLEPLKEQFPIISYADFYQLGGVVAVEVTGGPEVPFHPGREDKPEPPPEGRLPDATKGSDHLRDVFGKAMGLSDQDIVALSGGHTIGAAHKERSGFEGPWTSNPLIFDNSYFTELLNGEKEGLLKLPSDKALLSDPVFRPLVEKYAADEDAFFADYAEAHLKLSELGFAEA

SEQ ID NO: 6905 - protein, 297 aa, Listeria monocytogenes
MLKKNNWLQNAVIAMLVLIVGLCINMGSGTKVQAESIQRPTPINQVFPDPGLANAAKQNLGKQSVTDLVSQKELSGVQNFNGDNSNIQSLAGMQFFTNLKELHLSHNQISDLSPLKDLTKLEELSVNRNRLKNLNGIPSACLSRLFLDNNELRDTDSLIHLKNLEILSIRNNKLKSIVMLGFLSKLEVLDLHGNEITNTGGLTRLKKVNWIDLTGQKCVNEPVKYQPELYIANAVKDPDGRWISPYYISNGGSYVDGCVLWELPVYTDEVSYKFSEYINVGETEAIFDGTVTQPIKN

SEQ ID NO: 6906 - protein, 455 aa, Pseudomonas syringae pv. tomato str. DC3000
MSANNNPQTLEWQALSSEHHLAPFSDYKQLKEKGPRIITRAEGVYLWDSEGHKILDGMSGLWCVAIGYGREELADAASKQMRELPYYNLFFQTAHPPVLELAKAISEIAPQGMNHVFFTGSGSEGNDTMLRMVRHYWALKGQPNKKTIISRVNGYHGSTVAGASLGGMTYMHEQGDLPIPGIAHIPQPYWFGEGGDMTPDEFGVWAAEQLEKKILELGVENVAAFIAEPVQGAGGVIVPPESYWPKIKEILSRYDILFAADEVICGFGRTGEWFGSDFYGLKPDMMTIAKGLTSGYVPMGGLIVRDEIVAVLNEGGDFNHGFTYSGHPVAAAVALENIRILREERIVERVKSETAPYLQKRLRELNDHPLVGEVRGVGLLGAIELVKDKVTRERYTDKGAGMICRTFCFENGLIMRAVDDTMIIAPPLVISFAQIDELVEKARTCLDLTLAALQS

SEQ ID NO: 6907 - protein, 198 aa, Rhynchoryza subulata
GQTPMFPRIFGHEAGGIVESVGEGVTDLAPGDHVLPVFTGECKECPHCKSAESNMCDLLRINTDRGVMIGDGKSRFSINGKPIYHFVGTSTFSEYTVMHIGCVAKINPEAPLDKVCVLSCGISTGLGATINVAKPPKGSTVAIFGLGAVGLAAAEGARIAGASRIIGVDLNPNRFEEARKFGCTEFVNPKDHDKPVQQ

SEQ ID NO: 6908 - protein, 145 aa, Retama raetam
MPTRATGTITQDWETVVLHKSKPKAQDLRNPKAISQALRAGAEVQTIKKFDAGSNEKTAGPVVYARKLDEAAEPAALERVAGEVRHAIQKARLEKKMSQAEVAKQINERPQVVQEYENGKAVPNQAVLAKMERVLGVKLRGKIGK

SEQ ID NO: 6909 - protein, 457 aa, Streptomyces clavuligerus
MGEAARHPDGDFSDVGNLHAQDVHQALEQHMLVDGYDLVLDLDASSGVWLVDAVTQKRYLDLFSFFASAPLGINPPSIVEDPAFMRELAVAAVNKPSNPDLYSVPYARFVKTFARVLGDPRLRRLFFVDGGALAVENALKAALDWKAQKLGLAEPDTDRLQVLHLERSFHGRSGYTMSLTNTEPSKTARFPKFGWPRISSPALQHPPAEHTGANQEAERRALEAAREAFAAADGMIACFIAEPIQGEGGDNHLSAEFLQAMQRLCHENDALFVLDEVQSGCGITGTAWAYQQLGLQPDLVAFGKKTQVCGVMGGGRIDEVPENVFAVSSRISSTWGGNLADMVRATRLLETIERTQVFDTVVQRGKYFRDGLEDLAARHPSVVTNARGRGLMCAVDLPDTRTRNEVLRLMYTEHQVIALPCGGRSLRFRPALTIAEHEIDQALQALASSVTPVAESV

SEQ ID NO: 6910 - protein, 179 aa, Schizosaccharomyces pombe
ATKAVCVLKGDGPVQGIINFEQKESNGPVKVWGSIKGLTEGLHGFHVHEFGDNTAGCTSAGPHFNPLSRKHGGPKDEERHVGDLGNVTADKDGVADVSIEDSVISLSGDHCIIGRTLVVHEKADDLGKGGNEESTKTGNAGSRLACGVIGIRGPGLWERQAREHSERKKRRRESECKAA

SEQ ID NO: 6911 - protein, 394 aa, Zea mays subsp. mays
LGAARRARLPPGEMGWPLVGGMWAFLRAFKSGKPDAFIASFVWRFGRTGVYRSFMFSSPTVLVTTAEGCKQVLMDDDAFVTGWPKATVALVGPRSFVAMPYDEHRRIRKLTAAPINGFDALTGYLPFIDRTVTSSLRAWADHGGSVEFLTELRRMTFKIIVQIFLGGADQATTRALERSYTELNYGMRAMAINLPGFAYRGALRARRRLVAVLQGVLDERRAARAKGVSGGGVDMMDRLIEAQDERGRRLDDDEIIDVLVMYLNAGHESSGHITMWATVFLQENPDMFARAKAEQEAIMRSIPSSQQGLTLRDFRKMEYLSQVIDETLRLVNISFVSFRQATRDVFVNGYLIPKGWKVQLWYRSVHMDPQVYPDPTKFDPSRWEGHSPRAGTFL

SEQ ID NO: 6912 - protein, 176 aa, Zea mays; identical to SEQ ID NO: 1461

SEQ ID NO: 6913 - protein, 221 aa, Zea mays
  unsure (1)..(221): unsure at all Xaa locations
MEAAAAVLPTLVPSGSAVVVLLAYLGYLAAAGAILPGKLVDGALLPDSSRLHYRCNGLLSLLLLLGLSAFGVYMGWMSPTVVADMGLELLSVTFIFSVIVSFALYIAGIKSGHKSSSLRPHVSGSFMQDGLDQLIFXWWFGVQLNPHFMEVDLKFFFVRAGMMAWLFINLSLLXKSYLAGSANLSVILYQFFCAWYIIDYFVHERFHDSTWDIIAERLGFM

SEQ ID NO: 6914 - protein, 198 aa, Oryza rufipogon
GQTPVFPRIFGREAGGIVESVGEGVTDLAPGDHVLPVFTGECKECAHCKSAESNMCDLLRINTDRGVMIGDGKSRFSINGKPIYHFVGTSTFSEYTVMHVGCVAKINPAAPLDKVCVLSCGISTGLGATINVAKPPKGSTVAIFGLGAVGLAAAEGARIAGASRIIGIDLNANRFEEARKFGCTEFVNPKDHDKPVQQ

SEQ ID NO: 6915 - protein, 432 aa, Triticum aestivum
YHIGAASIARSLASYFIQFLELIPSVKGNVPSWIGHGEEFFGGVISVNILAPILLVILTVILCRGVKESSAVNTFMTTLKIIIVIVVVFAGVFEVDVSNWSPFMPNGFKAVVTGSTVVFFAYVGFDAVANSAEEAKNPQRDLPIGILGSLLACVILYVAVCLVITGMLPYTLLGEDAPLAEAFSAKGLKFVTVLISIGAVAGLTTTLLVGLYVQSRLYLGLGRDGLLPSIFSKVHPTLHTPLHSQIWVGCVAAVLAGLFNVHALSHILSVGTLTGYSVVSACVITLRWSDKATNSRSLGKISIWQEGVFCLVIVALCGFIAGISYRFSYSIAFIIIAFLIATAGSFSLLFRQVYVPVDPPRFSCPGVPMVPIVSVFFNMFLFAQLHEEAWYRFVILSFIAVGVYAGYGQYNAVPSTSDHSSVAYHGVPSEAP

SEQ ID NO: 6916 - protein, 542 aa, Bacillus anthracis str. Ames
MFLNTNEILDYSALKYMPNLKSLTVANAKIKDPSFFANLKQLNHLALRGNEFSDVTPLVKMDHLDSLDLSNNKITNVAPLIEMKNVKSLYLSGNQIEDVTALAKMEQLDYLNLANNKITNVAPLSALKNVTYLTLAGNQIEDIKPLYSLPLTDLVLTRNKVKDLSGIEQMKQLEELWIGKNEIKDVTPLSKMTQLKQLHLPNNELKDITPLSSLVNLQKLDLEANYISDLTPASNLKKLVFLSFVANEIRDVRPVIELSKTAYINVQNQKVFLEETEVNKEVKVPIYEKDGKISTKIRLKGEGGTYSNDAVKWSTPGEKVYEFGVKDPFADTGIFFTGSVIQNVVESKADNTSKEDNTSKEDAKVEVVEFKDVPKGHWSEEAIHYLAKENIFKGYGNGQFGFGDSITRGQVASLVQRYLKLENKVEQKERFTDTKGHMFEQDIATVAQAGIMQGDGTGEFRPDGVLTRYEMSVVLYKVFQLKEDGNNKVNFKDVPTGHWAEGYVKALVDNNISKGDGKERFLGDDFVTREQYAQFLYNAITK

SEQ ID NO: 6917 - protein, 68 aa, Glycine max
MYLFYSCASYFLYSLVRCSILSLLQFHYAVFFAYMRLREQEIRNLMWISECVAQNQKSRVHDSVVFIF

SEQ ID NO: 6918 - protein, 224 aa, Oryza sativa
MVGTSSWSSSSSSSLGSLDDDIIVACVVKAADAAVEGACVKFLCSYGGRILPRHADGALRYVGGDNRVVSVDRSLPFHELQRKLREMCGWEAVCLRCQLPTEDLDALVSVNGDDDLANLLEEYDAASRDRLQPLKIRAFLFPRTTATTTAPLSRSPSPTAASRTAPRAHYQHQTGSAPSCASRWAARQMSLPPARVPHQQQHYNRHGGDARPQRYLVQSASSRW

SEQ ID NO: 6919 - protein, 328 aa, Triticum aestivum
MGMPAVRRRERDAEAELNLPPGFRFHPTDDELVEHYLCRKAAGQRLPVPIIAEVDLYRFDPWALPDRALFGTREWYFFTPRDRKYPNGSRPNRAAGNGYWKATGADKPVAPRGGRTMGIKKALVFYAGKAPKGVKTDWIMHEYRLADAGRAAASKKGSLRLDDWVLCRLYNKKNEWEKMQLQQQGGEEMMVEPKAENTASDMVVTSHSHSQSQSHSHSWGEARTPESEIVDNDPSLFQQAAAAFQAQSPAAAAAHQEMMATLMVPKKEAADEAGRNDLFVDLSYDDIQSMYNGLDMMPPGDDLLYSSLFASPRVRGSQPGAGGMPAPF

SEQ ID NO: 6920 - protein, 371 aa, Glycine max
MEAIRKQASKLREQVARQQQAVLKQFGAGGYGGSDNMVTDEVELQQHQKLEKLYISTRAGKHYQRDIVRGVEGYIVTGSKQVEIGTKLSEDSRKYGADNTCTSGSTLSRAALNYARARAQMEKERGSLLKALGTQVAEPLRAMVMGAPLEDARHLAQRYDRMRQEAEAQAIEVSKRQAKVRETPGNAENAMKLEAAETKLQDLKTNMAILGKEAAAAMAAVEAQQQRLTLQRLIAMVEAERAYHQRVLQILDQLEGEMISERQRIEAPPTPSVDSSMTPPPSYEEVNGVYASQAHNGSTDSMGYFLGEVLFPYHAESEVELNLSVGDYIVIRKVTNNGWAEGECKGKAGWFPFGYIERRERVLASKVAEVF

SEQ ID NO: 6921 - protein, 324 aa, Salmonella typhimurium LT2
MQYNTLGNTDLRVSRLCLGCMTFGEPSRGNHAWTLPEESSRPIIKRALEGGINFFDTANSYSDGSSEEIVGRALRDFARRDEVVVATKVFHRVGDLPEGLSRAQILRSIDDSLARLGMEYVDILQIHRWDYTTPIEETLEALNDVVKAGKARYIGASSMHASQFAQALALQKQHGWAPFVTMQDHYNLIYREEEREMLPLCWQEGVAVIPWSPLARGRLTRPWGETTARLVSDDVGKNLYDESDKNDAQIAERLAGVSEALGATRAQVALGWLLSKRGVAAPIIGASREEQLDELLNAVDLTLKPEQIAELETPYKQHPVVGFK

SEQ ID NO: 6922 - protein, 380 aa, Zea mays
  unsure (1)..(380): unsure at all Xaa locations
PDSIGAPPRARHGGGEATRRRLCLCLLVAAVSWALLAAVARCDPQVPCYFIFGDSLVDNGNNNYIVSLARANYPPYGVDFAAGPSGRFTNGLTTVDVIAQLLGFDNFIPPFAATSADQLLGGANFASAAVGIRAETGQQLGGRIPFAGQVPSYQXAGHTLATILGDQDTAADHLSRCIFSVGMGGGDYLNNYFMPAFYNTGSRYTPEQFADSLIADYRRHLRVLYNYGARKVVMIGVGQVGCSPNELARYSADGVTCVDRIDDAIQMFNRRLVGLVDEFNALPGAHFTFINAYNIFDDILANAASYGFTVTNAGCCGVGRNNGQVTCLPYQAPCANRDQHIFWDAFHPSEAANIIVGRRSYRAESPNDVYPMDISTLASI

SEQ ID NO: 6923 - protein, 218 aa, Arabidopsis thaliana
MSQEEQPKRPQEPVTYGDVFEVSGELADKPIAPEDANMMQAAETRVFGHTQKGGAAAVMQSAATANKRGGFVHPGDTTDLAAERGVTVAQTDVPGARVTTEFVGGQVVGQYVEPRPVATAAVYGKQKLVGLSLQSAITIGEALEATVQTAGNKPVDQSDAAAIQAAEVRACGTNVIAPGGIAASAQSAANHNATIDRDEDKIKLIDVLAGCDREVSRR

SEQ ID NO: 6924 - protein, 360 aa, Wimmeria acuminata
AVQSQKLAVRAISQLQSLPGGDIKLLCDTVVESVRHLTGYDRVMVYKFHEDEHGEVVAERKRPDLEPYIGLHYPATDIPQASRFLFKQNRVRTIVDCHASPVRVIQDDGLMQPLCLVGSTLRAPHGCHAQYMENMGSIASLAMAVIINGNDEEVIGVRNATRLWGLVVCHHTSARCIPFPLRYACEFLMQAFGLQLNMDLQLAAQLSEKHVWKTRTLLCDMLLRDSPAGIVTQSPSIMDLVKCDGAALYYQGNYYPLGVTPTEAQITDIVGWLLDFHGDSTGLSTDSLADAGYPGAALLGDAVCGMAVAYITNRDFLFWFRSHTAKEIKWGGAKHHPEDRDDGQRMHPRSSFQAFLEVVK

SEQ ID NO: 6925 - protein, 505 aa, Mycobacterium leprae
MATLAESPEPKSGASRAGVLGEEAGYHKGLKPRQLQMIGIGGAIGTGLFLGAGGRLAKAGPGLFLVYAVCGVFVFLILRALGELVLHRPSSGSFVSYAREFFGEKAAYVVGWLYFLDWAMTAIVDTTAIATYLHRWTIFTALPQWTLALLALAVVLVMNLISVEWFGELEFWAALIKVCALMAFLVVGTIFLGGRYPVDGHNTGLSLWTSHGGLFPTGVAPLIVVSSGVMFAYAAVELVGTAAGETVEPKKIMPRAINSVIARIAIFYVGSVILLALLLPYSAFKASESPFVTFFSKVGFYGAGDLMNIVVLTAALSSLNAGLYATGRVMHSIAINGSGPKFTARMSKNGVPYGGILLAAVICLCGVALNAFNPGQAFEIVLSVAALGIIAGWGTIVLCQLRLHKMAKAGIMRRPRFRMPLAPYSGYLTLAFLFAVLVVMAFDKPIGTWTVASLIVIVPALIAGWYSIRKRVMTIARERMGYTGPFPAIANPPVQPSERSHSQNP

SEQ ID NO: 6926 - protein, 388 aa, Glycine max
MSIFSRLRHYSTTSILSPNSSTPLTSKQKTRSAIHLLKSETNPERILDICRAAALTPDSHIDRRAFSLAVSKLAAAHHFTGIRTFLDDLKTRPDLRNEKFLSHAIVLYGQANMLDHAIRTFTEDLPSPRSVKTLNSLLFAALLAKNYKELTRIYLEFPKTYSIQPNLDTYNTVIKAFAESGSTSSVYSVLAEMDKNNIAPNVTTLNNSLSGFYREKKFDDVGKVLKLMEKYSVFPSISTYNVRIQSLCKLKRSSEAKALLEGMVCNGRKPNSVSYACLIHGFCKEGDLEEAKRLFRDMKRRGYLPDGECYFTLVHFLCCGGEFEAALEVAKECMGKGWVPNFTTMKSLVNGLAGALKVDEAKEVIKQIKEKFAESGDKWDEIEAGLPQ

SEQ ID NO: 6927 - protein, 195 aa, Zea mays subsp. mexicana
APLDKVCVLSCGISTGLGASINVAKPPKGSTVAVFGLGAVGLAAAEGARIAGASRIIGVDLNPSRFEEARKFGCTEFVNPKDHNKPVQEVLAEMTNGGVDRSVECTGNINAMIQAFECVHDGWGVAVLVGVPHKDAEFKTHPMNFLNERTLKGTFFGNHKPRTDLPNVVELYMKKELEVEKFITHSVPFAEINKA

SEQ ID NO: 6928 - protein, 276 aa, Glycine max
MEGLAMLKQLIAQLQHLFDTYHSQSSLIFQQQHPRWTTSLDIEDNSVDDFCGLVMTAGKSGSFRMSEPGKPPPTKKSRRDRSRGKSSGRSCTTEVMEQEIWKDFPEDLFEAVIARLPISTFFRFRSVCRQWNSMLNSQSFSQHCTQVTQENPWFYTITHENVNSGAMYDPSLKKWHHPTISTPPTKLIVLPVASAGGLVCFLDIGHRNFFVCNPLTQSFKELPARSVKVWSRVAVGMTANGNSAGSGYKIVWVGCDGEYEVYDSVRNSWSRPGNMP

SEQ ID NO: 6929 - protein, 458 aa, Shigella flexneri 2a str. 2457T
MKNASTVSEDTASNQEPTLHRGLHNRHIQLIALGGAIGTGLFLGIGPAIQMAGPAVLLGYGVAGIIAFLIMRQLGEMVVEEPVSGSFAHFAYKYWGPFAGFLSGWNYWVMFVLVGMAELTAAGIYMQYWFPDVPTWIWAAAFFIIINAVNLVNVRLYGETEFWFALIKVLAIIGMIGFGLWLLFSGYGGEKASIDNLWRYGGFFATGWNGLILSLAVIMFSFGGLELIGITAAEARDPEKSIPKAVNQVVYRILLFYIGSLVVLLALYPWVEVKSNSSPFVMIFHNLDSNVVASALNFVILVASLSVYNSGVYSNSRMLFGLSVQGNAPKFLTRVSRRGVPINSLMLSGAITSLVVLINYLLPQKAFGLLMALVVATLLLNWIMICLAHLRFRAAMRRQGRETQFKALLYPFGNYLCIAFLGMILLLMCTMDDMRLSAILLPVWIVFLFVAFKTLRRK

SEQ ID NO: 6930 - protein, 374 aa, Plagiopteron suaveolens
ALSIAGAVQSQKLAVRAISQLQSLPGGDIKLLCDTVVQSVRDLTGYDRVMVYKFHEDEHGEVIAESKRPDLEPYIGLHYPATDIPQASRFLFKQNRVRIIVDCHASPVSVIQDDGLMQPLCLVGSTLRAPHGCHAQYMDNMGSIASLAMAVIINGNDEDGTGGRNPTRLWGLVGWHHPSARCIPFPLRYACEFLMQAFGLQLNMELQLAAQLLEKHVLKTQTLLCDMLLRESPTGIVTQSPSIMDLVKCDGAALYYQANYYPLGVTPTEAQIKDIVEWLLAFHGDSTGLSTDSLADAGYPGATLLGDAVCGMAVAYITNRDFLFWFRSHTAKEIKWGGAKHHPEDKDDGQRMHPRSSFKAFLEEVKSRSLPWEN

SEQ ID NO: 6931 - protein, 291 aa, Listeria monocytogenes
GPLGSETITVPTPIKQIFSDDAFAETIKDNLKKKSVTDAVTQNELNSIDQIIANNSDIKSVQGIQYLPNVTKLFLNGNKLTDIKPLANLKNLGWLFLDENKVKDLSSLKDLKKLKSLSLEHNGISDINGLVHLPQLESLYLGNNKITDITVLSRLTKLDTLSLEDNQISDIVPLAGLTKLQNLYLSKNHISDLRALAGLKNLDVLELFSQECLNKPINHQSNLVVPNTVKNTDGSLVTPEIISDDGDYEKPNVKWHLPEFTNEVSFIFYQPVTIGKAKARFHGRVTQPLKE

SEQ ID NO: 6932 - protein, 225 aa, Asparagus officinalis
MGRGKIEIKKIENPTNRQVTYSKRRSGIMKKAKELTVLCDAQVSLIMFSSTGKFSEYCSPGSDTKAIFDRYQQATGINLWSAQYEKMQNTLKHLKEINHNLRKEIRQRTGEELDGMDIEELRGLEQNLDEAIKLVRHRKYHVISTQTDTYKKKLKHSQEAHRSLLRDLDMKDEHPVYGFVDEDPSNYEGALALANGGSHVYAFRVQPSQPNLHGMGCGPHDLRLA

SEQ ID NO: 6933 - protein, 326 aa, Glycine max
MEAQEFFQNTFCPQFPSGTNITPSNANPSAATADHFLVEDFFDFSNDDNDATAVTDATFDSLPTDVDSPNVTPLDSTTKNSNLPSSSSADAHFSGDLSVPYDDLAELEWLSKFAEESFSSEDLQKLQLISGVRAQNDAASSETRDPNPVMFNPQVSVRGKARSKRTRGPPCNWTSRLVVLSPNTTSSSSNSDAGKKPATPRRREAAFAEGGSEGRKCLHCATDKTPQWRTGPMGPKTLCNACGVRYKSGRLVPEYRPAASPTFVLTKHSNSHRKVLELRRQKEMVKVQQHQFLQLHQQNMMFDVPSSNGEDYLIHQHVGPDYTHLI

SEQ ID NO: 6934 - protein, 152 aa, Zea mays; identical to SEQ ID NO: 515

SEQ ID NO: 6935 - protein, 181 aa, Rhodospirillum rubrum
MILTTDRLVLRPFRFSDAAAIIAYATAPDFIRFLPIPLANPERAADFVAQRVREGQPDGLGDWHFVVQCRGGGAPVGAVRLGLRDEENRQGDVGYVLHPAARGQGLATEAVRGLLDFGFRLLDLERIWASADVDNRASWRVMERVGMRREGVSRHTMRVDGVWRDSVLYAVLAGDAAARAL

SEQ ID NO: 6936 - protein, 145 aa, Triticum aestivum; identical to SEQ ID NO: 1823

SEQ ID NO: 6937 - protein, 358 aa, Escherichia coli O157:H7 EDL933
MKALARFGKAFGGYKMIDVPQPICGPEDVVIEIKAAAICGADMKHYNVDSGSDEFNSIRGHEFAGCIAQVGEKVKDWKVGQRVVSDNSGHVCGVCPACEQGDFLCCTEKVNLGLDNNTWGGGFSKYCLVPGEILKIHRHALWEIPDGVDYEDAAVLDPICNAYKSIAQQSKFLPGQDVVVIGTGPLGLFSVQMARIMGAVNIVVVGLQEDVAVRFPVAKELGATAVVNGSTEDVVARCQQICGKDNLGLVIECSGANIALKQAIEMLRPNGEVVRVGMGFKPLDFSINDITAWNKSIIGHMAYDSTSWRNAIRLLASGAIKVKPMITHRIGLSQWREGFDAMVDKTAIKVIMTYDFDE

SEQ ID NO: 6938 - protein, 364 aa, Buchnera aphidicola (Uroleucon sonchi)
MKKKYRIAVLPGDGIGPEVMREAYKILNILKYHFSLPLEIEEFDVGGSAIDKEGVALPKKTLLGCENADAILFGSVGGRKWDSLPIDQRPERASLLPLRKHFNLFANLRPAQLYSELKYLSPLAFLIVIKNGFNILCVRELTGGIYFGQPSGRSKTNNFEYAFDTEVYYDYEINRIAHLAFQLAQTRNYKVCSIDKSNVLNSSILWREIVKKVSLSYPNVHLSHLYIDNATMQIIKDPNQFDVLLCSNLFGDIISDECAIITGSIGMLPSASLNEKKFGLYEPAGGSAPDIEGKNIANPIAQILSVSMLVRYSMNLKNIADKIDYSVISILKKGYKTADIAHDNNYLKTNEMGDVIADALISGE

SEQ ID NO: 6939 - protein, 91 aa, Oxalis spiralis
INISGTNGEVMPGQWEYQVGPSVGIEAGDHIWASRYILERITEQAGVVLTLDPKPIDGDWNGAGCHTNYSTKSMRDEGGFEVIKKAILNLS

SEQ ID NO: 6940 - protein, 182 aa, Kluyveromyces lactis
MSKENQNVVLVSVEGERFVVDRKIAERSLLLKNYLQDLNSGDLHDDNDADDDEDDEEDGDDEIVMPVPNVRSSVLQKVIEWAVHHKDSNFPDEDDDDSRKAAPVDPWDREFLKVDQEMLYEIILAANYLNIKPLLDAGCKVVAEMIRGRTPEEIRRTFNIVNDFTPEEEAAIRRENEWAEDR

SEQ ID NO: 6941 - protein, 367 aa, Oryza sativa
  unsure (1)..(367): unsure at all Xaa locations
XGRGKSQATSPQIDRDSRFVQAYGRLRDDLVGDDSCELTDEARRWLAQMIDYNVPGGKLNRGLSVIDSYLLLKQGSEVTEDDFFLACVLGWCVEWFQACALLLDDIMDDSHTRRDQICWYRRPEVGLRGINDGIILKCHILIMIKKYFREKPYFLDILEIWSEIALQTSLGQMLDLYSTHTGADDLAKYSIEGYRRIVKYKTAYYSFYLPVANALLLSGAKLEDFSGLKDILIEMGIYFQIQDDYLDCFADPNTIGKIGTDIEDHKCSWLIVQALGHADNNQIEVLHRNYGKKDSSSVSEVKRTYAALDLKDIFSEFERRCYNHLDQQIIPLPAFSFTGIGDGHAAEAQKRHGFSLRAHPPLRPCVA

SEQ ID NO: 6942 - protein, 114 aa, Desulfovibrio desulfuricans G20
MNIYVGNLSYQMSEDDLRGAFEEFGAVDKVRIITDHDTGRSKGFGFVEMAEDSEANAAIEALNGREMGGRSITVNEARPRPERSGGGGGGFRRSGGGGGYGNRGGQGGGYGRRY

SEQ ID NO: 6943 - protein, 286 aa, Saccharomyces cerevisiae
TYTTRQIGAKNTLEYKVYIEKDGKPVSAFHDIPLYADKENNIFNMVVEIPRWTNAKLEITKEETLNPIIQDTAKGKLRFVRNCFPHHGYIHNYGAFPQTWEDPNVSHPETKAVGDNDPIDVLEIGETIAYTGQVKQVKALGIMALLDEGETDWKVIAIDINDPLAPKLNDIEDVEKYFPGLLRATNEWFRIYKIPDGKPENQFAFSGEAKNKKYALDIIKETHDSWKQLIAGKSSDSKGIDLTNVTLPDTPTYSKAASDAIPPASPKADAPIDKSIDKWFFISGSV

SEQ ID NO: 6944 - protein, 379 aa, Arabis drummondii
MSTTGQIIRCKAAVAWEAGKPLVMAEVEVAPPQKHEVRIKILFTSLCHTDIYFWEAKGQTPLFPRIFGHEAGGIVESVGEGVTDLQPGDHVLPVFTGECGDCRHCHSEESNMCDLLRINTERGVMIHDGESRFSINGKPIYHFVGTSTFSEYTVVHSGQVAKINPDAPLDKVCIVSCGLSTGLGATLNVAKPKKGQSVAIFGLGAVGLAAAEGARIAGAFRVIGVDLNPKRFDEAKKFGVTEFVNPKDHDKPVQQVIAEMTDGGVDRSVECTGSVQAMIQAFECVHDGWGVAVLVGVPSKDDAFKSHPMNFLNERTLKGTFFGNYKPKTDIPGIVEMYMNKELELEKFITHTVPFSGINKAFDYMLKGESIRCIIPMGA

SEQ ID NO: 6945 - protein, 601 aa, Saccharomyces cerevisiae
MSNTSSYEKNNPDNLKHNGITIDSEFLTQEPITIPSNGSAVSIDETGSGSKWQDFKDSFKRVKPIEVDPNLSEAEKVAIITAQTPLKHHLKNRHLQMIAIGGAIGTGLLVGSGTALRTGGPSLLIGWGSTGTMIYAMVMALGELAVIFPISGGFTTYATRFIDESFGYANNFNYMLQWLVVLPLEIVAASITVNFWGTDPKYRDGFVALFWLAIVIINMFGVKGYGEAEFVFSFIKVITVVGFIILGIILNCGGGPTGGYIGGKYWHDPGAFAGDTPGAKFKGVCSVFVTAAFSFAGSELVGLAASESVEPRKSVPKAAKQVFWRITLFYILSLLMVGLLVPYNDKSLIGASSVDAAASPFVIAIKTHGIKGLPSVVNVVILIAVLSVGNSAIYACSRTMVALAEQRFLPEIFSYVDRKGRPLVGIAVTSAFGLIAFVAASKKEGEVFNWLLALSGLSSLFTWGGICICHIRFRKALAAQGRGLDELSFKSPTGVWGSYWGLFMVIIMFIAQFYVALFPVGDSPSAEGFFEAYLSFPLVMVMYIGHKIYKRNWKLFIPAEKMDIDTGRREVDLDLLKQEIAEEKAIMATKPRWYRIWNFWC

SEQ ID NO: 6946 - protein, 152 aa, Zea mays; identical to SEQ ID NO: 631

SEQ ID NO: 6947 - protein, 263 aa, Zea mays; identical to SEQ ID NO: 6793

SEQ ID NO: 6948 - protein, 300 aa, Triticum aestivum
  unsure (1)..(300): unsure at all Xaa locations
MSGGRELNLPPGFRFHPTDEXELVTHYLCRRCAGAPIAVPIITEIDLYKFDPWQLPKMALYGEKEWYFFSPRDRKYPNGSRPNRAAGSGYWKATGADKPVGTPKPLAIKKALVFYAGKAPKGEKTNWIMHEYRLADVDRSARKKNSLRLDDWVLCRIYNKKGGMEKPASVDRKPAAMGGYGGGPGAMASSPPEQKPVMGMNANGGGGGAQPFRDFAAYYDRPSDSMPRLHADSSCSEQVLSPEFPAGEVQSQPKISEWERSFASGGDPVNPAAGSMLEPNGGFGGDPLLQDILMYWGKPF

SEQ ID NO: 6949 - protein, 430 aa, Brassica napus
DNSYTLSFLLVFFILILFRPAFSINTLSSTESLTISSNRTLVSPCNVFELGFFRTTSSSRWYLGIWYKKLSNRTYVWVANRDSPLSNAVGTLKISNMNLVLLDHSNKSVWSTNATRGNERSPVVAELLANGNFVMRDSHNNEASGFLWQSFDYPTDTLLPEMKLGYDLKKGLNRYLTSWRNSDDPSSGEISYQIDNQTGIPEFYLLQSGVRVHRSSPWNGVRFSGIPEDQKLGYMVYNFTENSEEVAYTFRITNNSIYSRLKVSSEGFLERLTWTPNSTTWNLFWYLPLENQCDMYMICGSYAYCDVNTSPLCNCIQGFIPWNKQQWDQRDLSGGCKRRTRLSCSGDGFTRMKNMKLPETTMAIIDRSIGEKECEKRCLSDCNCTAFANADIRNGGTGCVIWTGRLDDMRNYVADHGQDLYVRLAAADLV

SEQ ID NO: 6950 - protein, 159 aa, Zea mays
MAAADVEYRCFVGGLAWATSNESLENAFASYGEILDSKVITDRETGRSRGFGFVTFSSENSMLDAIENMNGKELDGRNITVNQAQSRGGGGGGGGGGYGGGRGGGGYGGGRRDGGYGGGGGYGGRREGGGGGYGGGGGYGGRREGGGGGYGGGGGGWRD

SEQ ID NO: 6951 - protein, 161 aa, Zea mays
  unsure (1)..(161): unsure at all Xaa locations
MELATNSVADAIDAESGVVTYHLHCASTFFSLNRLAISAIHAADPANNNXPAASADDAAKSSASATATSENNPXGVGREYADSCNAKXVLQLPENTKREELDTVLKTIETXPPAVFHGEEHHLEDGMVDAVMERAFVLHGGHCGESFIEVHANDIRDIFRI

SEQ ID NO: 6952 - protein, 447 aa, Lycopersicon esculentum
MASWVLSECGLGPLPKIYPKPTIGFSSSVSVSATSLNLRRISPSPIRTDRNCWALRVSAPLRIQIAGEEEEQTTNNGDEFFDPGAPPPFKLSDIKAAIPNHCWVKNPWTSMSYVVRDVAIVFGLAAAAAYFNNWLVWPLYWFAQSTMFWPLYWFAQSTMFWALFALGHDCGHGSLSNNHSLNSVAGHILHSSIPVPYHGWRISHRTHHQNHGHVENDESWHPLSEKLYNSLDDITKKFRFTLPFPLLAYPFYLWGRSPGKKGSHFDPNSDLFVASEKKDVITSTVYWTAMAALLVGLSFVMGPLQMLKLYGIPYLGLCHMLDLVAYLHHHGHEDKVPWYRGEEWSYLRGGLTTLDRDYGWINNIHHDIGTHVIHHLFPQIPHYHLVEATEAAKPVLGKYYKEPKKSGPLPFYLLGYLIRSMKEDHFVSDTGNVVYYETDPNLYGSKK

SEQ ID NO: 6953 - protein, 309 aa, Listeria monocytogenes EGD-e
MSLTEMLQIKYPILQGAMAQIATYELASAVSNAGGLGIIASGGMSADALREQIRLCKEKTTKPFAVNIMLMMPNCPELVDVIIEEDVRVVTTGAGTPKPFMEKFKAAGIKVIAVIPSVKIAQKMEEIGVDAVVAEGTEAGGHVGETTTMALVRQVVSAVNIPVIAAGGIADGHGMAAVYALGASGVQIGTLFLVAEECPVPASFKQAVLDATDTSTTVTGRRNGAPVRSIKNPMIQKYVELENENASRDKLEELTLGSLRKAVHEGDVENGSVMAGQICGMLTEIRSTSDIIENLMKESKQVASNLVIQ

SEQ ID NO: 6954 - protein, 77 aa, Oryza sativa
  unsure (1)..(77): unsure at all Xaa locations
LYIEDGKRXKSFKHLIYRNKXGAFIEQLTEKLLIXQEGENLQIVDVRNXQSIEVCRSELGTPSALIFLDEMHLFLTX

SEQ ID NO: 6955 - protein, 565 aa, Actinopolyspora halophila
MTKSVDDLARGDQAGDEQDPVHREQQTFGDNPLEVRDTDHYMHEYVGGFVDKWDDLIDWKKRYESEGSFFIDQLRARGVETVLDAAAGTGFHSVRLLEEGFETVSADGSPQMLAKAFSNGLAYNGHILRVVNADWRWLNRDVHGEYDAIICLGNSFTHLFSERDRRKTLAEFYAMLKHDGVLIIDQRNYDSILDTGFSSKHTYYYAGEDVSAEPDHIDDGLARFKYTFPDKSEFFLNMYPLRKDYMRRLMREVGFQRIDTYGDFQETYGEDEPDFYIHVAEKSYRTEDEFVDMYSNAVHTARDYYNSEDADNFYYHVWGGNDIHVGLYQTPQEDIATASERTVQRMAGKVDISPETRILDLGAGYGGAARYLARTYGCHVTCLNLSEVENQRNREITRAEGLEHLIEVTDGSFEDLPYQDNAFDVVWSQDSFLHSGDRSRVMEEVTRVLKPKGSVLFTDPMASDSAKKNELGPILDRLHLDSLGSPGFYRKELTRLGLQNIEFEDLSEYLPVHYGRVLEVLESRENELAGFIGEEYRAHMKTGLRNWVQAGNGGSLAWGIIHARA

SEQ ID NO: 6956 - protein, 278 aa, Pyrococcus furiosus DSM 3638
MKRVNAFNDLKRIGDDKVTAIGMGTWGIGGRETPDYSRDKESIEAIRYGLELGMNLIDTAEFYGAGHAEEIVGEAIKEFEREDIFIVSKVWPTHFGYEEAKKAARASAKRLGTYIDLYLLHWPVDDFKKIEETLHALEDLVDEGVIRYIGVSNFNLELLQRSQEVMRKYEIVANQVKYSVKDRWPETTGLLDYMKREGIALMAYTPLEKGTLARNECLAKIGEKYGKTAAQVALNYLIWEENVVAIPKASNKEHLKENFGAMGWRLSEEDREMARRCV

SEQ ID NO: 6957 - protein, 234 aa, Oryza sativa
  unsure (1)..(234): unsure at all Xaa locations
SFTXPHLYSPRSRRRGGIFSXKLHNPLPPAAKCXKGKVWLDPNEATRSXMANSAEHXXKLVKDGFIIKKPXKIHSRSRARRAHEAKQKGRHSGYGKRRGTREARLPTKILWMRRMRVLRRLLRKYREAKKIDKHMYHDMYMKVKGNMFKNKRVLMESIHKSKAEKAREKTLSDQFEAKRAKSKASRERKIARREERLAQGPXXEPAAPAVPAQTAAAPKKSKKXTSGMKCDLHD

SEQ ID NO: 6958 - protein, 329 aa, Yersinia pestis CO92
MVYQASSSRYQEMEYHRCGHSGLKLPAISLGLWHNFGDSTRYENSRSLIHRAFDHGITHFDLANNYGPPPGSAELNFGRILQQDLRPYRDELIIASKAGYTMWPGPYGDWGSKKYLVASINQSLQRMGLDYVDIFYHHRPDPNTPLEETMAALDLLVRQGKALYIGLSNYPADQAQLACEILRALGTPCLIHQPKYSMFERGIEAGLQDTLDEYGVGSIAFSPLAGGLLTDRYLAGIPEDSRAASDSKFLSPEQLTPEKLVKIRQLNELALDRGQKLSQMSLAWVLRGGRVTSALIGASKVSQIDDAIGMLANTNFSDKEINAIEHILA

SEQ ID NO: 6959 - protein, 95 aa, Oxalis tuberosa
LYAGINISGTNGEVMPGQWEYQVGPSVGIEAGDHIWASRYILERITEQAGVVLTLDPKPIDGDWNGAGCHTNYSTKSMRDEGGFEVIRKAIFNLS

SEQ ID NO: 6960 - protein, 375 aa, Zea mays
MAAASWSAPTTSFAPAPAPPWGPWRTKAAPLPIRTLPRRVLLNAVGESAMVAAGDTLLGLYEKERLGLLQYADDESKEERYWETLDADLRYWTRSLRPVQWYPGHIAKTEKELKEQLRLMDVVIEIRDARIPLSTSHPKMDSWLGNRKRIIVLNRKDMISTEDMNAWATYFGNQGIKVVFSNGQLGMGTMKLGRMAKSVASVANTKRKEKGLLPRPVRAGIVGYPNVGKSSLINRLLKRRMCPAAPRPGVTRELKWVRFGTDLELLDSPGILPMRISDQTSAIKLAICDDIGERSYDFADVAAILVQMLIRHPAVGSEAFRRRYKIDVDSECGKTFVTKLSVHLFNGDTSQAAFRILSDYRKGKFGWVALERPPT

SEQ ID NO: 6961 - protein, 376 aa, Glycine max
  unsure (1)..(376): unsure at all Xaa locations
MVKDTKPLAYAANNGYQKEAFDPSAPPPFKIAEIRVAIPKHCWVKNPWRSLSYVLRDVLVIAALMAAASHFNNWLLWLIYWPIQGTMFWALFVLGHDCGHGSFSDSPFLNSLVGHILHSSILVPYHGWRISHRTHHQNHGHIEKDESWVPLTEKIYKNLDNMTRLIRFTVPFPLFVYPIYLFSRSPGKEGSHFNPYSNLFPPSERKGIAISTLCWATMFSLLIYLSFITSPLLVLKLYGIPYWIFVMWLDFVTYLHHHGHHQKLPWYRGKEWSYLRGGLTTVDRDYGWINNIHHDIGTHVIHHLFPQIPHYHLVEAXQAAKSVLGEYYREPERSAPLPFHLIKYLIQSMRQDHFVSDTGDVVYYQTDSLLLHSQRD

SEQ ID NO: 6962 - protein, 354 aa, Thermobifida fusca
MSARTVKLAVIPGDGIGPEVVAEGLKVLSAVAPRHGLTLDTTEYELGAQRWHATGEVLPDAVEEELRQHDAILLGAVGDPTVPSGVLERGLLLRLRFNFSHYVNLRPVRLYPGVTTPLAGVAPEDIDMLVVREGTEGPYAGMGGVLRKGTPHEIATQDSVNTRLGVERVVRYAFAKAAERPCHKLTLVHKDNVLTYAGELWQRVVREVGAEYPQVEVDYLHVDAATMFFVTQPRRFDVVVTDNLFGDIITDLGAAVAGGIGLAASGNINPEGDFPSMFEPVHGSAPDIAGQGKADPTATILSVSLMLEHLGYADAAAQIDQAVAEDLQERAKNGGVRSTTQIGDDIAQRVAEQG

SEQ ID NO: 6963 - protein, 828 aa, Cellulomonas biazotea
MTSQTALDPAALVASLPLETKVRLLTGATAFTLAPEESIGLGEVRLSDGPTGVRGLKFSGGRTVALFPNATLLASAWSEESTTEVGRLLAEEALAQQIHVVLGPTINLHRSVLGGRLFEAYSEDPLLTGRLAAAYVRGLQDLGVGACLKHLVANESETERNTMNSVVDPATLRELYLLPFEIAVDESDPWSVMAAYNDVNGVPATEHHHVVNEVLKGEWGYTGLVMSDWFATRTAAPAAAGGLDLVMPGPDGPWGDALVAAVRSGELDESVVDDHLRRLLVLAARVGALGDLRDYPDDLPAPDSAVRREQLTRLAAAGMTVLTNADDTLPLARGTRVALVGRHALETIDMGGGSATVNPPYQVSVAEGLTALLGDAVDVVDGVEVRTRPVPARPGFVVDPDTGRPGLHLTLLAADGTVLDERHDAPSTVMVGFDDDFPQAVARVRFRARVAGEGALEVGAIGVGRWQVTAGGTELAWTLATSGTGFAEEMLAPPTRTDQVHVGSDAVVDATVVLRSSTRSVTVGDADPGTDAGAAAEPLAGVGLFGLVARPAPEAEDDVITRAAAAAAQADVAVVVVGLTEEEETESVDKSTIALPGAQDALVRAVAAAARRTVVVVNAATPVLMPWLDDVDAVLWAGLPGQEGGHAVAAALLGDQEPTGRLVTTFPAADGAAPAWSVTPVDGDLEYTEGRFVGYRGHWADRAPAPAFWLGHGLGYATWEYADATLDTDGDAPAVTVTVTNTGARTSREVVQVYLEPASSDEPVRLVGWADATVDAGASARVTVTADARMWRRWDEAAGGWSRLADGGRLLVARGLGDVRATLALPTA

SEQ ID NO: 6964 - protein, 174 aa, Oryza sativa (japonica cultivar-group)
MATGSGAAAAAAADAEEKESGSRMITLTSNEGKAFVVTEASARQSATIRSMVDDGGCVDKGFPLPNVDSKTLARVIQYCDEHGNKEPHTVDERAALAKFDRDFIAELDADKAFLYDVTMAANYLHIQGLLALTTQCVADTIKGKTPEEIRTAFGIEYDLTAQDEKEIKEEDTHA

SEQ ID NO: 6965 - protein, 58 aa, Metrosideros collina
LVMTDPDVPGPSDPYLREHLHWMVTDIPGTTDATFGKKVVEYEMPRPNIGIHRFESLV

SEQ ID NO: 6966 - protein, 175 aa, Zea mays subsp. mays
RLLAANPVYGKIPVLLLPDGRAICESAVIVQYIEDVARESGGAEAGSLLLPDDPYERAMHRFWTAFIDDKFWPALDAVSLAPTPGARAQAAEDTRAALSLLEEAFKDRSNGRAFFSGGDAAPGLLDLALGCFLPALRACERLHGLSLIDASATPLLDGWSQRFAAHPAAKRVCQT

SEQ ID NO: 6967 - protein, 357 aa, Clostridium pasteurianum
MKEFKIAVIPGDGIGPDIVREAVKIMTKVGEKYDTKFNFVEVKAGGDAIDAYGEPLPKETIDVCKSSAAVLLGAVGGPKWDNLEGSKRPERALLGLRGALGLYANLRPAKVYNVLKSASPLKNEIIDEGVDLLVVRELIGGIYFGDRGTKEVNGVETAFDTEKYNVDEVKRIAHSAFKAAMKRRKKVTSVDKANVLDASRLWRKTVNEVSKEYPEVELSHLYVDNTAMQLVRKPSQFDVILTNNIFGDILSDEASMITGSIGMLASSSIREDSFGMYEPIHGSAPDIAGLDIANPLAQILSAAMLMEYSLDMSEAARDVEAAVEKVLNEGYRTADIYIEGTKKVGTSEMGNLVLERL

SEQ ID NO: 6968 - protein, 353 aa, Schizosaccharomyces pombe
DVHLSKAALEKARQTLQSQLEDKSAHDEVSGLLRNNPAMLSMIEGRLSSLVGKSSGYIESLAPAVQNRITALKGLQKDCDAIQYEFRQKMLDLETKYEKKYQPIFSRRAEIIKGVSEPVDDELDHEEEIFQNNLPDPKGIPEFWLTCLHNVFLVGEMITPEDENVLRSLSDIRFTNLSGDVHGYKLEFEFDSNDYFTNKILTKTYYYKDDLSPSGEFLYDHAEGDKINWIKPEKNLTVRVETKKQRNRKTNQTRLVRTTVPNDSFFNFFSPPQLDDDESDDGLDDKTELLELDYQLGEVFKDQIIPLAIDCFLEEGDLSDFNQMDEEDSEDAYTDEEDLSSDDEEILSSEISD

SEQ ID NO: 6969 - protein, 125 aa, Triticum aestivum
  unsure (1)..(125): unsure at all Xaa locations
HFPFRPRHPSLLLPHPKSTTNKILSFNIHDYFLHAIIPXELPSXLLTQAEYNNLFXCEXVGDIXXHLSTTKYXPYXXNXPSPXHTTTIXXXXTLXXXXXYKHXXXXXNXPLSTFLXYITYXHXIH

SEQ ID NO: 6970 - protein, 495 aa, Chlorobium tepidum TLS
MKNSFRKKPLSLLLEEMKSEHRLNRVLGPLALTSLGVGAIIGTGIFVLIGVAAHDKAGPAVTLSFALAGLACVFAALCYAEFASMAPVAGSAYTYAYATLGELFAWIIGWDLILEYAVASATVAHGWSHYFQDFMGIFGLHIPEIFSRAPLDFDPATGSLVLTGSMFDLPAVIIVLIVTVILVKGIRESAGFNTAMVIVKVAIVLLVIVLGAQYVKPENWQPFAPFGYSGLSVFGHTILGETGAGGAPVGVLAGAAMIFFAYIGFDSISTHAEEARRPERDVPIGIIASLIICTMLYVAVAAVITGMVPYDQINIDAPVSYAFKQVGLDWAQFLVSLGAITGITSVLLVMMLSQPRIFLAMARDGLLPNKFFGVVHPKFKTPWNATILTGIFVAILGAFLPLRLLAELVNIGTLFAFVVVCAAVLIMRRTNPDAERPFRAPLVPFVPIAGILTCLLLMFSLPAENWWRLIVWLLIGFCIYFFYGRHHSVLNQHHD

SEQ ID NO: 6971 - protein, 751 aa, Geobacillus stearothermophilus
MENQNRQNAAQCPFHGSVTNQSSNRTTNKDWWPNQLNLSILHQHDRKTNPHDEEFNYAEEFQKLDYWALKEDLRKLMTESQDWWPADYGHYGPLFIRMAWHSAGTYRIGDGRGGASTGTQRFAPLNSWPDNANLDKARRLLWPIKKKYGNKISWADLFILAGNVAIESMGGKTIGFGGGRVDVWHPEEDVYWGSEKEWLASERYSGDRELENPLAAVQMGLIYVNPEGPDGKPDPKAAARDIRETFRRMGMNDEETVALIAGGHTFGKAHGAGPATHVGPEPEAAPIEAQGLGWISSYGKGKGSDTITSGIEGAWTPTPTQWDTSYFDMLFGYDWWLTKSPAGAWQWMAVDPDEKDLAPDAEDPSKKVPTMMMTTDLALRFDPEYEKIARRFHQNPEEFAEAFARAWFKLTHRDMGPKTRYLGPEVPKEDFIWQDPIPEVDYELTEAEIEEIKAKILNSGLTVSELVKTAWASASTFRNSDKRGGANGARIRLAPQKDWEVNEPERLAKVLSVYEDIQRELPKKVSIADLIVLGGSAAVEKAARDAGFDVKVPFFPGRGDATQEQTDVESFAVLEPFADGFRNYQKQEYSVPPEELLVDKAQLLGLTAPEMTVLVGGLRVLGANYRDLPHGVFTDRIGVLTNDFFVNLLDMNYEWVPTDSGIYEIRDRKTGEVRWTATRVDLIFGSNSILRSYAEFYAQDDNQEKFVRDFINAWVKVMNADRFDLVKKARESVTALQTGDVDRSGESDIRK

SEQ ID NO: 6972 - protein, 362 aa, Geobacter metallireducens
MSQVFKVAVLPGDGIGPEVMAEALRVLDAIEKKYDVKFERTHANVGGAGIDLEGKALPETTITICKTSDAILFGSVGGPKWETLPPDEQPERGALLPLRKIFGLYANLRPAIIFPSLTGASSLKEEVIAGGFNVLVIRELTGGIYFAQPKGIEGEGRDRVGFDTMRYSVPEIERITHVAFQAARKRGKKVCSIDKANVLSSSVLWREVVTGIAKEYPDVELSHMYVDNAAMQLVRWPKQFDVILCENMFGDILSDEAAMLTGSLGMLPSASLAEGTFGMYEPSGGSAPDIAGQGIANPIAQILSMGMMLRFSFGMVDAADAIDNAVAKVLDQGCRTRDIFQEKPGEKLVNTKEMGDAIIVAL

SEQ ID NO: 6973 - protein, 208 aa, Pseudomonas fluorescens PfO-1
MLARSAGGRVTSRSDDCSRMPDMLKRWCAVPALLMALTGLAQAADCPDLLQGSLPKLRAKESIDLCQRYADKPLVVINTASFCGFAPQFEGLEALNQRYKAQGLEMLGVPSNDFKQESKDSAETAKVCYANYGVTFTMTEPQKVRGDDATHLFQVLARQSSAPKWNFYKYVIDRQGKVIANFSSLTKPDDPEFLAAIEKAIASQSLKP

SEQ ID NO: 6974 - protein, 487 aa, Streptomyces avermitilis MA-4680
MSKDAVDTARVASRTDVTQSPADAGDAGYSKDLKARHVNMIAIGGAIGTGLFLGAGGRLHNAGPALAIAYLVCGVFAFFVVRALGELVLYRPSSGSFVSYAREFLGEKGAYVAGWMYFLNWSTTGIADITAIALYTHYWSLFTDIPQWVLALIALAVVLAVNLISVKIFGEMEFWFAIIKVATLVGFMLIGIFLLATHHEVGGHTPGLSAVTDHGGIFPHGMMPVVLVMQGVIFAYAALELVGVAAGETAEPEKVVPRAVNSIMWRVGLFYVGSVVLLALLLPGSVYSADQSPFVTVLSKIGIPAAGDVMNLVVLTAAMSSLNSGLYSTGRILRSMAMAGSAPKFTARMNRSQVPYGGILLTCAVCVLGVGLNYLMPTQAFEIVLNVASLGIISTWVIIMICHLVFVRRARAGLVTRPSFRLFGSPVTEIVTIAFLLAVLGLMWNDPEVGRKTLLLIPLVAVLLVGGWFAVRRRVSQAEDRELAQLK

SEQ ID NO: 6975 - protein, 555 aa, Pseudomonas aeruginosa PAO1
MVTANRLPLEVFFEREKRHPQRRYLVQPIGGGRVEELSWGEVGDQARRAAAWLRTLDLPAGSRIAIISKNCAHWIVTDLAIWMAGHVSVPLYPNLTAESARQVLEHSESAVVFVGKLDDWPAMAPGVPEGIPTVAMPLHPEGRFDRQWSDLQACAPLEGDTPTAAEQLATLIYTSGTTGVPKGVMHNFSSFAFAASRGVELFGTREDDRMLSYLPLCHVAERMFVEMGSLYGGTTVFFAESLDTFVEDMKRARPTLLFGVPRIWTKFQMGVYSKMPAQKLDRLLKLPILGRIVGRKVLAGLGLDAVRYALCGAAPVPEALLLWYRRLGLDVLEVYGMTENSGYSHVCRPGRQKTGWIGQNSPGVEVRISDEGEVQVRSGATMVGYYKEPEKTAEVLTADGFLRTGDKGEQDADGNLRLTGRMKEIFKTSKGKYVAPAPIENRLAVHDRIEQVCVVGEGLSAPLGLCVLSEVGRREALNGTRGALESSLRAHLEQVNGALDKHERLVGLVLVQETWAVDNGFLTPTLKIKRNMVEGAYGSRFHEWVERREAVLWHE

SEQ ID NO: 6976 - protein, 141 aa, Helicobacter acinonychis
CVVIEISKHSNIKYELDKESGALMVDRVLYGAQNYPANYGFVPNTLGADGDPVDVLVLSDMAFQAGSVVKVRLIGVLNMEDESGMDEKLLALPVDKVDPTHSYVKDVNDLSKHTLDKIKHFFETYKDLEPNKWVKVKGFEN

SEQ ID NO: 6977 - protein, 372 aa, Glycine max
GPDSPSTQRPQILQKLKEWNPPMNWPVLKDNEEKKDKKKKGCSEKKRPSPPYILWMKDQWNEIKKANPEAEFKEISTMLGAKWKTVSAEEKKPYEGIYHAEKEAYLQVIAKEKRETEAMRLLEDEQKQRTAMELLEQYMQFKQEAEKDGKKNKKEKDPLKPKHPMSAYFLFTNDRRAALAAENKNFLEVPKITSEEWKSMTEEQKRPYEEMAKKNKEQYALEMEAYKQKKDEEAAHFMKEEEEQMKLQKQEALQLLKKKEKTENIIKKTKQNRQKKKQNKDDKNSDPNRPKKPASSFILFSKEARKTLQEERPGISTSTLNALVSLKWKELSEEDRQFWNGQASKAMDAYKKELEEYNKSLAATACQEQKTE

SEQ ID NO: 6978 - protein, 802 aa, Emericella nidulans
MRSLISVAVLSALAAFSQANTSYTDYNVEANPDLFPLCLQHLNASFPDCATGPLSLTPVCDRSLSPKDRATALVSLFTFDELVNNTGNTGLGVSRLGLPNYQVWGEALHGVGRANFVESGNFSWATSFPMPITMMAALNKTLIHQIGTIVSTQLRAFSNAGLGGVDVYSPNINTFRHPVWGRGQETPGEDAFLTSVYGYEYITALQGAVDPETSKIIATAKHYAGYDIESWNNHSRLGNDMQITQQELSEYYTPPFIVASRDAKVRSVMCSYNAVNGVPSCANKFFLQTLLRDTFEFSEDGYVSGDCGAVYNVWNPHGYASNEAAASADSILAGTDIDCGTSYQWHSEDAFEDSLVSRSDIERGVIRLYSNLVQAGYFDGEDAPYRDITWDDVLSTDAWNIAYEAAVEGIVLLKNDETLPLSKDIKSVAVIGPWANVTEELQGNYFGPAPYLISPLTGFRDSGLDVHYALGTNLTSHSTSGFEEALTAAKQADAIIFAGGIDNTIEAEAMDRENITWPGNQLDLISKLSELGKPLVVLQMGGGQVDSSSLKDNDNVNALIWGGYPGQSGGHALADIITGKRAPAGRLVTTQYPAEYAEVFPAIDMNLRPNETSGNPGQTYMWYTGTPVYEFGHGLFYTTFEESTETTDAGSFNIQTVLTTPHSGYEHAQQKTLLNFTATVKNTGERESDYTALVYVNTTAGPAPYPKKWVVGFDRLGGLEPGDSQTLTVPVTVESVARTDEQGNRVLYPGSYDVALNNERSVVVKFELKGEEAVILSWPEDTTSDFVSSIDGGLDRKQDVIA

SEQ ID NO: 6979 - protein, 579 aa, Zea mays subsp. mays
MKREYQDAGGSGGDMGSSKDKMMAAAAGAGEQEEEDVDELLAALGYKVRSSDMADVAQKLEQLEMAMGMGGVGGAGATADDGFVSHLATDTVHYNPSDLSSWVESMLSELNAPPAPLPPATPAPRLASTSSTVTSGAAAGAGYFDLPPAVDSSSSTYALKPIPSPVAAPSADPSTDSAREPKRMRTGGGSTSSSSSSSSSMDGGRTRSSVVEAAPPATQASAAANGPAVPVVVVDTQEAGIRLVHALLACAEAVQQENFSAAEALVKQIPMLASSQGGAMRKVAAYFGEALARRVYRFRPPPDSSLLDAAFADLLHAHFYESCPYLKFAHFTANQAILEAFAGCRRVHVVDFGIKQGMQWPALLQALALRPGGPPSFRLTGVGPPQPDETDALQQVGWKLAQFAHTIRVDFQYRGLVAATLADLEPFMLQPEGDDTDDEPEVIAVNSVFELHRLLAQPGALEKVLGTVRAVRPRIVTVVEQEANHNSGTFLDRFTESLHYYSTMFDSLEGAGSGQSADASPAAAGGTDQVMSEVYLGRQICNVVACEGAERTERHETLGQWRSRLGGSGFAPVHLGSNA

SEQ ID NO: 6980 - protein, 87 aa, Buchnera aphidicola
GLYEPAGGSAPDIAGKNIANPIAQILSIAMLVRYTMKLPMISDHIESAVIDTLKKGYRTLDIANDKEKYISTNDIGDIISDILKKRI

SEQ ID NO: 6981 - protein, 208 aa, Cicer arietinum
EVSARDLTEISSNTEKDVAEKKNEVTDANYDGFNGGGNYGNGGGYPSNGGGNYGHGGGNYGNGGGNYGHGGNGGGNYGNGGGNYGHGGGNYGHGSNGGGNYGNGGGNYGHGGGNYGHGGNGGGNYGNGGGSYGNGGGNYGHGGGNYGNGGGNYGHGGGNYGHGGGYPGNGGHGGGYPGNGGHGGGHGGHGGGYVGEATDVQREDKTLN

SEQ ID NO: 6982 - protein, 516 aa, Shewanella oneidensis MR-1
MTTPVDAPKWPRQIPYIIASEACERFSFYGMRNILTPFLMTALLLSIPEELRGAVAKDVFHSFVIGVYFFPLLGGWIADRFFGKYNTILWLSLIYCVGHAFLAIFEHSVQGFYTGLFLIALGSGGIKPLVSSFMGDQFDQSNKSLAQKAFDMFYFTINFGSFFASLSMPLLLKNFGAAVAFGIPGVLMFVATVFFWLGRKRYIHMPPEPKDPHGFLPVIRSALLTKVEGKGNIGLVLALIGGVSAAYALVNIPTLGIVAGLCCAMVLVMGFVGAGASLQLERARKSHPDAAVDGVRSVLRILVLFALVTPFWSLFDQKASTWILQANDMVKPQWFEPAMMQALNPLLVMLLIPFNNFVLYPAIERMGVKLTALRKMGAGIAITGLSWIVVGTIQLMMDGGSALSIFWQILPYALLTFGEVLVSATGLEFAYSQAPKAMKGTIMSFWTLSVTVGNLWVLLANVSVKSPTVTEQIVQTGMSVTAFQMFFFAGFAILAAIVFALYARSYQMQDHYRQAT

SEQ ID NO: 6983 - protein, 235 aa, Zea mays
GRVGGRVGGRVGGRVGCAPLMLRLAWHSAGTFDVATKTGGPFGTMKNPAEQAHGANAGLEIAIRLLEPIKEQFPILSYADFYQLAGVVAVEVTGGPDVPFHPGRQDKPEPPPEGRLPDATQGSDHLRQVFSTQMGLSDQDIVALSGGHTLGRCHKDRSGFEGAWTSNPLIFDNSYFTELLSGEKEGLLQLPSDKALLSDPSFRPLVDKYAADEDAFFADYAEAHLKLSELGFAEA

SEQ ID NO: 6984 - protein, 513 aa, Oryza sativa (japonica cultivar-group)
MDSSKQQLAVWPVSAAKKYAGFDGKAAARERSGLANASFRVYYSLRAGAVPFLWESSPGTPKAAAVSSPARESSSAARGALPPISPPPSYQSVEMKKGGRCRPRSSWPAAAAAGDIAPLKGESVKPFPALVLASALTLAASSMVGGGGGGGHGVRTPANFPPRQKARLPRGPVHEKSLEQQKKGPSSSSPSVSSNKSPLQLAAAIVQPQKPLESPQHMVTPVRLQESPGPRTIPCSSGSVGSGSGAAPFDICIKRDDKCSIKLSRSLLEINREKRREREQLSKEAAPLQYLRPGMVLLKKFLKHDDQVDIIRRCQKLGIGSGGFYTPGYRDGGKLSLQMMCLGKNWDPNSRSYGDTRPFDGAQPPSIPEVFSKIVKDAIQASNEFLRQKARPANDVEELPPLSPDICLVNFYTSSGKLGLHQDKDETKPSLHKGLPVVSFSLGDTAEFLYGDVNDVDKASKVDLESGDVLIFGGKSRLIFHGVSRIKPKTAPNWLTDEAKLRPGRLNLTFRQH

SEQ ID NO: 6985 - protein, 435 aa, Saccharomyces cerevisiae
MGENHDHEQSIKRNSMIYNENERQLCNSNLKILQNKRALSKNDSSSKQQVQDSKPRRALTDVPVNNNPLSQNKRIVAGSKAAKVRREENIRPIVSAVQKRQIYNDRTAAEQEEEEEEEGEDDDAASIVNKKRRIDAEGVSEIVGWQDLDYVEKDDTAMVAEYSAEIFAFLYRRELETLPSHNYLLDKTSKYYLRPSMRTILVDWLVEVHEKFQCYPETLFLSINLMDRFLAKNKVTMNKLQLLAVTSLFIAAKFEEVNLPKLAEYAYITDGAASKNDIKNAEMFMLTSLEFNIGWPNPLNFLRRISKADDYDPVNRNIGKFILEYAYCCHQFIHLPPSTVSAMAMYIARRMTNRNKNELWNGTLQHYSGGIDPIHDEAFQSLCIDLVKDIASSKTHLDSLILKYKKPRYGSVYFQTFKWCTSEMHSNFQNLFNLK

SEQ ID NO: 6986 - protein, 258 aa, Zea mays
  unsure (1)..(258): unsure at all Xaa locations
TVFSAKGVPDFWLTAMKTNEVLSEEIQERDEAALKYLKDIKWSRIEDPKGFKLDFFFDTNPFFKNSVLTKTYHMVDEDDPILEKAIGTEIEWYPGKNLTQKILKKKPKKGSKNTKPITKTEDCESFFNFFNPPQVPEDDDDIDEDTADELQSQMEHDYDIGTTIRDKIIPHAVSWFTGEAVQGEDFAELGDDDDDDDDEDDDEEXREEDDDEEXDEEEESKPARNXGSGHKQKEPQEVXAALQGNAEQPAECKQRSAR

SEQ ID NO: 6987 - protein, 333 aa, Pseudomonas putida KT2440
MTQTNRRFLLAKRPVGAVRRDDFSFETVPAEQPGEGQVLVRNLYLSLDPAMRGWMNEGKSYIPPVALGQVMRALGVGEVVASNHPGYQPGDHVSGALGVQDYFTGEPQGLHKIDPKLAPLPRYLSALGMTGMTAYFALLEVGQPKAGDTVVISGAAGAVGSIVGQIAKIKGCRVVGIAGGAEKCQYLKDELGFDGVIDYKAEDVLAGLKRECPKGVDVYFDNVGGDILDAVLTRINFKARIVICGAISQYNNKEAVKGPANYLSLLVNRARMEGFVVMDYTKDYGKAAQEIAGWLANGQVKSKEDVVEGLETFPETLLKLFSGENFGKLVLKV

SEQ ID NO: 6988 - protein, 796 aa, Streptomyces coelicolor A3(2)
MNADVTVDHTAEVSPWNDTTASVAARVDALIDAMTLREKTAQLYGVWVGASDEGGEVAPHQHDMEEAVDLDALLPTGLGQLTRPFGTVPVDPALGALSLARTQARITATNRFGIPALAHDECLAGFAAWGATAYPVPLSWGATFDPDTVGRMASAIGRDMRAVGVHQGLAPVLDVVRDARWGRVEETIGEDPYLVGTIGTAYVRGLESAGIVATLKHFVGYSASRAGRNLAPSSMGPRERADILLPPFEMAIREGGARSVMNAYTDTDGVPSAADEELLTGLLRDTWSFDGTVVADYFAIAFLKTLHGVAAEWADAAGLALRAGVDVELPGVKTYGAPLAEAVADGRVPETLVDRALRRTLTQKARLGLLDPDWNPLPAALEGADLDDPAALRGRIDLDSPANRALARTVAEEAVVLLSNDGTLPLARPRRIALLGPNADEAVAVLGCYSFPQHIGVRYPGTPHGIELPTLRVALAAEFPDARITFARGTGVDDGDLTGLPEAVRVAREADIALVVLGDRAGLFGRGTSGEGCDVETLALPGAQQRLLDALLDLGTPLVTVLLAGRPYSLGRAVEESAAIVQSFFPGEEGTHAIAGVLSGRVNPSGRLPVGVPRGPGSQPATYLGAKLAHAGEVSSIDPTPAFPFGHGLSYTRFDWTDLSVDDQEAPTDGEFTLTFTVRNTGGRSGTEVVQLYLHDPVASVVQPVQRLVGYARVDLEPGEARRLRVTVPADLASFTGRDGRRVVEPGALELRLAASSADPRLTARVALTGVERHLDHTRRLRSVVEQEPAARARAE

SEQ ID NO: 6989 - protein, 161 aa, Glycine max
MAASSSSSEKQVVLIGIDDSEQSTYALNWALDHFFPSPIFKLVLIHSRPTATSAVGFAGPGAAEILPIVDSDLRKIAARVLETAKQLCFNKSVNDVTAEVVEGDPRNVLCDAVDKYRAAILVVGSHGYGAIKRAVLGSVSDYCAHHAHCTVMIVKKPKIKH

SEQ ID NO: 6990 - protein, 466 aa, Thermoplasma volcanium
MARSLRRNVLNFREVLFQGVAASAPAGAAVATMTGSAAFALGSLPLAAAVAFVIVFLNALIIRRISTHVAGPGGYYDYIKTGFGKEVGIFSGWVYILYQIAALAFISLSIAVFVPALLSYIYGISVPGNLWIPLLIGAAAFGYLVSFSGIRGSLRYVSVMGSLEIAVVVFIGLFIILSHPAINTPAVFTLKYDKFGVSGIALGVLFMYTAFSGFGGMTPLGEEAKNAKKLIGDAVIISSVILGVFFVFAAYAFTVGWGPSSMESYANNLVPGIKLAQVDIGLWAAILITIFYINSILTDNVTFSNSVARITLSMSRDGVLPRFLSEVHEKRKTPHFAGLVMVIASVIIGLLSVEFLGPFGGFLFTGVLSTLAALLVHMLANLSLPVIIKKKANKVGVLNVALPVTVTAILVYVFYGTFVSISTPVVAASISFGAWATFAAIFSVVRRNKILESEYISVNEVGEEAE

SEQ ID NO: 6991 - protein, 250 aa, Zea mays; identical to SEQ ID NO: 1156

SEQ ID NO: 6992 - protein, 113 aa, Buchnera aphidicola
DIVSDECAIITGSIGMLPSASLNEKKFGLYEPAGGSAPDIEGKNIANPIAQILSVSMLVRYGMNLKKIADKIDQSVISVLKKGYRTADISNNNNYLKTNEMGDVIANTLISGE

SEQ ID NO: 6993 - protein, 332 aa, Streptococcus pyogenes M1 GAS
MSETKLMALREAVNLAMTEEMRKDENIFLMGEDVGVYGGDFGTSVGMIEEFGPKRVKDTPISEAAISGAAIGAAITGLRPIVDVTFMDFLTIMMDAIVNNGAKNNYMFGGGLITPVTFRVASGSGIGSAAQHSQSLEAWLTHIPGIKVVAPGNANDAKGLLKSAIRDNNIVLFMEPKALYGKKEEVNQDPDFYIPLGKGDIKREGTDLTIVSYGRMLERVLQAAEEVAADGINVEVVDPRTLIPLDKELIIESVKKTGKLMLVNDAYKTGGFIGEIATMITESEAFDYLDHPIVRLASEDVPVPYARVLEQAILPDVEKIKAAIVKMANKGN

SEQ ID NO: 6994 - protein, 342 aa, Arabidopsis thaliana
MTTNKQVIFKDHVSFPKESDFNFTTTTVELRVPEGSKSVLVKNLYLSCDPYMRSRMGKPDPSSALAQAYAPGKPIYGYGVSRVIESGHPDYKKGDLLWGIVGWEEYSVITPMAHMHFKIQHTDVPLSYYTGLLGMPGMTAYAGFYEVCSPKKGETVYVSAASGAVGQLVGQFAKMMGCYVVGSAGSKEKVDLLKTKFGFDDAFNYKEESDLSAALKRCFPKGIDMYFENVGGKMLDAVLLNMNPHGRIAVCGMISQYNLENQEGVHNLSNIIYKRIRIQGFVVADFYDKYPKFLELVLPRIKEGKITYVEDVADGLEKAPEALVGLFHGKNVGKQVVVIARE

SEQ ID NO: 6995 - protein, 116 aa, Avena fatua
SQVYQKYKDQGLEILAFPCNQFGGQEPGTNEEIVEFACTRFKAEYPIFDKVDVNGKEVSPLYKFLKSSKGGLFGDSIKWNFSKFLVDKEGRVVDRYAPTTSPLSIEKDIKKLLGTS

SEQ ID NO: 6996 - protein, 83 aa, Zea mays
MTCLLGCLSLFCLKVRAGIVGYPDVGKSSLINRLLKRRMCPAAPRPGVTRELKWVRFGTDLELLDSPGILPMRISDQTSAIKL

SEQ ID NO: 6997 - protein, 381 aa, Zea mays; identical to SEQ ID NO: 3534
  unsure (1)..(381): unsure at all Xaa locations

SEQ ID NO: 6998 - protein, 499 aa, Candida tropicalis
MAISSLLSWDVICVVFICVCVYFGYEYCYTKYLMHKHGAREIENVINDGFFGFRLPLLLMRASNEGRLIEFSVKRFESAPHPQNKTLVNRALSVPVILTKDPVNIKAMLSTQFDDFSLGLRLHQFAPLLGKGIFTLDGPEWKQSRSMLRPQFAKDRVSHISDLEPHFVLLRKHIDGHNGDYFDIQELYFRFSMDVATGFLFGESVGSLKDEDARFSEAFNESQKYLATRATLHELYFLCDGFRFRQYNKVVRKFCSQCVHKALDVAPEDTSEYVFLRELVKHTRDPVVLQDQALNVLLAGRDTTASLLSFATFELARNDHMWRKLREEVISTMGPSSDEITVAGLKSCRYLKAILNETLRLYPSVPRNARFATRNTTLPRGGGPDGSFPILIRKGQPVGYFICATHLNEKVYGNDSHVFRPERWAALEGKSLGWSYLPFNGGPRSCLGQQFAILEASYVLARLTQCYTTIQLRTTEYPPKKLVHLTMSLLNGVYIRTRT

SEQ ID NO: 6999 - protein, 522 aa, Pseudomonas fluorescens PfO-1
MGRGHPAAASAGLHRRHRQQRHVRHHRTGGGQPQPPHDQGRSADHRSGPGAGLRPGQPVWRHGRSRRSAGAHAGHHAVANPRPEHGDRLQLARLFRSQLPQHDRFPGHGCNRAAGATAAGSPGLPAFDRQRRARRTELCRGLQRPAPALATGIQIGFHLPLSSALRQEGLTMRKTTLITGGAGYIGSHTALALINAGHKVLVLDNLCNSCRECIRRLEQLTLTRVDFIKGDIRDPVLLDDIFSRYDIEAVVHFASLKSVEESVRKPLDYYANNVAGTLDLCQAMARNNVFQLVFSSSATVYGEPANTPIAEDFGTGKPVNPYGRTKLMIEELLTDLCNSDPRWSIGLLRYFNPIGAHESGMIGEDPSGRPNNLLPCLTQVAIGRIPELTVYGSDYPTVDGTCVRDYIHVVDLAIGHLKALQVLQHDNGIHFWNLGTGVGYSVLQIIHSFEDITGISIPYRFAPRRLGDIAKCWADPAKAGRELGWSAQRGLEQMITDSWRWQSCNPQGYQSSFKIPAPVAVK

SEQ ID NO: 7000 - protein, 149 aa, Methanopyrus kandleri AV19
MNLRPQRRMAAEILKCGVHRIWIDPERLEEVARAQTREDIRRLIKEGAIRKKPIKGQSRVRARKRHEQRKKGRQRGPGRRKGAKGARMPKKRAWIQRIRPIRRKLRELRDSGKIDRSTYRKLYMMAKGGYFRDTSHLLAYIEENDLWKK

SEQ ID NO: 7001 - protein, 95 aa, Triticum aestivum
  unsure (1)..(95): unsure at all Xaa locations
MVSFEMNDLKKIGLGLTGFGVFFSFLGIVFFFDKGLIAMGNILFLSGLGXTIGLKSTMQFFTKPKNYXGFFLVLIGWPFFGMLLEAYGFIVLFSG

SEQ ID NO: 7002 - protein, 474 aa, Ralstonia metallidurans
MGLRSQSRHPSGDSLKNLQRNLSARHIRFLALGSAIGTGLFYGSASAIQLAGPAVILAYIVGGAAVYMVMRALGEMAVREPVTGSFGRYASEYLGPLAGFLTGWTYILEMIIVCLADVTAFGIYMGFWFPEVPQWIWVLGIVMLICGLNLCNVKVFGELEFWLALVKILAIAAMIIGGTLILFLGVKMNGEHSPGLTNLWAHGGFLPHGAGGLIASLAVVMFAYGGIEIIGITGGEAQNPEKVIPRAINAVPARILLFYVLTMTVLMAIFPWTGIGSQGSPFVQIFSGLGIKSAAAVLNLIVISAAISAINSNIFGAGRMMYGMAEQGQAPRLFATTSRHGVPWVTVLAMAAALLGGVVLNYLIPEQVFVIIASIATFATVWVWLMILLSQVAMRRRLSAEEVRALKFKVPLWPVGPALAIAFMLFVIGVLGYVEDTRVALYVGAGWVVLLSLAWFLRAKPKADALLARETSVS

SEQ ID NO: 7003 - protein, 429 aa, Neurospora crassa
MTVTTRSHKAAAATEPEVVSTGVDAVSAAAPSSSSSSSSQKSAEPIEYPDIKTIRDAIPDHCFRPRVWISMAYFIRDFAMAFGLGYLAWQYIPLIASTPLRYGAWALYGYLQGLVCTGIWILAHECGHGAFSRHTWFNNVMGWIGHSFLLVPYFSWKFSHHRHHRFTGHMEKDMAFVPATEADRNQRKLANLYMDKETAEMFEDVPIVQLVKLIAHQLAGWQMYLLFNVSAGKGSKQWETGKGGMGWLRVSHFEPSSAVFRNSEAIYIALSDLGLMIMGYILYQAAQVVGWQMVGLLYFQQYFWVHHWLVAITYLHHTHEEVHHFDADSWTFVKGALATVDRDFGFIGKHLFHNIIDHHVVHHLFPRIPFYYAEEATNSIRPMLGPLYHRDDRSFMGQLWYNFTHCKWVVPDPQVPGALIWAHTVQSTQ

SEQ ID NO: 7004 - protein, 751 aa, Geobacillus stearothermophilus
MENQNRQNAAQCPFHGSVTNQSSNRTTNKDWWPNQLNLSILHQHDRKTNPHDEEFNYAEEFQKLDYWALKEDLRKLMTESQDWWPADYGHYGPLFIRMAWHSAGTYRIGDGRGGASTGTQRFAPLNSWPDNANLDKARRLLWPIKKKYGNKISWADLFILAGNVAIESMGGKTIGFGGGRVDVWHPEEDVYWGSEKEWLASERYSGDRELENPLAAVQMGLIYVNPEGPDGKPDPKAAARDIRETFRRMGMNDEETVALIAGGHTFGKAHGAGPATHVGPEPEAAPIEAQGLGWISSYGKGKGSDTITSGIEGAWTPTPTQWDTSYFDMLFGYDWWLTKSPAGAWQWMAVDPDEKDLAPDAEDPSKKVPTMMMTTDLALRFDPEYEKIARRFHQNPEEFAEAFARAWFKLTHRDMGPKTRYLGPEVPKEDFIWQDPIPEVDYELTEAEIEEIKAKILNSGLTVSELVKTAWASASTFRNSDKRGGANGARIRLAPQKDWEVNEPERLAKVLSVYEDIQRELPKKVSIADLIVLGGSAAVEKAARDAGFDVKVPFFPGRGDATQEQTDVESFAVLEPFADGFRNYQKQEYSVPPEELLVDKAQLLGLTAPEMTVLVGGLRVLGANYRDLPHGVFTDRIGVLTNDFFVNLLDMNYEWVPTDSGIYEIRDRKTGEVRWTATRVDLIFGSNSILRSYAEFYAQDDNQEKFVRDFINAWVKVMNADRFDLVKKARESVTALQNNSYRRSENDGDLQ

SEQ ID NO: 7005 - protein, 370 aa, Glycine max
MAKKSQLRTQKNNVTTNDDNNLNVTNTVTTKVKRTRRSVPRDSPPQRSSIYRGVTRHRWTGRYEAHLWDKHCWNESQNKKGRQVYLGAYDNEEAAAHAYDLAALKYWGQDTILNFPLSNYLNELKEMEGQSREEYIGSLRRKSSGFSRGISKYRGVARHHHNGRWEARIGKVFGNKYLYLGTYATQEEAATAYDLAAIEYRGLNAVTNFDLSRYIKWLKPNNNTNNVIDDQISINLTNINNNNNCTNSFTPSPDQEQEASFFHNKDSLNNTIVEEVTLVPHQPRPASATSALELLLQSSKFKEMMEMTSVANLSSTQMESELPQCTFPDHIQTYFEYEDSNRYEEGDDLMFKFNEFSSIVPFYQCDEFES

SEQ ID NO: 7006 - protein, 319 aa, Staphylococcus aureus subsp. aureus N315
MRRLFSIGEALIDFIPNVTNANLKDVQTFTKQIGGAPCNVACTVQKLGQQAYMITQLGNDAFGDSIIETISSIGVDVSKVYRTNEANTALAFVSLTEAGERDFSFYRKPSADMLFEPSFVNDIDVNENDVVHFCSVDLVDSPMRDAHYQLITKTLNANGTVVFDPNVRLPLWDNAEDLRQTIHTFLPLAHIVKVSDEELEFITGIHDENEAIQSLFTGNVTVVIYTKGADGAAVYLKNGINHYHSGYKVKPVDTTGAGDAFIGAVISRILATDVLNLTQLFENEGEEILAFSNRVAAIVTTKYGAINSLPTLQEVEQAF

SEQ ID NO: 7007 - protein, 288 aa, Arabidopsis thaliana
MEVMRPSTSHVSGGNWLMEETKSGVAASGEGATWTAAENKAFENALAVYDDNTPDRWQKVAAVIPGKTVSDVIRQYNDLEADVSSIEAGLIPVPGYITSPPFTLDWAGGGGGCNGFKPGHQVCNKRSQAGRSPELERKKGVPWTEEEHKLFLMGLKKYGKGDWRNISRNFVITRTPTQVASHAQKYFIRQLSGGKDKRRASIHDITTVNLEEEASLETNKSSIVVGDQRSRLTAFPWNQTDNNGTQADAFNITIGNAISGVHSYGQVMIGGYNNADSCYDAQNTMFQL

SEQ ID NO: 7008 - protein, 343 aa, Escherichia coli K12
MQVKTQSCVVAGKKTVAVTEQTIDWNNNGTLVQITRGGICGSDLHYYQEGKVGNFMIKAPMVLGHEVIGKVIHSDSSELHEGQTVAINPSKPCGHCKYCIEHNENQCTDMRFFGSAMYFPHVDGGFTRYKMVETSQCVPYPAKADEKVMAFAEPLAVAIHAAHQAGELQGKRVFISGVGPIGCLIVSAVKTLGAAEIVCADVSPRSLSLGKEMGADVLVNPQNDDMDHWKAEKGYFDVSFEVSGHPSSVNTCLEVTRARGVMVQVGMGGAMAEFPMMTLIGKEISLRGSFRFTSEFNTAVSWLANGVINPLPLLSAEYPFTDLEEALRFAGDKTQAAKVQLVF

SEQ ID NO: 7009 - protein, 952 aa, Saccharomyces cerevisiae
MTDETAHPTQSASKQESAALKQTGDDQQESQQQRGYTNYNNGSNYTQKKPYNSNRPHQQRGGKFGPNRYNNRGNYNGGGSFRGGHMGANSSNVPWTGYYNNYPVYYQPQQMAAAGSAPANPIPVEEKSPVPTKIEITTKSGEHLDLKEQHKAKLQSQERSTVSPQPESKLKETSDSTSTSTPTPTPSTNDSKASSEENISEAEKTRRNFIEQVKLRKAALEKKRKEQLEGSSGNNNIPMKTTPENVEEKGSDKPEVTEKTKPAEEKSAEPEVKQETPAEEGEQGEKGQIKEESTPKVLTFAERLKLKKQQKEREEKTEGKENKEVPVQEETKSAIESAPVPPSEQVKEETEVAETEQSNIDESATTPAIPTKSDEAEAEVEAEAGDAGTKIGLEAEIETTTDETDDGTNTVSHILNVLKDATPIEDVFSFNYPEGIEGPDIKYKKEHVKYTYGPTFLLQFKDKLNVKADAEWVQSTASKIVIPPGMGRGNRSRDSGRFGNNSSRGHDFRNTSVRNMDDRANSRTSSKRRSKRMNDDRRSNRSYTSRRDRERGSYRNEEKREDDKPKEEVAPLVPSANRWVPKFKSKKTEKKLAPDGKTELLDKDEVERKMKSLLNKLTLEMFDAISSEILAIANISVWETNGETLKAVIEQIFLKACDEPHWSSMYAQLCGKVVKELNPDITDETNEGKTGPKLVLHYLVARCHAEFDKGWTDKLPTNEDGTPLEPEMMSEEYYAAASAKRRGLGLVRFIGFLYRLNLLTGKMMFECFRRLMKDLTDSPSEETLESVVELLNTVGEQFETDSFRTGQATLEGSQLLDSLFGILDNIIQTAKISSRIKFKLIDIKELRHDKNWNSDKKDNGPKTIQQIHEEEERQRQLKNNSRSNSRRTNNSSNRHSFRRDAPPASKDSFITTRTYSQRNSQRAPPPKEEPAAPTSTATNMFSALMGESDDEE

SEQ ID NO: 7010 - protein, 245 aa, Magnetospirillum magnetotacticum
MFDLTGKTALVTGASGGIGGAIAKALHAQGATVGLHGTRREALDALAAELGERVHVLPANLSDGAAVEQLAKDAEAALGSIDILVNNAGLTKDGLVLRMKDEDWQTVLDVNLTAAFRLSRAAVKGQMKRRWGRIINITSIVGVTGNPGQVNYAASKAGMIGMSKALAQEVASRNITVNCVAPGFISSAMTDVLSDDQKTKLNAGIPAGRMGTAEEIAASVVYLASAEAAYVTGQTLHVNGGMAMI

SEQ ID NO: 7011 - protein, 436 aa, Brassica napus
MKGIRKNYENSYTLSFLLVFFVLILLPPAFSINTLSSEESLTISSNRTLVSRGDVFELGFFKTTSSSRWYLGIWYKKFPYRTYVWVANRDNPLPNSIGTLKISNMNLVLLDHSNKSVWSTNLTRRNERTPVMAELLANGNFVMRDSNNNDASEFLWQSFDYPTDTLLPEMKLGYNLKKGLNRFLISWRSSDDPSSGDYSYKLEPRRLPEFYLLQGDVREHRSGPWNGIRFSGILEDQKLSYMEYNFTETSEEVAYTFRMTNNSFYSRLTLSSTGYFERLTWAPSSVVWNVFWSSPNHQCDMYKICGPYSYCDVTTSPVCNCIQGFRPKNRQQWDLRISLRGCIRRTRLSCSGDGFARMKYMKLPETTMAIVDRSIGVKECEKRCLSDCNCTAFANADVRNGGTGCVIWTGRLDDMRNYVPDHGQDLYVRLAAADLV

SEQ ID NO: 7012 - protein, 463 aa, Yersinia pestis CO92
MAHDATVAVGTNQTGTNNRVQLRKTLTLVQVVMMGLAYLQPMTIFDTFGIVSGLTDGHVATSYAIALIAVLFTAVSYGKLVKRFPSAGSAYTYAQKSISPNVGFMVGWSSLLDYLFMPMINILLAKIYLEAIFPGVPSWIFVGALVSLMTLFNLRGINIVANLNSVIVVVQVAIMVVFMGLLIHGVYQGEGAGTLVSARPFYSENAHLVPMITGATILCFSFLGFDGISSLSEETPNAGKVIPKAIFLTALIGGIIFIAVSYCLQLYFPDISRFTDPEASQPEIMLFVAGKFFQSVILCFSCVTVLASGMAAHAGVSRLLYVMGRDGVFPEKVFGYVHPKWRTPAINVLLVGGVALSAISFDLVTATALINFGALVAFTFVNLSVIAQFYVRERRNSTFKDHFNYLILPMIGAGTVGVLWVNLESSSMTLGLVWGAIGLSYMVWKTRAFRRALPQFTEEPAQL

SEQ ID NO: 7013 - protein, 358 aa, Neurospora crassa
MAASRTATRTLRALRTSTRPALTAAPRAAFRQGGRRLYSSEPAKSGGSNIWAWAIGAGALGAGGLWYLNQDGASATPKVFAPKFDDYQAVYNEIASRLEEKDDYDDGSYGPVLVRLAWHASGTYDKETGTGGSNGATMRFAPESDHGANAGLKAARDFLEPVKAKFPWITYSDLWILGGVCAIQEMLGPQIPYRPGRQDRDAAGCTPDGRLPDASQAQDHLRNIFYRMGFNDQEIVALSGAHALGRCHADRSGFDGPWTFSPTVLTNDYYKLLLDEKWQWKKWNGPKQYEDKKTKSLMMLPADMALIQDKKFKQWVEKYAADNELFFKDFSNVIVKLFELGVPFAENSERWVFKTVNA

SEQ ID NO: 7014 - protein, 460 aa, Pseudomonas putida KT2440
MASQDNKKQRSLQHGLTSRQVSMISIAGIIGAGLFIGSSNAIATAGPAILISYAMTGLLVLLVMRMLGEMAIANPNSGSFSTYASEAIGPWAGFTIGWLYWWFWVLIIPVEAIAGADILHAYFPGVPSWLFAFLIMLVLSGTNLVSVKNFGAFEYWFALVKVVAIIGFIGVCTLAVFGFWPLAEVSGVSRLWDSGGFMPNGFGTVLGGVLITIFSFFGAEIVTIAADETANPKDKIRRATNLVVYRIAIFYLASIFLVVSLVAWNDPGLKAVGSFQRVLEVLNVPGAKLLVDLVVLVAVTSCMNSGLYTASRMLYSLGARGQALSVTKRISGSGVPTVAVIFSTLAGFAGCFVNYVFPGKVFGFLLSTTGAIALLVYLVIAVSQLRMRARAEREGRPLELKMWLFPWLTWLVIGTIVMVLGYMLFSDAYRYETLMTAGVTAFILLVSLTQRRAKMVAQTA

SEQ ID NO: 7015 - protein, 126 aa, Oryza australiensis
MSERRRREKLNEMFLILKSVVPSIHKVDKASILAETIAYLKELEKRVEELESSNQPSPCPLETRRRKSREITGKKVSAVAKRKASTPEVASDDDTDGVHHCVSNVNVTIMDNEVLLELQCQWKELL

SEQ ID NO: 7016 - protein, 448 aa, Zea mays; identical to SEQ ID NO: 1272

SEQ ID NO: 7017 - protein, 227 aa, Glycine max
MEGVSPEPLRSELDSKSKHDTAKEDDDALKDSTEAEVTKIRLMRAFVESRDPSSKEENDLMMRRFLRARSLDVEKASAMFLKYLKWKRSFVPNGCISPSEIAEDIAQDKVFTQGLDKKGRPIVVTFAAKHFQSKNGADGFKRYVVFVLEKLCSRMPPGQEKFLAIADIKGWAYVNSDLRGYLNALSILQIVFVENKKLKSTLLEEIEESQLPDIYGGQMPLVPIQNS

SEQ ID NO: 7018 - protein, 565 aa, Cytophaga hutchinsonii
MLKKITCYTVLYIFILLNQPIQAQTYVIPDANFKNYLALNIPYVLNSNQELIISNAKIFTGTINCVGMNIEDLSGLQYFYKLTQLNCNSNQLTFLPSLDSLKQLQHMWVYNNKLTSIPSVNQLTNLQTLNVKNNQLTNLPSLTGMTALKSLDCSSNKLTALPDLSTLLNLEEMYCYINFITNIPSVSNLLHLKIFNIENNAIALLPDISQNTKLEILQFDLNQIETIPPLTTLTALKQLIFAHNKISTLPDLSANTALFIITGDNNQLTHIPDLSGFDNLTHVELSHNQLTFEDILPSSKHPQFSTVFNIQPQDSLNVNQPVSAVKGSTITLPLQFDLAVSGSTYNWYKNNIYLSSTTIPVLTLSNITEMNAGRYTCIITNNTSRLTGITLHARSYSILVEPCIKFSYINYEITANDCSKGAAIQIDHTQISALNTPLTYALHPLNNQSSITSASAVLNDVMPGRYSLTISDVNNCSVELQNYIFIPVPAGCMDSFTPNGDGLEDTYLIDKPGYTKIYNKNGTLIRTLNTPAAWDGSDESGKLCPMGYYIIIIDGKEKTGVVLIN

SEQ ID NO: 7019 - protein, 478 aa, Enterococcus faecium
MRVMEMEKKSTGISKWGLVALVVSSSIGSGVFGITSDLASSAAPGPAILSWIIVGIGILALVLSLNHLGEKRPDLDGGIFGYAEASFGKLGGFISGWGYWLSAWLGNVAFATMLMSAMGEFFPIFKGGQNVPSILFASIFIWGLTLLVNNGVEGASVINTIVTICKLVPLFLFLIFVFIAFKVNIFTADFWGNVSDNLVNGTGQQGTIWLQIKGCLMVMMWVFVGIEGASVLANRAKKRSEAQQASIIGLLCLLFIYILASILPYGVLSQEELATISQPAMANILKGIVGNWGAALINIGLIISIIGSWLSWTMLPAETTMLMARDGLLPKGWGKTNKKNAPTYSLVVTAILTNLFLLTFLVTDYAYQFAYSLCTAAILICYLLVGIYQVQFSLKEGIKKQVVIGGIAVVFELMGIILAGFSYVLLCSIAYLPGFCFYWIACRETKHQITGKEKVMIGLICVAALLSIGLLAVGWIKI

SEQ ID NO: 7020 - protein, 253 aa, Oryza sativa
  unsure (1)..(253): unsure at all Xaa locations
XGGGGGVWIRAAVAVAAGGAIAARAVRRKSVDSTAVFVGVPAMVAHTVAGYRKQVLSNSGIASVLVVLIALVTGGSDRCLDTRESSLVTALIGGVIGHYACCNGDTWSSELGILSKAEPRIITTFKRVRKGTNGGVTIDGLLAAAAAGFSIGLTFVLLGFLTTQCSSDVFWRQLLVIPLATAAGLCGSLIDSLLGATLQYSGYCSLRKKVVGVDGPTVTRISGRNILDNNGVNVVSVFLTTLITALACVYIFX

SEQ ID NO: 7021 - protein, 396 aa, Xylella fastidiosa 9a5c
MTKPIRNVAVLGATGSIGAAALDVLARHPRQFHVSLLAAGQRVDALLALCHTYRPDHAVIGDATLYTTLRDGLNAAGLATKAYAGEAALAELVASTTCDTVVAAIVGAAGLHSTLAAARAGKRLLLANKESLVLAGMLLMREASISGAEIIPIDSEHNAIFQCLRSRTTDGVHRITLTASGGPFRGHNRTMLAKITPTQAMAHPTWSMGPKISVDSATLMNKGLEVIEAHHLFGLPSEQIDVLVHPQSLVHSLVEFIDGSTLAQLSLPDMRTTLAVGLSWPERIGSGVPGLDLMKHNRLDFERPDTETFSCLRLARDAMQTGGTAPAVLNAANEIAVSAFLQGRIGFLTIPALIEHALTTLPRYEADTLETLLTVDTETRRITHAALTHFPLPLPL

SEQ ID NO: 7022 - protein, 448 aa, Oryza sativa
LLLRRGATGGAGRRWGPGEALRRLVSSSEAAPAAARSPPVMPPFEHRPRPYAGWSGDEILAKRKQFLGSSVFYYYQKPLNIVEGKMQYLYDENGKRYLDCFGGIVTVSCGHCHPDIVNAVVEQTKLLQHTTTIYLNQPIVEFAEALASKMPGNLKVVYFVNSGTEANELAMLMARLYSGNLNMIALRNAYHGGSAGTIGLTGLQTWKYPIPQYGTSGRVAGFIAETFQGVGGAVELAPGYLKLAYDTVRKAGGVCIADEVQSGFGRTGSHYWGFQTQDVIPDIVTMAKGIGNGLPLGAVVTTPEIANVLAQKIQFNTFGGNPVCSVGGLAVLKVLDKEKRQAHCADVGSHLVNRLKELQQKHEIIGDVRGRGLMLGVELVTDRKEKTPAKAETNLLFEKLKDLNILVGKGGLHGNVFRIKPPMCFTRDDAGSYELSQTKLCHYCIAHR

SEQ ID NO: 7023 - protein, 375 aa, Agrobacterium tumefaciens str. C58 (Cereon)
MDVRAAVAIQAGKPLEVMTVQLEGPRAGEVLIEVKATGICHTDDFTLSGADPEGLFPAILGHEGAGIVVDVGPGVTSVKKGDHVIPLYTPECRECYSCTSRKTNLCTSIRATQGQGVMPDGTSRFSIGKDKIHHYMGCSTFSNFTVLPEIALAKINPDAPFDKVCYIGCGVTTGIGAVINTAKVEIGSTAIVFGLGGIGLNVLQGLRLAGADMIIGVDINNDRKAWGEKFGMTHFVNPKEVGDDIVPYLVNMTKRNGDLIGGADYTFDCTGNTKVMRQALEASHRGWGKSVIIGVAGAGQEISTRPFQLVTGRNWMGTAFGGARGRTDVPKIVDWYMEGKIQIDPMITHTMPLEDINKGFELMHKGESIRGVVVY

SEQ ID NO: 7024 - protein, 274 aa, Triticum aestivum
  unsure (1)..(274): unsure at all Xaa locations
QPEKQFPSPPAQPQPLGPIPLLPPPPHSPLSSQVRCARWRRTRAELGLGVVYGNKAEARDKVCRAIQYGSKFIMQRPGPAPRRNVDTSHTLARKLFRLLKWVNDLHALIEPXVPKGITLTPVMGTNLKIVLLGKSKNALLSMLLFLDQFVRKKERRDCITRKCIDCGTASSVYSSLVELGXAQSTIEWYEQARLXLRGTHEKEDEQYVGKMNQSDARLVAVVRGRVAVVXPAGLLQLAPKKLTPRVTGAFGFVISLISCYQQLPSRAPLAKLKA

SEQ ID NO: 7025 - protein, 359 aa, Kluyveromyces marxianus
MSKNIVVLPGDHVGTEITNEAIKVLNAISEARPSIKFNFEHHLIGGAAIDATGVPLPDEASKKADAVLLGAVGGPKWGTGSVRPEQGLLKIRKELGLYANLRPCNFASDSLLDLSPLKPEYAKGTDFVVVRELVGGIYFGERKEDEGDGVAWDSEKYSVPEVQRITRMAAFLALQHNPPLPIWSLDKANVLASSRLWRKTVEETIKNEFPQLTVQHQLIDSAAMILVKSPTKLNGIVITNNMFGDIISDEASVIPGSLGLLPSASLASLPDTNKAFGLYEPCHGSAPDLPANKVNPIATILSAAMMLKLSLDLVEEGRAVEEAVRKVLDSGIRTGDLGGSNSTTEVGDAVAKAVKEILA

SEQ ID NO: 7026 - protein, 103 aa, Spinacia oleracea
MSSLPFVFGAAASSRVVTAAAAKGTAETKQEKSFVDWLLGKITKEDQFYETDPILRGGDVKSSGSTSGKKGGTTSGKKGTVSIPSKKKNGNGGVFGGLFAKKD

SEQ ID NO: 7027 - protein, 199 aa, Magnetospirillum magnetotacticum
MARHQPGASPMTTYKLLLLPGDGIGPEVMAEVEKVVGWLNRAGLASFETERDLVGGAAIDVHGKPLADETLAKADAADAILLGAVGGPKWNGVAYDIRPEAGLLRLRKDLGLFANLRPAICYPALADASALKRELVEGLDIMIVRELTGGVYFGEPKEITTLEDGSKRAVDTQVYTTAEIERIAHVAFDLARKRGSLDR

SEQ ID NO: 7028 - protein, 431 aa, Raphanus sativus
DNSYTSSFLLVFFVLVLVHPAISMYINTLSATESLTISSNRTLVSPGDVFELGFFRTTSSSRWYLGMWYKKFSERIYVWVANRDNPLSNSIGTLKISGNNLVLLDHSNKSVWSTNFTRGNERFPVVAELLANGNFVMRDSNNNDASGFLWQSFDYPTDTLLPEMKLGYDLKKGRNRLLTSWRNSDDPSSGDYSYKLEPRRLPEFYLLQGDVRAHRSGPWNGIEFSGIPEDQKLSYMVYNFTENSEEVAYTFRMTNSSFYSRLTISSEGYLERLTWAPSSAVWNVFWSSPNHQCDTYRICGPYSYCYVNTSPSCNCIQGFNPENVQQWALRISISGCKRRTRLSCSGDGDGFTRMKNMKLPETTMAIVDRSIGVKECKKRCLSNCNCTAFANADIRNGGTGCVIWTGQLDDMRNYVADGQDLYVRLAAADLV

SEQ ID NO: 7029 - protein, 369 aa, Magnetospirillum magnetotacticum
MAAKKLLILPGDGIGVEVMAQVRRIIDWMARKRKVEFEITEGLLGGAAYDVHGTPYPAETLEAALAADAVLLGAVGGPKWDDLPFDKKPERGLLGIRKDMGLFANLRPATVLDALADASTLKNEVVSGLDIMILRELTGGLYFGQPRGIDTLPDGTRKGYNTLVYTTPEIVRIGRVAFDLARKRNKKLCSVDKANVLECTVLWREEMIKLQKEEYPDVELSHMYVDNAAMQLVRNPKQFDVMVTENMFGDILSDCAAMLTGSLGMLPSASLGEADANGKRKALYEPVHGSAPDIAGKDMANPLATIMSFAMCLRYSFDMVAEADLIETAVKNVLKGGLRTADIMQPGKAKVSTTVMGEAVVRELDKLNS

SEQ ID NO: 7030 - protein, 330 aa, Micromonospora echinospora
MSSLHVRLGRTGLRVSRVAIGTVNFGGRVDEADAHRLLDHAVAQGVNLVDTADIYGWRVHRGWTEEMIGRWLAKDPARRDEVVLATKVGNPMGDGPNARGLSARHVVAACEASLRRLQTDAIDLYQMHHVDREVGWDEIWQAMEQLVRQGKVRYVGSSNFAGWDLVSAQEAARRHRLLGLASEQCVYNLVSRYVELEVLPAAVAEGIGVLVWSPLHGGLLGGVLRKLADGTAVKSAQGRAAEAVERHRATLAAYETFCAEAGRDPAEVGMAWVLHRPAVTAAVVGPRTPEHLDGALRALHRPLSAAELARLDELFPPLGRGGAAPDAWMS

SEQ ID NO: 7031 - protein, 504 aa, Listeria monocytogenes
KPLTNLKNLGWLFLDENKIKDLSSLKDLKKLKSLSLEHNGISDINGLVHLPQLESLYLGNNKITDITVLSRLTKLDTLSLEDNQISDIVPLAGLTKLQNLYLSKNHISDLRALAGLKNLDVLELFSQECLNKPINHQSNLVVPNTVKNTDGSLVTPEIISDDGDYEKPNVKWHLPEFTNEVSFIFYQPVTIGKAKARFHGRVTQPLKEVYTVSYDVDGTVIKTKVEAGTRITAPKPPTKQGYVFKGWYTEKNGGHEWNFNTDYMSGNDFTLYAVFKAETTEKTVNLTRYVKYIRGNAGIYKLPREDNSLKQGTLASHRCKALTVDREARNGGKLWYRLKNIGWTKAENLSLDRYDKMEYDKGVTAYARVRNASGNSVWTKPYNTAGAKHVNKLSVYQGKNMRILREAKTPITTWYQFSIGGKVIGWVDTRALNTFYKQSMEKPTRLTRYVSANKAGESYYKVPVADNPVKRGTLAKYKNQKLIVDCQATIEGQLWYRIRTSSTF

SEQ ID NO: 7032 - protein, 443 aa, Zea mays
MARLVLSECSGLAPVRRLRAGRGAIAARSPPALSAAPRRRPASASIHRDWALRVSAPTRLASAAVEEDKPSAAPGQEEGAAAGGEFDPGAPPPFGLAEIRAAIPKHCWVKDPWRSMSYVLRDVAVVLGLAAAAARLDSWLVWPLYWAAQGTMFWALFVLGHDCGHGSFSNNPKLNSVVGHILHSSILVPYHGWRISHRTHHQNHGHVEKDESWHPLPERLYKSLDFMTRKLRFTMPFPLLAFPLYLFARSPGKSGSHFNPGSDLFQPTEKNDIITSTASWLAMVGVLAGLTFLMGPVPMLKLYGVPYLVFVAWLDMVTYLHHHGHEDKLPWYRGKEWSYLRGGLTTLDRDYGWINNIHHDIGTHVIHHLFPQIPHYHLIEATEAAKPVLGKYYKEPKNSGALPWHLFRVLAQSLKQDHYVSHTGDVVYYQAESKTSTSAQKSD

SEQ ID NO: 7033 - protein, 523 aa, Magnetospirillum magnetotacticum
MNRRPLLESAPTHSSSRPQPSRISVMKTYSIAAIPADGIGIEVIAAGIEVLDALAEKTGSFRFKFDHFDWGSDYYKRHGVMMPADGREQIKDHDAIFFGAVGAPDVPDHITLWGLRLAICQPFDQYANVRPTRILPGITSPLRHVTGPELNWVIVRENSEGEYAGVGGRVHQGHPNEVATDVSMMTRSGVDRIIRFAFKLAQSRPRKLLTVVTKSNAQRHAMVMWDEIAAEVARDFPDVTWDKMLVDAMTMRMTMKPETLDTIVATNLHADILSDLAAALAGSLGIAPTANINPERTYPSMFEPIHGSAFDITGKGVANPIATFWTACQMLGAPRRERRPADRLMRAVERVTGRSEPAHAAHLRGQGDDPPGHGRGHRTTPSVTTSRPVLRGHHPREPLCPAVPDRRATPRRNSTRPDRIRRNGGRPADGAAGRAGAPAAARPPLNHGSKPGDAARPPGKPQCQSIPARRQMRTITAKGLTTQKHNQKPGTNTHHHTQTRKESPHETTHPYDENKHTHPPRHQ

SEQ ID NO: 7034 - protein, 203 aa, Gossypium longicalyx
GYTPLFPRILGHEASGIVESVGEGVDDLKPGDHVLPIFTGECKECRHCLSEESNNMCELLRINCDRGVMLADGKTRFSINGKPIYHFVGTSTFSQYTVVHVGQVAKISPTAPLDKVCPISCGICTGFGATVNVAKPKKGQTVAVFGLGAVGLAAAEGARVCGASRIIAVDVNPRRFEEAKRFGITEFVNPKDYDKPVQEVIVE

SEQ ID NO: 7035 - protein, 224 aa, Zea mays
MAEEKKQGLQLLDFWVSPFGQRCRIALDEKGLAYEYLEQDLGKKSELLLRANPVHKKIPVLLHDGRPVCESLVIVQYLDEAFPAAAPALLPADPYARAQARFWADYVDKKLYDCGTRLWKLKGDGQAQARAEMVEILRTLEGALGDGPFFGGDALGFVDVALVPFTSWFLAYDRFGGVSVEKECPRLAAWAKRCAERPSVAKNLYPPEKVYDFVCGMKKRLGIE

SEQ ID NO: 7036 - protein, 330 aa, Neurospora crassa
MPLQTELTRRLGITVPVIQGGMQHVGTAELASAVSNAGGLGIITALIFPEPEGLRQEIRKCKKLTTRPFAVNITLLPALVPPDYEAYAQVVIDEGIKIVETAGNSPGPVISKLKKAGVTILHKCTTIRHAQSAVKLGVDFLSIDGFECAGHVGESDITNFILLSKARQTLNVPFIASGGFADGQGLAAALMLGACGVNMGTRFLCTVEAPIHHNIKEAIVKAQETDTALVLRRWRNTTRLFKNKVVRDALKVEKESKTGEFSEIAPYVSGKRGKEVFINGDPEYGVWTAGQVMGLINDIPTCKDLIARIEKEAEETIKEKVKLFAAPSKL

SEQ ID NO: 7037 - protein, 474 aa, Oryza sativa (japonica cultivar-group)
METIDRFPQFHFHSKRISLPHPTAASDARRDQAMDGGGGGGGGGFGLGGLQWTAEEASTIGGIATVSLLHSFIPTHWLPFSIVARAQRWPLSRTLLVTAFGGVLHVVSTALLGITAVTMANTIAGEETVHKLASLLLIVLGGSYILLFALGKGGHGHAHNHPMEKMAVAGLVLVPALSPCATTLPVFLAVGNSSSMMILAIIVLLFSTITVMTSLVALSFYGASQIKFHWVERYDKILVGSVLCLVGVLTYVFHHHDGDEHSLHEHVHRKLLRLRRRHRSMAPGGDGDYYRTLGIERGASKAEVKAAFYRLAPLHHPDRHAASDAAARAAAGGRFRRVYDAYTVLHSDATRAAYDHLPRTATSPPTSRGSGGAAASGSSYGRCFSRPQPPSMKLPVILFFSLVTGSALLVALSRGKNKAANELKSSAEPEILPEARFSWSLIMNDTLRFWERNRRRQSGTLDQTEMISIVEFDK

SEQ ID NO: 7038 - protein, 354 aa, Glycine max
PSSPHKSASSSCTSCAPSGAAYQISSKLPGNLKVVFFTNSGTEANELAILIARLYTGCHDIISLRNAYHGNAAGTMGATAQSIWKFNVVQSGVHHAVNPDPYRGIFGSDGEKYARDVQDIINFGTSGNVAAFISEAIQGVGGIIELAPGYLPAVYNTIKKAGGLFIADEVQAGFGRTGSHFWGFEAHNVVPDIVTMAKGIGNGIPLGAVVTTPEIAEVLTRRSYFNTFGGNPVCTAAGLAVLKVIEKEQLQQNAFVVGSYLKERLTALKDKYELIGDVRGRGLMLGVELVTDRELKIPAKGETLHVMDQMKELGVLIGKGGYYGNVFRITPPLCFTKEDADFVADAMDLTLSRM

SEQ ID NO: 7039 - protein, 206 aa, Clostridium thermocellum ATCC 27405
PFRGRKKEELRNVTLREALNHPNWSMGSKITIDSATMMNKGLEVIEAHWLFEIPQDDIEVLVHPQSIIHSMVEYKDGSIIAQLGSPDMRLPIQFALTYPDRKQNNFSKLDIVKIGSLTFEAPDLEAFPCLGLAFEALRAGGTMPAVLNAANEKAVGLFLQEKIRFLDIPEIIEKVMGRHSVKPDPDIDDIIDVDLWARKIVEEIVK

SEQ ID NO: 7040 - protein, 245 aa, Sulfolobus solfataricus
MKAKVIDAVSFSYILRTVGDFLSEANFIVTKEGIRVSGIDPSRVVFLDIFLPSSYFEGFEVSQEKEIIGFKLEDVNDILKRVLKDDTLILSSNESKLTLTFDGEFTRSFELPLIQVESTQPPSVNLEFPFKAQLLTITFADIIDELSDLGEVLNIHSKENKLYFEVIGDLSTAKVELSTDNGTLLEASGADVSSSYGMEYVANTTKMRRASDSMELYFGSQIPLKLRFKLPQEGYGDFYIAPRAD

SEQ ID NO: 7041 - protein, 348 aa, Escherichia coli K12
MTGVNECSRSTCNLKYDEYSRSGSMQYNPLGKTDLRVSRLCLGCMTFGEPDRGNHAWTLPEESSRPIIKRALEGGINFFDTANSYSDGSSEEIVGRALRDFARREDVVVATKVFHRVGDLPEGLSRAQILRSIDDSLRRLGMDYVDILQIHRWDYNTPIEETLEALNDVVKAGKARYIGASSMHASQFAQALELQKQHGWAQFVSMQDHYNLIYREEEREMLPLCYQEGVAVIPWSPLARGRLTRPWGETTARLVSDEVGKNLYKESDENDAQIAERLTGVSEELGATRAQVALAWLLSKPGIAAPIIGTSREEQLDELLNAVDITLKPEQIAELETPYKPHPVVGFK

SEQ ID NO: 7042 - protein, 500 aa, Lens culinaris
FLHLRPTPTAKSKALRHLPNPPSPKPRLPFIGHPHLLKDKLLHYALIDLSKKHGPLFSLYFGSMPTVVASTPELFKLFLQTHEATSFNTRFQTSAIRRLTYDSSVAMVPFGPYWKFVRKLIMNDLLNATTVNKLRPLRTQQIRKFLRVMAQSAEAQKPLDVTEELLKWTNSTISMMMLGEAEEIRDIAREVLKIFGEYSLTDFIWPLKYLKVGKYEKRIDDILNKFDPVVERVIKKRREIVRRRKNGEVVEGEASGVFLDTLLEFAEDETMEIKITKEQIKGLVVDFFSAGTDSTAVATEWALAELINNPRVLQKAREEVYSVVGKDILVDEVDTQNLPYIRAIVKETFRMHPPLPVVKRKCTEECEINGHVIPEGALVLFNVWQVGRDPKYWDRPSEFRPERFLETGAEGEAGPLDLRGQHFQLLPFGSGRRMCPGVNLATSGMATLLASLIQCFDLQVLGPQGQILKGDDAKVSMEERAGLTVPRAHSLVCVPLARIG

SEQ ID NO: 7043 - protein, 443 aa, Pseudomonas aeruginosa
MSESIAGASLKRTLGPFSVLLFGLAFLAPLIVFGTYGVITQASGNTTAMAYLIAAIGVVFTALSYGRLVRVFPVAGSAYTYTRKMLSANLGFMVGWAALLDYFFIPMLIWLLGASYLNMAFPEVPQWVWIIGFIVSTSLLNILGIQVANRFNVLLMVAQLAIIVVFIGLCVHYIVAVNGPGGLLSAKPFFNPDVSFATSMAGAAIAAYSFLGFDALSTLSEETRDPGRTLPRAILLVALIGGSVYVGSSYFMYLAHPSPAFEHVDGAAFEIARMIGGDLFFAVVLAGIIIAHFAAGMSFQASVGRLLYALGRDNQLPRKLFGALHPRYKTPAFNILLCGIFGCAGFALTIATATSLVNFGAFLAFSAVNLCALRLSFDTRLGDGAGLLRGVLCPLVGLVTAGWMLVSLDKDALIMGCSWLGLGAVYLACRTSFFRNPVPDALA

SEQ ID NO: 7044 - protein, 167 aa, Triticum aestivum
DSARGWTLTATRGISSGGGEPEEEGPAVSLRPLGLADVDDFMAWASDERVMRHLKRPLCATREQAVAQIRDTVLGHPWFRAVCVAGRPVGQVSVWPYPDDGGHRANLGYALAHRHWGRGIASAAIRMVVGRVFEELPGLGRLEAVTDVGNARSQRALEKAGFQREGV

SEQ ID NO: 7045 - protein, 333 aa, Oryza sativa (japonica cultivar-group); identical to SEQ ID NO: 5949

SEQ ID NO: 7046 - protein, 407 aa, Oryza sativa (japonica cultivar-group)
MGALAASIASHLPSGVSAAVAALAASPGEVVRRAAGLEDELRELLRLNGGGRGRGGAAAEQGQGEQTRDRFVRAYERLKSELLNDRAFNFDFTEETRQWVAKMMDYNVPGGKLNRGLSVVDSYMLLRQGTEVDDEDFYLACVLGWCVEWLQASALVLDDITDNAYTRRDNLCWYKLPTVGMSAINDGVLLKCHVQAIIKRYFKEKFYFLDLMELWNEIGLQTAMGQMLDLITTHTGAKDLARYRIQGYRRIVKYKTSYYSFYLPVACALLLNGARLSDYVELKNVLIEMGVYFQIQDDYLDCFGDPEVIGKVGTDIEDYKCSWLIVQAMELANENEMKILYENYGKSDPKCVAEVKSVYRELDLQDIFLEYESRVYKHLVSTIDAETDRAIRDILKSFLKKIYRRKK

SEQ ID NO: 7047 - protein, 149 aa, Archaeoglobus fulgidus DSM 4304
MMVMDLSLQRRLAASVLKCGENRVWFDPAALEDIATAATKQDIRELIEQGVIKRKPVNGVSRARINKRKLQKRKGRRRGHGSRKGAKGARMPRKRMWILRIRALRKALRQMKAEGVVDRRTYRILYRKAKGGEFRSVAHLKIYVEQMKR

SEQ ID NO: 7048 - protein, 296 aa, Rhizobium sp. USDA 1114
RGKTQIKEFDAFPTLEQLPLWGFDGSSTQQAEGRSSDCVLKPVAVYPDPVRTNGALVMCEVMMPDGKTPHPSNTRATVLDDESAWFGFEQEYFFYKNGRPLGFPEQGYPAPQGPYYTGVGYKNVGDIARQIVEEHLDICLAAGINHEGINAEVAKGQWEFQVFGKGSKKAADEVWLARYLLLRLTEKYGIDVEFHCKPLGDTDWNGSGMHANFSTAYLREVGGKDYFEALMAAFEKNLHDHINVYGPDNHLRLTGKHETAPWDKFSYGVADRGASIRVPHSFVNNGYRGYLEDRRP

SEQ ID NO: 7049 - protein, 193 aa, Streptococcus gordonii
INDYSYEEVERIVRKAFDIARGRRKRVTSIDKQNVLATSKLWRRVADEVAKDYPDVTLEHQLVDSAAMLMITNPAKFDVVVTENLFGDILSDESSVLSGTLGVMPSASHSADGPSLYEPIHGSAPDIAGQCIANPISMILSVAMMLRDSFAELEAAEAIEAAVEKTLAQGILTRDLGGQVGTAQMTESIINNL

SEQ ID NO: 7050 - protein, 176 aa, Zea mays; identical to SEQ ID NO: 2186

SEQ ID NO: 7051 - protein, 188 aa, Agrobacterium tumefaciens str. C58 (Cereon)
MPKKILMITGDFAEDYETMVPFQTLAAVGYTVHAVCPGKKAGQTIATAIHDFEGDQTYSEKRGHNFALNATFADIKVADYDALVIPGGRAPEYLRLNADVLAAVKHFFEADKPVAAVCHGAQLLAAAGVLKGRTCSAYPACRPEVEQAGGTYADIAIDAAVTDGKLVTAPAWPAHPAWLSQFMTVLGK

SEQ ID NO: 7052 - protein, 306 aa, Zea mays
HSYGRLGPSRPAGISLSHTQSHTHRPPSLVLGSPCYLAFTDLPLPNRTVTSRRPGAVVLRLVAARRWWRAADRIEQRMDGGGGLGGLRWTAEEASTIGGIATVSLLHSFIPTHWLPFSIVARAQRWPLSRTLLVTAFGGVLHVVSTALLGITAVTMANTIAGEETVHKLASLLLIFLGASYILLFALGKGGHSHAHNHPMEKMAVAGLVLVPALSPCATTLPVFLAVGNSSSMMILAIIVLLFSTITVMTSLVALSFYGASQIKFHWVERYDKILVGTVLCLVGVLTYVFHHHDGDEHVHQKLVSP

SEQ ID NO: 7053 - protein, 224 aa, Triticum aestivum
  unsure (1)..(224): unsure at all Xaa locations
STGPTKDVFWMYLGPTFPPFLPQENGWGRHFCRYIEPPSIGGLPVLQETPVGQRXLLMMACCGSTAKQVVPTPNVVKVVEATKGSMLVALATLFPSGVLLAGALVWCYLXSPPDVMRSHPPLLIIGAAGASGDHVGRMILAPLXDEDNDGKTAMIITLASYPSAMANASTARLDDGGPLLDEQLVVLILCLFSAASYIHHAASFVHQIINAPGGHRFSITTKKE

SEQ ID NO: 7054 - protein, 232 aa, Brassica napus
MASSSYAPFSAVFSGFAATKPNPPPTCSAFLVPKRRSNSRNLKNGVSLKSWNKHGFQFTSRNLSVYARATEEKTVHDFTVKDISGKDVSLDKFKGKPLLIVNVASKCGLTSSNYTELSQLYDKYRNQGFEILAFPCNQFGGQEPESNPDIKRFVCTRFKAEFPIFDKVDVNGPSTAPIYQFLKSKSGGFLGDLIKWNFEKFLVDKKGNVVQRYPPTTSPLQIEKDIQKLLVA

SEQ ID NO: 7055 - protein, 411 aa, Schizosaccharomyces pombe
MALYSISKPVGSKINKHSYQDENTLVGKQALSKGTEKTKLSTNFEINLPRRTVLSDVSNVGKNNADEKDTKKAKRSFDESNLSTNEEADKPVESKFVKKLKVYSKNADPSVETLQKDRVSNVDDHLSSNPLMAEEYAPEIFEYIRKLDLKCLPNPKYMDQQKELTWKMREILNEWLVEIHSNFLLMPETLYLAVNIIDRFLSRRSCSLSKFQLTGITALLIASKYEEVMVPSIQNFVYMTDGAFTVEDVCVAERYMLNVLNFDLSYPSPLNFLRKISQAEGYDAQTRTLGKYLTEIYLFDHDLLRYPMSKIAAAAMYLSRRLLRRGPWTPKLVESSGGYEEHELKEIAYIMLHYHNKPLEHKAFFQKYSLKRFLKASIFVHQLVRNDTSVNRTDDDDLQSEPSSSLTNDGH

SEQ ID NO: 7056 - protein, 282 aa, Streptococcus pyogenes M1 GAS
MAMIQWFPGHMSKARRQVQENVKHVDFVTILVDARLPLSSQNPMLTKIVGDKPKLMILNKADLADATRTKEWKAYYESQGIKTLAINSKEQSTVKKVTEAAKELMADKIQRLRERGIQKETLRTMIIGIPNAGKSTLMNRLAGKKIAVVGNKPGVTKGQQWLKSNKELEILDTPGILWPKFEDELVGLKLALTGAIKDQLLPMDEVTIFGLNYFREYYPNRLTKRFKNIPLEEEAPEIIMTLTRQLGFKDDYDRFYTLFVKEVRDGKLGQYTLDQVGDMDAD

SEQ ID NO: 7057 - protein, 464 aa, Novosphingobium aromaticivorans
MASIAPDSRTDLHTERANPHWVRLGGDHKLDHVPGEDGWPVLGTTLMQLADPLGFQRRMVETHGPVFRTRSFGRRGVNLIGADANELVLFDRDRLFSNEQGWGPVLNLLFPRGLMLMDFEAHRVDRRALSIAFKPEPMRAYCSVLNTGIAQAVQGWGGQMRFYDAIKALTLDTAASSFLGLPLGPEADRLNKAFVDMVQASGGVVRRPLPFTRMGKGVAGRRLMVEYFGRLVRERRADPGQDMFSQFALATREDGSLLPEDVVVDHMIFLMMAAHDTITSSATVLFWQLARNPDWQDRLRAEARAVTGGDGLPLAYEDLGRMELTEMAFKEALRFMPPVPNMPRRALRDFEFGGYRIPAGTPVGISPAAVHADPAHWPEPDRFDPLRFTPENVSGRHKYAWVPFGGGAHMCLGLHFAYMQVKLLVSHILTRYEVAMQPGPAPSWQAWPIPKPRDGLRVEMRRIC

SEQ ID NO: 7058 - protein, 145 aa, Oryza sativa (japonica cultivar-group); identical to SEQ ID NO: 2430

SEQ ID NO: 7059 - protein, 173 aa, Helicobacter pylori
MNLDQLEVSHDADSLCVVIEISKHSNIKYELDKESGALMVDRVLYGAQNYPANYGFVPNTLGSDGDPVDALVLSDVAFQAGSVVKARLVGVLNMEDESGMDEKLLALPIDKIDPTHSYVKDINDLSKHTLDKIKHFFETYKDLEPNKWVKVKGFENKESAIKVLEKAIKAYQG

SEQ ID NO: 7060 - protein, 82 aa, Glycine max
MLHLFMTKKKKKKEEEGKMNLRWMEAVLPLGIIAGMLCVMGNAQYYIHKSAHGRPKHIGNDMWDVAMERRDKKLVEQASPSN

SEQ ID NO: 7061 - protein, 443 aa, Rhodospirillum rubrum
AEAAALALNAGVDIDMMATAYSRGLPEALERGLTDMAHIDASVRRVLGLKERLGLFDDPYARCAPRVDAEGDRARRLLARKAASRSVVLLSNPAKILPLPSRLHRLAVVGPLADSRADMRGPWSAAGLPDDPVSVVEGLRDLLPADSIAFAPGIDLMGKDLSGEEAALDLCRAAEAVVLCLGEAATMSGEANCRADPGLPGQQRAFAEKVFDLGVPVIVVLFSGRPLILPWLIERADAVLAAWFPGCEAGPAIAEVLLGLSDPGGRLPVSWPRHVGQVPLFFGARSGGRPENPEDHYTSKYMDMPNTPQFPFGHGLSYGDFALEALTVGPDEVSADGVIEVTVSLINKGGRPGLGCVFLFIHDPVASVARPLLELKGVLRAEVEAGGRCELRWSLPVADLAFLGADLTPRIEAGVIEIAVGRSADPEGLLRRSVRILTPRHQG

SEQ ID NO: 7062 - protein, 317 aa, Oryza sativa; identical to SEQ ID NO: 2909

SEQ ID NO: 7063 - protein, 342 aa, Chlamydia trachomatis
MFSLLNDCQKAAETVVMQAMLSLMRYRKAHKFIPFWKKPDQTYVTPADYAIQYYFYQKLTSLFPHIPLVGEETLNPATDHPRIPQILQFAQQLDPKVSCQDLYQALSPESSHSSLFWLTDPIDGTSGFIKQRCFAIALSLFYEHTPVLSVIACPSSENNSFKIYSAAKGEGLTICNPTHSFPFSLHEDFQPTCKFCEASLSARNHQHLTTHILSKHLPWNPQPIRADSQCKYAWVADNTVDFFIRIPYSPPRAHYRDHAPGVFLIEEAGGLVTDISGNPLPFSNPNLYLDRHPLILASANEQMHSTILETLYKLRHQATQNMLPLATHISATKHKQLSALQL

SEQ ID NO: 7064 - protein, 427 aa, Coxiella burnetii
MTELTGVSIVTYQHIKVPSQGEKITVNKAVLEVPDRPIIPFIEGDGIGIDITPVMKNVVDAAAEKSYAGKRKIEWMEIYAGEKATKVYGKDNWLPDETLEAIKEYQVAIKGPLTTPVGGGIRSLNVALRQQLDLYVCLRPVRYFTGVPSPVKTPEKVNMVIFRENSEDIYAGIEWPAGSPEAVKLINFLQNEMGVKKIRFPETAGIGIKPVSKEGTSRLVRRAIQYAIDNDRDSVTLVHKGNIMKFTEGAFKDWGYEVAVKEFGAKPLDGGPWHVFENPKTGQKITIKDVIADAFLQQILLRPAEYSVIATLNLNGDYISDALAAEVGGIGIAPGANLSDTVGLFEATHGTAPKYAGQDKVNPGSLILSAEMMLRYLGWKEAADLVVQGIEGAIESKTVTYDFARLMTGAKEVSTSQFGKAIIKHIL

SEQ ID NO: 7065 - protein, 189 aa, Saccharomyces cerevisiae
RANLRTQKRLAASVVGVGKRKVWLDPNETSEIAQANSRNAIRKLVKNGTIVKKAVTVHSKSRTRAHAQSKREGRHSGYGKRKGTREARLPSQVVWIRRLRVLRRLLAKYRDAGKIDKHLYHVLYKESKGNAFKHKRALVEHIIQAKADAQREKALNEEAEARRLKNRAARDRRAQRVAEKRDALLKEDA

SEQ ID NO: 7066 - protein, 363 aa, Streptomyces ansochromogenes
MSSALTDLFPLPIVQAPMAGGVSVPQLAAAVCEAGGSGFLAAGYKTADGMYQEIKRLRGLTGRPFGVNVFMPQPELAESGRRRGLRPPAGRRGAWYETELGDPDGGRDDGYDAKLAVLLDDPVPVVSFHFGVPDREVIARLRRAGTLTLVTATTPEEARAVEAAGADAVIAQGVEAGGHQGTHRDSSEDDGAGIGLLSLLAQVREAVDIPVVAAGGIMRGGQIAAVLAAGADAAQLGTAFLATDESGAPGPHKRALTDPLFARTRLTRAFTGRPARSLVNRFLREHGPYAPAAYPDVHHLTSPLRKAAAKAGDAQGMALWAGQGHRMARELPAGRVVEVLAAELGQARTALSDASRENESRKG

SEQ ID NO: 7067 - protein, 343 aa, Sinorhizobium meliloti
MKAIVIHTAKDLRVEECAVEKPGPGEVEIRLAAGGICGSDLHYYNHGGFGTVRLKEPMILGHEVSGHVAALGEGVSDLAIGDLVAVSPSRPCGACDYCLKGLPNHCFHMRFYGSAMPFPHIQGAFRERLVAKASQCVKAEGLSAGEAAMAEPLSVTLHATRRAGEMLGKRVLVTGCGPIGTLSILAARRAGAAEIVAADLSERALGFARAVGADRTVNLSEDRDGLVPFSENKGTFDVLYECSGAQPALVAGIQALRPRGVIVQLGLGGDMALPMMAITAKELDLRGSFRFHEEFATAVKLMQGGLIDVKPLITHTLPLGEALKAFEIASDKGQSMKTQIAFA

SEQ ID NO: 7068 - protein, 877 aa, Saccharomyces cerevisiae
MSETVKDKVIIDEKVSTKGTVDYAEGAEYSERLSNHSSDFSQWYTDEQILHFMKKLGYENRTLYDIPEDVAYILKKMPELTLEDSFKILKDSIIYFKDDENIPHDQYEEWKRLVDLEDLDSKEGIDEYDSFDIRAFASAIKFHSPYQEVRAVVDPEDDPTIPVETFRAYFLAIIWSVIGSGFNEFFSHRVVSISLNTPIIQMFLYICGKAWAKTIPCWTITIRGRKYGINIDKPWTQKEQMFSTLLYAICQGAFYTHYNILTQKLFYHSAFSFGYQFLLSLSVQFIGFGFAGILRKFVVYPARALWPTVMPTIAINKALLGKEKHESGMSRYKFFFLTFFIMFIYNWFPTYIINILNTFNWMTWIKPSNINLANITGGVTGLGINPISSFDWNVISFNSPLVYPFWSYLTQYLGCILAALIVIAVYYSNYMSCQYLPIFTNSLYTNTGHSFKVTEVLDSDNKLDVKKYQSYSPPYYSAGNLVSYGAFICAYPLMITWSFIVHSKLLFNAFKDWALNLWAMRKLKSWVTMFKSDYRALDDYDDPHSNAMKNYKEVPDWWYFAILIGSLVVGIAVVEHYPTNTPVWGLFVCLGFNFVFLIPTTILQATTGYSFGLNLLIEMVMGYALPGNPIAIMILKAFGYNIDGQADNYVSNLKIAHYCKIPPMALFRGQCVIVFIQIFVNLGVLNWQISNIKDFCTPHQNAKFTCPDAVTYYNASVVWGAIGPKRIFNYIYPIFKWCWLIGACIGIFFGVWKRWGKFYPRYFDPMLFVGGMLNMSPPYNLMYYTSGMIVSYISQYYMKRHHLNLWEKYNYVLSAGFSTGLVLSAIIIFFAVQYKDTAFNWWGNTVPYAGADGVGYPLKNITDTANGYFGYAPGHYP

SEQ ID NO: 7069 - protein, 222 aa, Triticum aestivum
  unsure (1)..(222): unsure at all Xaa locations
MEQGGRSAVTCVDFWSNGFGMRVRIALRELGAAFEYVEEDPRVRQRRELVRRMNPVHRSLPILIHHGRPVCGSSNIVEYIDGRWGADPRLLAGEPADRADARFWADFVDHKVFPTQTTFLKSRGEEKEGAKCELVEQLKRLEEVLCDKXYFSGDEFGFLDIVLIPFSSMFRGYEQHGGFDLEVECPNLMRWVKRCKERESVREVLPDEAKMYDLHKELYGIE

SEQ ID NO: 7070 - protein, 368 aa, Zea mays
MEALWKQASRLKDQVSRQGVFKQFGYGNSDNAFTDESEVKLHQRLEKLYLSTRAAKHFQRDIVRGVEGYIVTGSKQVEIGNKLSDDSQKYGVGNTCTSGDTLSKAATYFGKARSQMEKERGNMLKAFGTQVAEPLRAMVMGAPLEDARHMAQRYDRTRQEAEAQAVEVSRRQNRVRESTGNGDMVSKLEAAEYKLEELKSNMVGLGKEAIAAMSAVEAQQQRLTLQRLIALVEAERTYHQRVLEILDKLEEEMVSERQKIEAPPTPAAENYIPPPAPPSYDEINGAFASTSVNESVQSVDFFLGEALDSFNAESEFELTLSAGDIVIVRKISSNGWAEGECKGKAGWFPHAYIERQERVLASKVPHIF

SEQ ID NO: 7071 - protein, 362 aa, Zea mays
MSQRKGAMAAAVTASKHREDQEAMMVELRRGPWTLEEDNLLMNYIACHGEGRWNLLARCSGLKRTGKSCRLRWLNYLKPDIKRGNLTPEEQLLILELHSKWGNRWSRIAQHLPGRTGHQIKNYWRTRVQKQARQLRVDANSAVFRDAVRCYWMPRLLEKMAAHHHGDGELPPPLHPSHNIAGTGFSRSPPAHGSQQEDPSSSAPAASGHYLQQVDPSPSTSTTSGSTTSAALPPVPCFSESELRWVVDQYGAAYGYTDDLDLDGGAGVVDDDSAAAAALDSLGLDGLDLGPADGGVYSDATLLDYLNATCAGGTTVMTMMGGVHGAAGGGDGHYGPAPWRTDELGQAARKLGDPQHQWRGGI

SEQ ID NO: 7072 - protein, 212 aa, Saccharomyces cerevisiae
MKYNIVHGICLLFAITQAVGAVHFYAKSGETKCFYEHLSRGNLLIGDLDLYVEKDGLFEEDPESSLTITVDETFDNDHRVLNQKNSHTGDVTFTALDTGEHRFCFTPFYSKKSATLRVFIELEIGNVEALDSKKKEDMNSLKGRVGQLTQRLSSIRKEQDAIREKEAEFRNQSESANSKIMTWSVFQLLILLGTCAFQLRYLKNFFVKQKVV

SEQ ID NO: 7073 - protein, 808 aa, Clostridium acetobutylicum
MRRLKTKFLFTTLACFVSFSIFSSTNTYKADTTDTNTVGVTYDAHVENIGWQAPWAKDGEEAGTDGKGLRVEALKLNLTNAPADAKITYQAHVQNIGWQDWVQNGAEAGTDGKGLRVEAIKIKLLNMPDYSVEYQAHVQNIGWQDWVQNGEEAGTDSKGLRIEALRIKLVKKVHPDSITFNSSQMGLKVGETSTLSPSFSPSSTTDKNLIWNSSDASKVSVDTKGDITALSEGTSTITATSTDNGKSASCVVTVTKADPKLQYEAHVENIGWQLPVNDGEEAGTDGQGLRVEALKIRLLNAPNGAKIAYQAHVQNIGWQDWVYDGSEAGTDGKGLRVEAIRIKLVNMPGYSIEYQSHVQNVGWQNWVSDGDEAGTDGRGLRIEALKIKLVKAVPIDSIALDNPPATLNVGDTASLNAVIKPDNATNKGLTWTSSDNKIISVDNSGKITGINKGIATITAASNDGSKKASCTITVNDNPNNIVTFKDSNLEAEVRKCINKPTGTLYKNDVTGITTLNAETKNINYLDGIENLVNLKSLYLPNNNISDISYLKALDNLRTLQLDKNPITDISSLSNLSNLSELDLNDIKTSNFSALKGLTTLQHLSLLDNNINDISFVSNLLKLQYLYLNNNKITDISYLSNLANLDNLSLSNNTLSSLSPLSKLNNLTSLYLINNKLTDVSALNSLSNLQYLSLNDNSINDISPLSNLNNLRFLNLSGNSSLNNIASIKTLSKLTLVNLDYTKVTDLSPLKSISTLTTISLNYTNITTLTPLESLSSLTDLYIVNDSSLNQSSVSEFKAALPHCSVTTY

SEQ ID NO: 7074 - protein, 694 aa, Saccharomyces cerevisiae
MTEQYSVAVGEAANEHETAPRRNIRVKDQPLIRPINSSASTLYEFALECFTKGGKRDGMAWRDIIDIHETKKTIVKRVDGKDKPIEKTWLYYELTPYITMTYEEMICVMHDIGRGLIKIGVKPNGENKFHIFASTSHKWMKTFLGCMSQGIPVVTAYDTLGESGLIHSMVETDSVAIFTDNQLLSKLAVPLKTAKNVKFVIHNEPIDPSDKRQNGKLYKAAKDAVDKIKEVRPDIKIYSFDEIIEIGKKAKDEVELHFPKPEDPACIMYTSGSTGTPKGVVLTHYNIVAGIGGVGHNVIGWIGPTDRIIAFLPLAHIFELTFEFEAFYWNGILGYANVKTLTPTSTRNCQGDLMEFKPTVMVGVAAVWETVRKGILAKINELPGWSQTLFWTVYALKERNIPCSGLLSGLIFKRIREATGGNLRFILNGGSAISIDAQKFLSNLLCPMLIGYGLTEGVANACVLEPEHFDYGIAGDLVGTITAKLVDVEDLGYFAKNNQGELLFKGAPICSEYYKNPEETAAAFTDDGWFRTGDIAEWTPKGQVKIIDRKKGLVKTLNGEYIALEKLESIYRSNPYVQNICVYADENKVKPVGIVVPNLGHLSKLAIELGIMVPGEDVESYIHEKKLQDAGCKDMLSTAKSQGLNGIELLCGIVFFEEEWTPENGLVTSAQKLKRRDILAAVKPDVERVYKENT

SEQ ID NO: 7075 - protein, 106 aa, Narcissus pseudonarcissus
MKGGKSKADTSKKADARLSVKRKAAEKPAKKPVVKKSKAEKDPNKPKRPPSAFFVFMEEFRKQFKEKNPNNKQVSVVGKAAGDKWKSMSATEKAPYEAKAAKRKAE

SEQ ID NO: 7076 - protein, 225 aa, Zea mays
MSSLHATRAELGLVVLYLNKAEARDKICRAIQYGSKFVSNGQPGTAQEVDRSTTLARKVFRLLKWVNDLHALISPPAKGTPLTLVLLGKSKNALLSTFLLLDQFVWLGRTGIVKNKEATDRVARLSLYCWMASSACAGLVELGELKRLSRSMRKLARELRDTDKYENEQYQDKMRQSDERLLALVKAAMDVVVAVGLLQLAPKKVTPRVTGAFGFVTSLISCYQV

SEQ ID NO: 7077 - protein, 171 aa, Bacillus subtilis subsp. subtilis str. 168
MIYPYKEHKPDIHPTAFIADNATITGDVVIGEQSSIWFSVVIRGDVAPTRIGNRVNIQDLSCLHQSPNKTLLIEDDATIGHQVTLHSAVIRKNALIGMGSIILDGAEIGEGAFIGAGSLVPPGKIIPPGHLAFGRPAKVIRPLTEEDRKDMQRIRSEYVEKGQYYKFLQQT

SEQ ID NO: 7078 - protein, 237 aa, Glycine max
  unsure (1)..(237): unsure at all Xaa locations
QPFRYGCEKTTEGDIRLGDWKAADIEILNSFQLLTAKPVVYLVNMTEKDYQRKKNKFLPKIHAWVQEHGGETIIPFSCALERNLADMPPDEAAKYCEXQNTKCGTSLTKIIKTGFSAINLIYFFTAGPDEVKCWQIRRQTKAPQAAGAIHTDFERGFICAEVMKFEDLKELGSESAVKAAGKYKQEGKTYVVQDGDIIFFHLTSTFVIYFKIICLNFIDELNSHEFILLMQRIAVAS

SEQ ID NO: 7079 - protein, 289 aa, Triticum aestivum
  unsure (1)..(289): unsure at all Xaa locations
PGRPSVRRPRVRPASAQRPSSSRRQQLPRDNNGMLKHKNSTSPRLPQXKXDMERRSRLPVPSPEANKNQRQSVDKSHLDTVSPRSKVRRKLAQGEDGHQNVAKSRTRSLNQQGDDMSLMSDGSMSVVSELDIEVTSADRSAEVNASSFQQGNQTPLGRNPQKVKTSYDANKDLSSMDHAAAVPERPSPVSVLDYSFDQENLFRTSKTSNSPNVDDQWHPSDAKPTKLTAQSEKNKLANVASLLEKLQQLTVSKDDDEAPPVDHIAFLCETQIPDHRYVSEILLASGLLM

SEQ ID NO: 7080 - protein, 174 aa, Lycopersicon esculentum
NCVGFVCPEYFKSDFVYRTLWLQDSPSEDITSILYDVFDYFEDVREQHGKVFVHCCQGVSRSTSLVIAYRMWREGQSFDDAFEYVKAARGIADPNMGFACQLLQCQKRVHASPLSPSSLLRMYRVAPHSPYDPLHLVPKMLNDPSPAALDSRGAFIIHIPSSVYVWIGKKCEAI

SEQ ID NO: 7081 - protein, 249 aa, Pisum sativum
GKSYPTVSPDYQKAIEKAKRKLRGFIAEKKCAPLILRLAWHSAGTFDSKTKTGGPFGTIKHQAELAHGANNGLDIAVRLLEPIKEQFPIVSYADFYQLAGVVAVEITGGPEVPFHPGREDKPEPPPEGRLPDATKGSDHLRDVFGKAMGLSDQDIVALSGGHTIGAAHKERSGFEGPWTSNPLIFDNSYFTELLTGEKDGLLQLPSDKALLTDSVFRPLVEKYAADEDVFFADYAEAHLKLSELGFAEA

SEQ ID NO: 7082 - protein, 100 aa, Zea mays
  unsure (1)..(100): unsure at all Xaa locations
MPLRRRKMPAAAEEQAAPAATVKVLFFARARDLTGVADSAVEVPPGSTAGECLARVLAQFPKLEEIRGSVVLALNEEYAADSAAVADGDELAXIPPISGG

SEQ ID NO: 7083 - protein, 343 aa, Vibrio parahaemolyticus RIMD 2210633
MKIKALSKLKPEQGIWMTEVDKPEVGHNDILIKIKKTAICGTDVHIYNWDEWSQKTIPVPMVVGHEYVGEVVAIGQEVRGFEIGDRVSGEGHITCGHCRNCRGGRTHLCRNTIGVGVNREGAFAEYLVIPAFNAFKIPDEISDDLASIFDPFGNAVHTALSFDLVGEDVLITGAGPIGIMAAAVAKHVGARHVVITDVNEYRLELARKMGVTRAVNVAEEKLEDVMAELGMTEGFDVGLEMSGNPAAFNSMLTTMNHGGRIALLGIPPSDMGIDWNQVIFKGLVIKGIYGREMFETWYKMASLIQSGLDLSPIITHHYKIDDFQEGFDVMRSGMSGKVILDWE

SEQ ID NO: 7084 - protein, 344 aa, Helicobacter pylori
  unsure (1)..(344): unsure at all Xaa locations
MALLFTGACGYIGSHTARAFLEKTKENIIIIDDLSTGFLEHIKALERYYPNRVAFIQANLNETQKLDTFLNKQQLKDPIEAVLHFGAKISVEESTRLPLEXYTNNTLNTLELVKLCLKHAIKRFIFSFYGRGLWRVCSSLSEESPLNPINPYGASKMMSERILLDISKVADFNCVILRYFNVAGACMHNDYTTPYTLGQRTLNATHLIKIACECAVGKRKKMGIFGTNYPTRDGTCIRDYIHVXDLANAHLASYHTLLEKNKSEIYNVGYNQGHSVKEVIEKVKEISNKDFLVEILDKRQGDPASLIANNSKILQNTPFKPLYNNLDTIIKSALDWEEHLLKFQ

SEQ ID NO: 7085 - protein, 517 aa, Glycine max
MADQTPGSGTVSVEASSQERRKLPNFLLSVRLKYVKLGYHYLISNAMYLLLIPLLGVASAYLSTISYQDVVQLWENLKFNLLSVTLCSSLIVFLVTFYFMSRPRGVYLVDFACYKPEPECTCTREIFMNRSVETGVFSEENLAFQKKILERSGLGQKTYLPPAILSVPSNPCMAEARKEAEQVMFGAIDQLLEKTGVKAKDIGILVVNCSLFNPTPSLSAMIVNHYKLRGNIQSYNLGGMGCSAGLISIDLAKQLLQVHPNSYALVVSMENITLNWYFGNNRSMLVSNCLFRMGGAAILLSNRSGDRHRAKYQLVHTVRTHKGADDKSYGCVFQEEDETKRIGVALSKDLMAVAGEALKTNITTLGPLVLPMSEQLLFFATLVARKVFKMKIKPYIPDFKLAFEHFCIHAGGRAVLDELEKNLELSDWHMEPSRMTLNRFGNTSSSSLWYELAYTEAKGRIKKGDAPGQIAFGSGFKCNSAVWRALRTINPAKEKNPWMDEIHEFPVHVPKVAPIAS

SEQ ID NO: 7086 - protein, 151 aa, Zea mays; identical to SEQ ID NO: 743

SEQ ID NO: 7087 - protein, 475 aa, Oenococcus oeni
MNNSKGKLNLIELIGLVVGSIIGGGIFNLMHDMAAGAGAGAIIIGWIITAIGMIMLAFTFQNLTMKRPDLDAGIYSYAKAGFGSYMGFDSAWAYWLSAWLGNVGYATLLMSAAAYFFPVFGNGQNLASIVMASVILWGCHFMILHGAKSASFVNTIITIAKLIPIFIFTVIMIISFKMGIFTHGFWYTPNGKFQFTDVMSQVRSTMLVTVWVFIGIEGAVVFSSRANRRKDVGRATVLGIIIVTLIYMLVTLLSLGVMRRSGLANLSQPAMAYLLKSVVGSWGAMIVNLGLIVSVVRAWLSWTMFAGQLPYEAAKKGSFPRLFAKENKNGAPINSLIFTNVCVELFMFSFLITASAYNFFYSISSAGILIPYAFSAFYQLKYSLNENKDDPGRSRNVVIGVIASIYACWLVFAAGENYLLLLMLLFAAGIPVYCYLQKHDNHTKVFGPIELAVAGLTVLAAIYAIYGLIVGSITF

SEQ ID NO: 7088 - protein, 272 aa, Zea mays
SEQGDRYRELAHRVDEALGFMTAAGLTVDHPIMTTTDFWTSHECLLLPYEQSLTRKDSTSGLFYDCSAHMLWVGERTRQLDGAHVEFLRGVANPLGIKVSDKMNPSDLVKLIEILNPSNKPGRITIITRMGAENMRVKLPHLIRAVRNAGLIVTWITDPMHGNTIKAPCGLKTRPFDSILAEVRAFFDVHDQEGSHPGGIHLEMTGQNVTECIGGSRTVTFDDLSDRYHTHCDPRLNASQSLELAFIIAERLRKRRMRSGLNNSLPLPPLAF

SEQ ID NO: 7089 - protein, 416 aa, Oryza sativa (japonica cultivar-group)
MAFSSTAAAASTAFVSGHRRRGGACHLLSSSFLIAFPRAVAARRCGEAAAAPRRVGAVTVRAQAAAGAGKKSVLIVNTNGGGHAVIGFYLAKDLLAAGHAVTVLTVGDEGSDKMKKPPFSRFSVGNIMGVRGLTAAMVNEWMQLIMQELTSAGATTVWGDPADVGAAVGGGASFDVVLDNNGKDLDAVKPVVDWAKAAGVAQFLFVSSAGIYTPSDEPPHVEGDAVKESAGHVGVEKYIAEQFGSWASFRPQYMIGSGNNKDCEEWFFDRIVRGRPVPIPGSGMQVTNISHVRDLASMVALAVESPGAAAGRIFNCVSDRAVTFNGLVKMCAAAAGAQPEILHYDPAAVGVDAKKAFPFRNMHFYAEPRAAKEVLGWRSSTNLPEDLKERFAEYASSGRGQKEMSFDLDDKIIAAA

SEQ ID NO: 7090 - protein, 571 aa, Zea mays subsp. mays
MGPPAYTASPCTGSALFSNTRAPPPPPRLLIRWGPGPPSAVGRHGGRVTPSQERRGPAPSQERRRPAPSQERRRPTESSSQSHQLQERKRHWKAGEFPGTAADGGGGGGRRPALGNRHSKAGEFPGTDGVRPAPAPPQGKRHWKAGEFPGAAAAPGSGTPRTPLKNVKKRLDARADAKAWACTVTEALADRVSSKNWQEALQVFEMLKEQPFYHPKEGTYMKLIVLLGRSGQPTRAHQLFDEMLQQGCQPTPELYTALIGAYCRSGLLDEALQLLNDMKSSPLCQPDVYTYSTIIKACIDAARFDLTDAMYKDMAERSISPNTVTQNIVLSGYGKAGRLDDMERVLSDMLDSVSCKPDVWTMNIILSLFGNRGEVELMERWYEKFRGYGVEPETRTLNILIGAYGKRRMYDKMSAVMEHMRKLAFPWTTATYNNVIEAFAEAGDAGNMEHAFNQMRSEGMRPDTKTFCCLIDGFSRAGQFHKVVGMVKLAERLDVPVNTPFHNAVLGACARADDLVEMERVFRRMKHTQCEPDASTYSILVEAYRKEGMTDKIYALHQENPALVPADFVMV

SEQ ID NO: 7091 - protein, 264 aa, Nitrosomonas europaea ATCC 19718
MPVLAWIIFASLASGLLSIGLAALFALNVHSNKWISVLISYAIGALLGAAFLNALPEALELTESPKQLTLILLLGILIFFILEKLLLWRHCHLSECEAHEPAIQIKSSDVHDHGRSGMMIVLGDTFHNFVDGILIATAFMADIQLGIVTAIAITAHEIPQEAGDFIILLNSGFTRARALWLNLLSGAATLFGGLLGYFMLYQLDHMIAPILAIAAASMIYVAMSDLIPSLHKRPEIRATIQQVTLIILGISTIWLIGLFFGHNH

SEQ ID NO: 7092 - protein, 473 aa, Streptomyces avermitilis MA-4680
MAAVTAAGAAQAPIVAGHPLLGSMNDLLNDPLATYLRARRDHGDVVRFRAGPPGLRADIYAVFSAEGAQQVLATESGNFRKDNVFYGELRDSVGNGLLTSQDATYLRQRRLVQPLFTRRRVDGYAGQVADEAAGLAEAWRGIPGGGVELVGEMHRFALRVVGRILFGTDMETTFEVIERTLPLLQEYALKRGLAPVRTPRTWPTPANRRAARTQAELFALCDGIIDSRRNRKNEGDGGEESGEDLVTLLVRAGNAEDGSLDAAELREQVLIFLLAGHETTATALAFALHLLARHPEQQRRVRDEADRVLGGPGGRAPTAADMEALPYLTMVLKEAMRLYPSAPVIGRRAVADAEVDGVRIPAGADLFVSPWVTHRHPDYWPDPERFDPERFTPEAEAGRPRYAWFPFGGGPRACIGQHLSMLESVLGLAVLIREFEFEAVGEEEVPLGAGITLLAKGPARCRVIPRSSGPRSS

SEQ ID NO: 7093 - protein, 222 aa, Triticum aestivum
MAGEKGLVLLDFWVSPFGQRVRIALAEKGLPYEYAEEDLMAGKSDRLLRANPVHKKIPVLLHDGRAVNESLIILQYLEEAFPDAPALLPSDPYARAQARFWADYVDKKVYDCGSRLWKLKGEPQAQARAEMLDILKTLDGALGDKPFFGGDKFGFVDAAFAPFTAWFHSYERYGEFSLPEVAPKIAAWAKRCGERESVAKSLYSPDKVYDFIGLLKKKYGIE

SEQ ID NO: 7094 - protein, 193 aa, Zea mays; identical to SEQ ID NO: 2566

SEQ ID NO: 7095 - protein, 152 aa, Lycopersicon esculentum
MVKAVAVLNSSEGVSGTYLFTQVGVAPTTVNGNISGLKPGLHGFHVHALGDTTNGCMSTGPHYNPAGKEHGAPEDEVRHAGDLGNITVGEDGTASFTITDKQIPLTGPQSIIGRAVVVHADPDDLGKGGHELSKSTGNAGGRIACGIIGLQG

SEQ ID NO: 7096 - protein, 397 aa, Agrobacterium tumefaciens str. C58 (Cereon); identical to SEQ ID NO: 4612

SEQ ID NO: 7097 - protein, 334 aa, Bifidobacterium longum DJO10A
MTIDYQGAHMKYRSVGKSGLKISEVALGSWVTDLKGTTAEDVAKETVKLAYDSGVNFFDCADAYSGGAAERFLGKTLKQYPRKELVISSKVYFPTGEGVNDRGLSRKHIFESIDQTLKNMQTDYLDMYFCHRFDETTDLTETLRAMSDLVAQGKVLYYGVSEEWGSARLEEAQRIIDRYNLYPITVVQPQYNLNDRYIEHEIMGTCRKLGIGITTFSPLAQGLLTGKYRKGQPLPAGSRATWQSDHQINDLLTDENLDKVEQLRKVADELGTNLPVLSMAWILQHPEISCVIAGASKPSQLENNMKAAGFKIPADAMAEIDKITGFHRFERHVG

SEQ ID NO: 7098 - protein, 376 aa, Andropogon ternarius
ALSIAGAVQSQKLAVRAISRLQALPGGDVKLLCDTVVEHVRVLTGYDRVMVYRFHEDEHGEVVAESRRDNLEPYLGLHYPATDIPQASRFLFRQNRVRMIADCHATPVRVIQDPGLSQPLCLVGSTLRAPHGCHAQYMANMGSIASLVLAVIISSGGDDEQTGRGGISSAMKLWGLVVCHHTSPRCIPFPLRYACEFLMQAFGLQLNMELQLAHQLSEKHILRTQTLLCDMLLRDSPTGIVTQSPSIMDLVKCDGAALYYHGKYYPLGVTPTESQIKDIIEWLTVCHGDSTGLSTDNLADAGYLGAAALGDAVCGMAVAYITPSDYLFWFRSHTAKEIKWGGAKHHPEDKDDGQRMHPRSSFKAFLEVAKSRSLPW

SEQ ID NO: 7099 - protein, 122 aa, Zea mays
MWHVVLSYLVFRGANKQKHVFKKDPKAPIWGKPPKVVGGKLLASGYWGIARHCNYLGDLLLALSFSLPCGVSSVVPYFYPTYLLILLVLRERRDEARCSQKYREIWAEYCKLVPWRILPYVY

SEQ ID NO: 7100 - protein, 365 aa, Novosphingobium aromaticivorans
MDAYAAIIERQGGEFVLDNVSIEDPRDGEVLVKVAAAGMCHTDLTVRDQYYPTPLPAVLGHEGSGVVEKVGRGVTTVKPGDKVVLSFSYCGTCPSCLKGHQAYCPSLFPLNFMGRRLDGSTPITRNGQEVNACFFGQSSFATYSIASENNCVKVADDAQIELLGPLGCGIQTGAGSIHNALCPEPGSSIAIFGVGSVGLSAVMAAKASGCLKIIAVDRNAGRLELARELGATDVIDANTVNAQEAIVAMTGGGADYAMDTTAIPAVLRSAVDSTHNMGETAVVGGAKLGTEFSLDMNNMLFGRKLRGVVEGSSTPQVFIPQLIAMQKAGLFPFEKLCTFYDLDQINQAVEDTEKTGKAIKAILKM

SEQ ID NO: 7101 - protein, 375 aa, Rhizobium etli
MQMRSVILRESGLPKPYSNSKPLKIELVELTPPGPMEVLVKIKAAGVCHSDLSAINGDRPRPLPVALGHEASGVVAAIGPSVEKVEVGDHVVMSFLPVCGHCSYCAEGRASLCEPGYQANAAGTLLSGGKHIRLRGYEINHHSGVSAFSEYAVVSASSVVKVTKDIDLATAALFGCAVMTGVGAVMNTCGVRPGRSVAVIGLGGVGLSAILGAVASGASDIVAIDLIQAKLDLAKELGATKTFLATSPNIVAQVKGATSGGVDYAIEMAGSKKAFELAYEITRRGGMTATAGLASANSRFEVSPLPLVGEERTIKGSYMGSCVPSRDIPRYIDLYLKGKLPVDKLLSSTGPLDEINEVFDRLDRAEINRHLVLMD

SEQ ID NO: 7102 - protein, 352 aa, Streptomyces avermitilis MA-4680
MDTALTRLVGVRHPVVQTGMGWVAGPRLVSATANAGALGILASATMTPGRLRDAVREVRSRTDAPFGVNLRADAGDAGERVRIIVEEGVRVASFALAPSRELIAELKDAGVVVIPSIGARRHAEKVAAWGADAVIVQGGEGGGHTGEVATSVLLPQVVDAVDLPVVAAGGFHDGRGLVAALAYGAAGVAMGTRFLLTSDSTVPDAVKAAYLAATVKDVTVTTAVDGLPHRMLRTPFVGSLETAGRTRALVRAVRGAAGFRKLSGLTWSRMIRDGLAMKHGKELTWSQVLLAANTPMLLRSSMVDGRTDLGVMASGQVAGVIDDLPSCAELVERIMAEAERTLKGLERLRAAR

SEQ ID NO: 7103 - protein, 478 aa, Oenococcus oeni MCW
MDIFRKKDVGEILKHSTPLKRTLRTWDLTFLGIGAIIGTGIFVLTGKGALTAGPAISVSFLVAAICCGFAGLCYAEFASMAPVAGSAYTYSYIAFGEIIAFIIGWDLILEYTLGAATVSVGWSGYFANLLGNLGIHIPTVLTAAAGTTAGVTSYFNLPAFLIVLLITWIISIGITQTKRANDTMVIVKLAVILLFIVCTIWFIKPHNWQPFSPYGLYSFHNGTAAGIIPAASIVFFSFIGFDSVSSSAEETINPSKTLPRGILLSLFISTVLYIIMTLIMTGVVKFTVFAKYLNAPVLAVLHSTGQTWLSIIVSIGAILGITTVILVQLYGQSRISYSMSRDGLFPKFFGDVNMKYQTPFKGTWFFGIITAIAGGLINLNILAELVNIGTLTAFILVSAGVLWMRHSHPEVHRGFKAPGVPFTPIIAIIFCLVLIAGLNWETWIRFIVWFAIGMILYFGYAKKHSKLNSFKPQDKGAD

SEQ ID NO: 7104 - protein, 131 aa, Glycine max
  unsure (1)..(131): unsure at all Xaa locations
PPQIVFSLPQQGVCGAFTQNPQHRKSFLKLTPHKVKKNFFXNKKNQSPIPLFLKFSKNTNFFKGKSPRFXNIRRGPPKTGFSFFKNKSLKGPRFFQFDYVKGRVLRAFPPPPKNQVLFFTPSKGPPEYCLN

SEQ ID NO: 7105 - protein, 376 aa, Elionurus muticus
ALSIAGAVQSQKLAVRAISRLQALPGGDVKLLCDTVVEHVRELTGYDRVMVYRFHEDEHGEVVAESRRDNLEPYLGLHYPATDIPQAPRFLFRQNRVRMIADCHATSVRVIQDPGLSQPLCLVGSTLRAPHGCHAQYMANMGSIASLVMAVIISSGGDDEQTGRGGISSSMKLWGLVVCHHTSPRCIPFPLRYACEFLMQAFGLQLNMELQLAHQLSEKHILRTQTLLCDMLLRDSPTGIVTQSPSIMDLVKCDGAALYYHGKYYPLGITPTESQIKDIIEWLTVCHGDSTGLSTDSLADAGYLGAAALGDAVCGMAVAYITPSDYLFWFRSHTAKEIKWGGAKHHPEDKDDGQRMHPRSSFKAFLEVVKSRTLPW

SEQ ID NO: 7106 - protein, 151 aa, Methanothermobacter thermautotrophicus str. Delta H
MGFRVLDGARIVGDVRIGDGSSVWYNAVLRGDLEPIEIGRCSNIQDNCVVHTSRGYPVRVGDCVSVGHAAVLHGCIVADNVLIGMNSTILNGAVIGENSIVGAGAVITSGKEFPPGSLIIGTPARAVRELSDEEIESIRDNARRYALLARE

SEQ ID NO: 7107 - protein, 487 aa, Oryza sativa
MGMERPQEKVATTTTAAFNLAESGYADRPDLDDDGREKRTGTLVTASAHIITAVIGSGVLSLAWAIAQLGWVIGPAVLVAFSVITWFCSSLLADCYRSPDPVHGKRNYTYGQAVRANLGVAKYRLCSVAQYVNLVGVTIGYTITTAISMGAIKRSNWFHRNGHDAACLASDTTNMIIFAGIQILLSQLPNFHKIWWLSIVAAVMSLAYSTIGLGLSIAKIAGGAHPEATLTGVTVGVDVSASEKIWRTFQSLGDIAFAYSYSNVLIEIQDTLRSSPAENEVMKKASFIGVSTTTTFYMLCGVLGYAAFGNRAPGNFLTGFGFYEPFWLVDVGNVCIVVHLVGAYQVFCQPIYQFAEAWARSRWPDSAFVNGERVLRLPLGAGDFPVSALRLVWRTAYVVLTAVAAMAFPFFNDFLGLIGAVSFWPLTVYFPVQMYMSQAKVRRFSPTWTWMNVLSLACLVVSLLAAAGSIQGLIKSVAHYKPFSVSS

SEQ ID NO: 7108 - protein, 159 aa, Xanthomonas campestris pv. campestris str. ATCC 33913
MQQAEAPLASASGSLVSGRVVLVPALRGIRLTGTVGGLRPGAVAGFHVHERGDCSAADASSAGGHFNPTGAAHGRAGNGSHHLGDMDNLRADAEGVAHLDMILSDITLGDAAPSDVLGKALIVHADADDYRSQPSGNAGARLACGVIRATKWQTPPSQP

SEQ ID NO: 7109 - protein, 146 aa, Saccharomyces cerevisiae
SSNLTEEQIAEFKEAFALFDKDNNGSISSSELATVMRSLGLSPSEAEVNDLMNEIDVDGNHQIEFSEFLALMSRQLKSNDSEQELLEAFKVFDKNGDGLISAAELKHVLTSIGEKLTDAEVDDMLREVSDGSGEINIQQFAALLSK

SEQ ID NO: 7110 - protein, 465 aa, Glycine max
MALNLPSPAQVKPLFFSSNNSTKLPGSFSLKRKDSDTTVERRVYCSAAAQSPPPAWPGTAIPEPSDFKTWDGQKPISVLGSTGSIGTQTLSIVAEFPERFKVVSLAAGSNITLLADQIKTFKPEVVGLRNESLIDELKEALADVDHKPEIIPGEQGVIEAARHPDATTVVTGIVGCAGLKPTVAAIEAGKDIALANKETMIAGAPFVLPLAHKHNIKILPADSEHSAIFQSIQGLPKGALRKILLTGSGGAFREWPAEKMKDIKLADALKHPIWSLGRKITIDSATLFNKGLEVIEAHYLFGASYDDIEIVIHPQSIIHSLVETQDSSVIAQLGIPDMRLPLLYTLSWPERIYCSEVTWPRLDLSKYGSLTFYAPDDKKFPSVNLCYAAGRAGGTMTGVLSAANEKAVEMFVEEKISYLDIFKVVELTCQEHQKELVASPSLEEIIHYDQWARQYAASLQKASSV

SEQ ID NO: 7111 - protein, 332 aa, Nostoc sp. PCC 7120
MSPGKPSILVTGGAGYIGSHTVLALKQAGYDVVILDNLVYGHRDLVEKVLQVELVVGDTGDRPLLDELFKSRHFDAVMHFSAYAYVGESVSDPAKYYRNNVLGTLTLLEAMLAASINKFVFSSTCATYGVPKTVPIPEDHPQNPINPYGATKLMVERILADFDVAYGLKSVRFRYFNAAGANPDGLLGEDHNPETHLIPLVLLTALGKRKFISIFGTDYPTPDGTCIRDYIHVNDLADAHVLGLKYLLKGGDSEVFNLGNGQGFSVREVIAAGEQVTGLPITVEECDRRPGDPPSLIGSGEKARKILGWQPQYSSIKDIVSHAWQWHQKRHQ

SEQ ID NO: 7112 - protein, 385 aa, Amborella trichopoda
PYEVPMTAAGALQSYKLAAKAISRLQSLPSGNIDRLCHTVVQEVHELTGYDRTMAYKFHEDDHGEVISEITKGGLEPYLGLHYPATDIPQAARFLFMKNGVRMICDCRARHVRVFQDEKLASDLTLCGSTLRAPHSCHLQYMENMDSIASLVMAVVVNEDEEENIADGPKRKRLWGLVVCHNTSPRFVPFPLRYACEFLMQVFAIHVNKEVELEALVREKNILRTQTMLCDMLLRDALLGIVTKNPNVMDLVKCDGATLLYENKLWRLGVTPSEVHIRDLARWLSEYHTDSTGLSTDSLVEAGYPDGVSLGDLVCGMAAVKITETDMLFWSRSHTASEIRWGGAKHDPNDKDDKRRMHPRSSFKAFLEVVKTRSFPWKDYEMDAI

SEQ ID NO: 7113 - protein, 572 aa, Neurospora crassa
MSDIEKGSAGSHDKETRVDAATLPAYEAGSVAEAQQEDFMTRNGLNLASFKPRRFHTGDGTEIERTMKSRHLHMIAIGGSIGAGFFVGSGKALHNGGPASLLIDFAIIGVMMFNVVYALGELAVMFPVTGGFYTYSTRFIDPSWGFAMGWNYVFQWAMVLPLELTVCGFTVGYWNQDITVWITTFLVAIIIINVFGTLGYAEEEFWASAFKLGATIVFLIICLVMVLGGGPKGSRYDHYTGAALWYSPGAFANGFRGFCSCFVTAAFAFSGTELVGLAAAEDKNPVKSLPGAIKQVFWRITLFYILGLFFVGLLIPYDDENLLGANPFINVNASPFVLVGKYANLTGFDSFMNVVILVSVLSLGVSCVYGGSRTLTALAQQGYAPKIFTYVDRSNRPLFSVLLIIAFGPLAYVNLAAAGPTVFDWLLSLSGLAALFTWGSICLSHIRFRKAWALKGHSVEEIPFRAAGGVWGSWLGLVLVVLVLIAQFYVAICPPGGGFNTVEGFFVQYLALPVVIVFWIGGFIWKRTSWLRVDQIDVDTGRREHDWESINAYQAELAAMPAWKRWFHKLFV

SEQ ID NO: 7114 - protein, 135 aa, Zea mays
  unsure (1)..(135): unsure at all Xaa locations
SIVDLQVSLTQARIDMSELDEDSDGFLQPHEMEAYIRGLIPNLAQLRDMPTAFVQMYCRIAARXKACIKKVLLSNCLQELMELHXDMFLALDKDTNGTLSKQELKEYADGTLTEIFIERVFDEHVRRSKVGGGNS

SEQ ID NO: 7115 - protein, 351 aa, Zea mays
MSHPSHVKKGMPYVRLGKSGLKVSRIILGCMSYGSKEWQDWVLEEEEAFRHIKAAYDAGIQTFDTANVYSNGVSEIILGKAIKKLNIPRNDIVIMTKVHGAVGRAPGVNFLKSKENPEEVGYVNQRGLNRKHIFESVEASLERLQVKYIDLLQCHRFDNDTPIEETMQALHDVVQAGLVRYIGMSSCWAWQFHAMQNYAINNKLTPFISMQNQHNLVYREEEREMFPTCKYFGVGMIPWSPLARGFVARPLGQQTVRGGCDMFINQYDKNHPNNRKIVERVEEVAKKMNISMAQVAVAWTLQKDGVAAPIVGTTSLDNLKDIIGGVNVKLSEEDVAYLEELYQPQAIIGHA

SEQ ID NO: 7116 - protein, 477 aa, Arabidopsis thaliana
MQRFAAKRSVQNISVSLWRRCISSTSQAATASVKDSDEFQARLPPFAYTPPPYTGPSADVILSKRKEFLSPSMFCLYRKPLNIVDGKMQYLFDESGRRYLDAFAGIAVVNCGHCHPDVVEPVINQIKRLQHPTVLYLNHAIADFSEALASKLPGDLKVVFFTNSGTEANELALMMAKLYTGCQDIVAVRNGYHGNAAATMGATGQSMWKFNVVQNSVHHALNPDPYRGVFGSDGEKYAKDLQDLIQYGTTGHIAGFICEAIQGVGGIVELAPGYLSAAYDTVKKAGGLFIADEVQSGFARTGNFWGFEAHNVVPDIVTMAKGIGNGFPLGAVVTTPEIAGVLTRRSYFNTFGGNSVSTTAGLAVLNVIEKEKLQENAAMVGSYLKEKLTQLKEKHEIIGDVRGRGLMLGVELVSDRKLKTPATAETLHIMDQMKELGVLIGKGGYFGNVFRITPPLCFTKGDADFLVEAMDYSMSKM

SEQ ID NO: 7117 - protein, 392 aa, Caucanthus auriculatus
DLEPVNPADVPVTAAGALKSYKLAAKAISRLQSLPSGNISLLCDVLVKEVRDLTGYDRVMVYKFHEDEHGEVVSECHRSDLESYLGLHYPATDIPQASRFLFMKNKVRMICDCVAPPVKVIQEERLPQPLSLCGSTLRSPHGCHAQYMTNMRIIASLVMSVTVNEEDDMVDGDQPQMARKLWGLVVCHHTSTRFVPFPLRYACEFLIQVFGVQINKEVELAAQVREKHILQIQTMLCDMLLRDAPVAIITQSPNVMDLVKCDGAALYFKNKTWLLGVTPTEEQIRDIAEWLLEYHSGNTGLSTDSLMEAGYPGASALGDAVCGMAAVSITSRDFLLWFRSHTAKEIKWGGAKHDPDDKDDGRKMHPRSSFKAFLEVVKWRSMPWEDIEMDAI

SEQ ID NO: 7118 - protein, 379 aa, Chlamydia trachomatis
MKHLALIGSTGSIGRQVLQVVRSIPDTFIIETLAAYGRNQEALISQIREFNPRVVAVREETTYKELRKLFPHIEILLGEEGLVSVATEPSVTMTIVASSGIDALPAVIAAIRQKKTIALANKESLVAAGELVTTLARENGVQILPIDSEHNALFQCLEGRDSSTIKKLLLTASGGPLRNKSKEELQKVSLQEVLRHPVWNMGPKITVDSSTLVNKGLEIIEAFWLFGLEAVEIEAVIHPQSLVHGMVEFCDGTILSVMNPPSMLFPIQHVLTFPERSPAIGPGFDFLSNRTLEFFPIDEDRFPSVHLAKRVLLEKGSMGCFFNGANEALVHRFLAGEISWHQIVPKLQALVDQHRVQSCLSLEEILSVDAEARARAQEC

SEQ ID NO: 7119 - protein, 261 aa, Streptomyces antibioticus
MPGQKQQVALVTGATSGIGLAVVRALAAQGHQVFFCARNAEKVAVTIKELRGEGLDVDGTSCDVRSVADVKAFVAAAVERFGPVDVLVNNAGRSGGGVTAELTDELWADVIETNLTSVFMVTREVLTAGGMREKSSGRIVNIASTAGKQGVVLGAPYSASKHGVVGFTKALGNELAPTGITVNAVCPGYVETPMAERVRQGYAAAYGTSEEAILEKFQAKIPLGRYSTPEEVAGLVGYLVSDTAASITAQALNVCGGLGNF

SEQ ID NO: 7120 - protein, 194 aa, Oryza sativa
  unsure (1)..(194): unsure at all Xaa locations
LQVKIKQKEALGVAEKRGGRRGPGRETGPRGAGWVRALRAHSNEGRAGRAADGRRGWGARHRAEPGGTGRSEQGRGYGSRTSRVATPREGRRGTEGAISIEGTLAGIRASIILASVGXYLLGQVNVSQGAVCVLASQTAHFCESYIGATLQDKEGFEWLPXNDVVNETKHLNWWYIGCSDAAVASKLALLNTFL

SEQ ID NO: 7121 - protein, 330 aa, Lactobacillus gasseri
MRVLVIGGAGYIGSHAVRKLIEEGNDVVVLDSLYTGHRKAVDKKAKFYQGDIEDTNLVSKILRDENIDAVMHFAAYSLVPESVKKPLKYYDNNVSGMISLLQAMDDAKVKYLVFSSSAATYGIPKTLPITEDTPLDPINPYGETKMMMEKIMHWADKADGIKSIALRYFNVAGASSDGSIGEDHGPETHLIPNILKSAISGDGNFTIFGDDYDTKDGTNVRDYVQVEDLIDAHILALKHVMETNKSDVFNLGTAQGYSNLEILEAAKKVTGIDIPYTIGPRRGGDPDSLVADSSKARKVLGWKPKHENVDDVIATAWNWHKSHPKGYEDK

SEQ ID NO: 7122 - protein, 446 aa, Enterococcus faecium
MNLMEKPAMKRTLTNRNIQLIALGGAIGTGLFLGSAKAIASAGPAVILVYLICGLAIYGLMRAMGDLFLANSTFNSISDFVDYYLGKKWAFFVNWTYWLCWLGAGLAELTAIGLYIHFWFVHVPALISGGSALMILMAVNLVAVKWFGELESFFSIIKILGIFLFILLGIGLSVSDFHTQSIGIKENFGQIDELLPFGFAGMVVSFPMVLFSFAGIEMIGLTVGETSDPQKNLKKAINCLPWRILFFYIGTILSILFVVPWHCLDLKESPLVTMLQVIHCQGGAAIVNLMILVASLSSANSAVYSTSRILYQTAKEKSLPHWFCALSKKGVPLHGILITGMLFFAGLCLHFFVADSRLFFQLLAGMTTSCFLFVWSSILCAHVQFIKEKKRNTTQRYKDLALLVFFTSIAFSLLFESTTRFIPFLLVIWFVFLNFVYKRISNRNIS

SEQ ID NO: 7123 - protein, 139 aa, Klebsiella pneumoniae
MKVLVTGGSGYIGSHTCVQLLQRGHEVVILDNLCNSKRRILPVIERLGGKEATFIEGDIRNEARMTEILHDHAIEAVIHFAGLKAVGESVAKPLEYYDNNVTGTLKLVSAMRAAGVKNFIFSSSATVYGDQPKIPYVES

SEQ ID NO: 7124 - protein, 347 aa, Neurospora crassa
MAKTTTLKEFESVFPKLEEALLEYAKAYKLPEQMLSWYKQSLEVNTLGGKCNRGMSVPDSASILLGRPLTEEEYFQAATLGWMTELLQAFFLVSDDIMDSSITRRGKPCWYRQEGVGMVAINDAFMLESAIYTLLKKYFRSHPRYVDFLELFHEVTFQTEMGQLCDLLTAPEDKVDLDNFSMDKYTFIVIYKTAYYSFYLPVALAMYMLDIATPENLKQAEDILIPLGEYFQVQDDYLDNFGLPEHIGKIGTDIQDNKCSWLVNKALSIVTPEQRKTLEENYGRKDKAKEAVIKQLYDDLKLEDHYKQYEEERVGEIRKMIDAIDESKGLKKQVFEAFLGKIYKRSK

SEQ ID NO: 7125 - protein, 488 aa, Neurospora crassa
MEYKPQPSSPTRVQVQPRLIIHGGAGNITPASLGPERYVAYRSSLLTIVSKAHTYLTTPTQSNYNSPSSSSKLPSALEAATYAVTLLEDNPLFNSGHGAVFTRDGINELEASVMVSRGQAKRGVGVTGLRHVRNPILLAKKVLEHGKDDLLGRGKKLDNNTGDGEPDVPSAQGHTLIHGPTAEKLARQYGLEMVDPSYFFTQKRWDEHVRALEREKREQQDLLGAGTASGVSATWSKDEYLPQGTVGAVALDVEGVICVATSTGGMTNKLTGRIGDTPVVGAGFWAEEWTEEGDPTSPHKNGSRNPLYSPGPAVVLSDALKRLIADCLPSPFLYTPTLQDSSGGLTTTRSIGVSGTGNGDSFFRVSAARTVGAIARYSSLPSVVALTKVAGPSGELQKSADDRWGKAGEGEGGIIGLELVVVRDASGNVVETRSDILQDYNCGGMFRAWIDEEGVAYARIFRKDQDISSSYVGEGRPEDPRFWSGEKI

SEQ ID NO: 7126 - protein, 355 aa, Staphylococcus aureus subsp. aureus MW2
MWNKNRLTQMLSIEYPIIQAGMAGSTTPKLVASVSNSGGLGTIGAGYFNTQQLEDEIDYVRQLTSNSFGVNVFVPSQQSYTSSQIENMNAWLKPYRRALHLEEPVVKITEEQQFKCHIDTTIKKQVPVCCFTFGIPSESIIKRLKEANIKLIGTATSVDEAIANEKAGMDAIVAQGSEAGGHRGSFLKPKNQLPMVGTISLVPQIVDVVSIPVIAAGGIMDGRGVLASIVLGAEGVQMGTAFLTSQDSNASELLRDAIINSKETDTVVTKAFSGKLARGINNRFIEEMSQYEGDIPDYPIQNELTSSIRKAAANIGDKELTHMWSGQSPRLATTHPANTIMSNIINQINQIMQYK

SEQ ID NO: 7127 - protein, 78 aa, Triticum aestivum
MDASALNDPRFQALLEEEKKKAMMNEMIAKLTDTCWDKCITGSIGSSFSNSETSCLSNCAKRFIDVKMLTMQRANSSS

SEQ ID NO: 7128 - protein, 104 aa, Aeropyrum pernix
MYPKRDGARYLLVCKSCGYSEEASREDHQAYRMRVTVEKGPRDKIVVIDDETPVGAQVLKGSVTCPKCGHDEVYFWMMQTRSADEPMTRFYRCKRCRYTWREYA

SEQ ID NO: 7129 - protein, 619 aa, Neurospora crassa
MGTGKKEKSRIQRQGKVTGDPKVKGENFYRSAKKIKALNVLKEGKAIRNKEGKVVKAASYQSRDVPTAVIEPNRRWFNNTRVISQDTLTSFREAIAEKDKDPYSVLLKSNKLPMSLIRDGPKDALKKHQAKMTIESEPFSQTFGPKAQRKRPKLSFNTIGDLTEHSEKSMDTYQARLEEIKLLSGASGYGGGLADDDVQEEDFSVATAKEAIFTKGQSKRIWNELYKVIDSSDVILHVIDARDPLGTRCRHVEKYLATEAPHKHLIFVLNKIDLVPSKTAAAWIRVLQKDHPTCAMRSSIKNPFGRGSLIDLLRQFSILHKDRKQISVGLVGYPNVGKSSIINALRGKPVAKVAPIPGETKVWQYVTLMRRIYLIDCPGIVPPNQNDTPQDLLLRGVVRVENVDNPEQYIPAVLNKVKPHHMERTYELKGWKDHIHFLEMLARKGGRLLKGGEPDVDGVAKMVLNDFMRGKIPWFTPAPEKEEGETDTMEGREGRYGEMSKKRKRDEDDSAPATTPASAGEDAKEEDPENFAGFDSDSDSEVEEAAEEKGEEKSTAEDMIPLDASSDEEEDGEEEGSDVEDDEEGSDLDIEGASELEESESEAEAAPAPPPKKQRRSRK

SEQ ID NO: 7130 - protein, 511 aa, Solanum melongena
MDFFSTSSLSSYYHLIFTILAFVISSIIYFLSKKAESKKLKLPPGPPGWPVVGNLLQVARSGKPFFQIMRELRQKYGPIFTLRMGTRTMIILSNADLVHEALILKGQVFATRPRENPTRTVFSCDKFTVNAAVYGPVWRSLRKNMVQNGLSSIRLKEFRAVRKSAMDKMIEKIRAEADANEGVVWVLKNARFAVFCILLAMCFGVEMDEKTIEKIDQMMKSVLIALDPRLDDYLPILSPFFSKQRKHAMDVRKQQIKTIVPFIEQRKKILESPEIDKTAASFSYLDTLFDLKIEGRNSTPTYPELVTLCSEFLNGGTDTTATAIEWAIGRLIENPNIQSQLYEEIKKTVGENKIDEKDIEKMPYLNAVVKELLRKHPPTYMSLTHAVTEPAKLGGYDIPTGVNVEIFLPGISDDPNLWSEPEKFDPDRFYLGKEDADITGVSGVKMIPFGMGRRICPGLNMATVHVSLMLARLVQEFEWADPENTRVDFTEKLEFTVVMKNTLRAKIKPRM

SEQ ID NO: 7131 - protein, 334 aa, Bacillus halodurans
MAILVTGGAGYIGSHTVLFLLEQGEQVIVLDNLQKGHAGALSDVTFYHGDIRDDQLLDTIFTTHSIDTVIHFAANSLVGESVKQPIEYYENNVIGTHTLLKKMLEHDVKKIVFSSTAATYGEPVQIPIQESDPTIPTNPYGETKLAIEKMFHWCQEAYGLQYVCLRYFNAAGADPNGRIGEDHSPESHLIPIVLQVALGQRERVAIFGDDYQTEDGSCIRDYIHVMDLANAHYLACEHLRKDGQSGSFNLGNGKGFSVKEVIEVCRQVTGHPIPAEIAPRRSGDPASLIASSEKAQTILGWEPKYPSLETMVEHAWNWHKEHPHGYSTENKDKQ

SEQ ID NO: 7132 - protein, 191 aa, Novosphingobium aromaticivorans
MVPDRHGSGDQSMTIKLPLSLTVCALTLGACTTIDRDEAPRVLARAALADANGRSVGSAKIEQTGLIVHLKATVEGLSPGEHGIHLHTAGKCEAPSFATAGGHLNPSAHQHGTLNAAGPHLGDLPNIAVSASGTGSLDVPLKGSSAEVLAQVLDADGTAVVVHAGPDDYKTDPAGNSGGRIACGVLVSEAR

SEQ ID NO: 7133 - protein, 233 aa, Staphylococcus epidermidis ATCC 12228
MIEHLGINTPYFGILVSLIPFVIATYFYKKTNGFFLLAPLFVSMVAGIAFLKLTGISYENYKIGGDIINFFLEPATICFAIPLYRKREVLKRYWLQIFGGIAVGTIIALLLIYLVAITFQFGNQIIASMLPQAATTAIALPVSDGIGGVKELTSLAVILNAVVISALGAKIVKLFKISNPIARGLALGTSGHTLGVAAAKELGETEESMGSIAVVIVGVIVVAVVPILAPILL

SEQ ID NO: 7134 - protein, 681 aa, Nostoc punctiforme
  unsure (1)..(681): unsure at all Xaa locations
MANRIRQSLNLQEILDATVVELRAFLQTDRTKVYRFDRDGHGHVVAEASAPNRLPSLLGLHYPADDIPPQARALFVKARTRSIVNVSEQRIILNSLPTPTTTAIGDLTVEEVQEQPLEDILSRPVDPCHVDYLTQMGVQSSLVVPIIYQQELWGLLISHHAEPREITSEDLLVVQLLADQVSLAITQASLLSQVQEQQQRDAIVNQIATMLHAPLTPEEILHNVLEQAVKASGSSGGRLYLTSPDEALPAHLYTYGNQPAPSEQEQPHLLENHPLWQEVRKIPAPIGTTLTQKDKPALRVVINLQQEPRLHQLIESFQTTPIRGLIVQPLYYSKEFLGYLTFFRDQISTKNLWPGYEEADERQQRPRQSMAQWQALKEDKAHPWSIEEMELIQSLNIHLSLAVLQNRLYHRERQQRLIVEMHNEALSHARAAAEEVSRLKSNFLASTSHELRTPLASTLNYLKLLKERLYEDEDELREYIDGAYQSTQNLVTIINDVLDIAKIEDGRIALDLETVYLQQLLQEQCFLSGAESRYKAIPLTLDCEIETVFADKIKVRQVMTNLLDNAFKFTDEGQIDVRAVVDSTGTMAQISVHDTGIGIEMENSEQLFSPFVQADGSAQRSYGGTGLGLTICKRLVELMGGKIWLESPGLGQGNTVTFTLPLNEQSQVAGQGSLFEGQAXX

SEQ ID NO: 7135 - protein, 701 aa, Brassica napus
MTSTSLGPSMLLSYGSSSRDFHDLRFRLISGPRVRVPSFRRFRIHCVSKGKDVTPIIESSSSSGGDAALSYSEWKAVPDIWRSSAEKYGDKIALVDPYHDPPLKLTYNQLEQEILDFAEGLRAVGVKADEKIALFADNSCRWLVSDQGIMSTGAVNVVRGSRSSVEELLQIYQHSESVALVVDNPEFFNRIADTFTSKVSLRFLILLWGEKSSLVTQGMQIPVYSYTDIKNLGQEKRAGSNDTRKSINPDDTAAIMYTSGTTGNPKGVMLTHRNLLHQIKHLSAYVPAEAGDRFLSMLPSWHAYERACEYFIFTCGVEQMYTSIRFLKEDLKRYQPHYLISVPLVYETLYSGIQKQISTSSAARKYLALTLIKISLAYMEMKRIYEGMCLTKEQKPPMYIVSLVDWLRARVVAALLWPLHMLAKILIYKKIHASIGISKAGISGGGSLPIHIDKFFEAIGVILQNGYGLTETSPVICARTLSCNVIGSAGYPMHGTEFKIVDPETNTVLPPGSKGIVKVRGPQIMKGYYKNPTTTKQVLNESGWFNTGDMGWIAPHHSTGRSRRCGGLIVLEGRAKDTIVLSTGENVEPLEIEEAAMRSRLIDQIVVIGQDQRRLGAIIMPNKEEAEKLDPETSQLSSEKLKSLVYQELRKWTSECSFQVGPVLIVDEPFTIDNGLMTPTMKIRRDKVVAKYKDEINQLYN

SEQ ID NO: 7136 - protein, 468 aa, Salmonella typhimurium LT2
MDTLQQSPPAEPEGGLRRNLKKRHLLMMSLGGTIGTGLFIGIAEPLSSVGPAGTLLAYLFAGTIMLATMMCLGELSCAFPHSGSFQHYALMFMPSPCWSYTIGWLYWFSWVFSLAADLTAAGFIAHQFFPAVPVYMFCLAILLILTAINLTSAKSFGECEYWLSAIKVFAIVLFICAGGVMIYSLMGHSDWHPTLKTDGMWFPHGWEQIVVYMTIVIYSFQGVELVGNAAGETESPHIILPKVILGIGLRIILFYGLAIAVLALVYPHELTPNGQSPFVWVFSHAGIPGADTLMTLVIFSAAVSAANSAIYASSRMLWSMAGDRFAPACFGKTNGGGVPVYAILITALLALVSLLTRYIPAQQFYLYLIASTGQVGCLAWITIGWCQYRFRQSVRNGTYASDLLRYRSPLFPWTARFVIITNFAIMVGTWFSEQGVVIMLVELAFMIGILLSWYLFRPTLSRLRNTVG

SEQ ID NO: 7137 - protein, 337 aa, Zea mays
  unsure (1)..(337): unsure at all Xaa locations
MAPGSKAERKAALDAGAWMFNVVTSVGIIMVNKALMATHGXSFATTLTGLHFAMTXTLMTLVMKWLGYIQPSXLPLPELVKFAFFANLSIVGXMNVSLMWNSVGFYQIAKLCIIPVLCILEIMFDKVRYSRDTKLSIVLVLIGVAVCTVTDVSVNSQGLLAAVIAVWSTALQQHYVHHLQWKYSLGSFNLLGHTAPAQAASLLVLGPFVDFWLTNKRVDAFNYTSIVTFFIVLSCIIAVGTNLSQFICIGRFTAVSFQVLGHMKTVLVLTLGFLFFGKEGLNFHVALGMLLAVIGMIWYGNASSKSGGKERQVYPTPSEKTQKHGALSSQSELDQKV

SEQ ID NO: 7138 - protein, 154 aa, Glycine max
  unsure (1)..(154): unsure at all Xaa locations
PRLRTGCKKPPEGWAKYVLQPLWESXFVNFFPLWMPXNMITLMGIMFLLVSALLGYIYSPQLDTPXSRWVHFAHGLLXVLYQTFDAVDGKQARRTNSLSPLGELFDHGCDALACTFEALAFGSTAMCGXNTFWWWLISAITFYGATCEHYFNNT

SEQ ID NO: 7139 - protein, 394 aa, Zea mays subsp. mays
LGAERRARLPPGEMGWPLVGGMWAFLRAFKSGKPDAFIASFVRRFGRTGVYRSFMFSSPTVLVTTAEGCKQVLMDDDAFVTGWPKATVALVGPRSFVAMPHDEHRRIRKLTAAPINGFDALTGYLPFIDSTVTSSLRAWADHGGSVEFLTELRRMTFKIIVQIFLGGADQATTRALERSYTELNYGMRAMAINLPGFAYRGALRARRRLVAVLQGVLDERRAARAKGVSGGGVDMMDRLIEAQDERGRHLDDDEIIDVLVMYLNAGHESSGHITMWATVFLQENPDMFARAKAEQEAIMRSIPSSQQGLTLRDFRKMEYLSQVIDETLRLVNISFVSFRQATRDVFVNGYLIPKGWKVQLWYRSVHMDPHVYPDPTKFDPSRWEGHSPRAGTFL

SEQ ID NO: 7140 - protein, 465 aa, Lycopersicon esculentum
MGSGAIDDSSKFDDDGRPKRTGTVLTTSAHIITAVIGSGVLSLAWATAQLGWIAGPVALIAFSAITWFASILLADCYRAPDGSRSYTYMDAVRAHLGGRKVQLCGLAQYSNLFGVTIGYAITTSISMVAIKRSNCFHRKGHDAGCHESNNPFIIIFGVMQILLSQIPNFHKLSFLSIIAAAMSFAYSFIGLGLSIAKIAKDGVSANTSLTGTIVGKDVSSRDKMWNTFSALGDIAFAYAFSIVLIEIQDTLKSHPPENKSMKKATFTGISVSTIFYLLCGLLGYAAFGNKAPGNFLTGFGFYEPFWLIDFANVCIVIHLVGAYQVFCQPIFGFVEGWSRQKWPESKFITKEYMINLSHLGLFNFNFYRLVWRTLYVVFTTILAMLFPFFNDFVGFIGAASFWPLTVYFPIQMYIAQAKIPKYSFTWIWLNILSFVCLIISLLAAAGSVRGLIKSLQEFEPFQSRS

SEQ ID NO: 7141 - protein, 326 aa, Glycine max
MGGWAIAVHGGAGVDPNLPLEHQEEAKQLLTRCLNLGISALNSNLPAIDVVELVVRELETDPLFNSGRGSALTEKGTVEMEASIMDGPKRRCGAVSGLTTVKNPISLARLVMDKSPHSYLAFSGAEEFARQQGVEVVDNEYFITPDNVGMLKLAKEANTILFDYRIPTSGYETCGSGVESPLQMNGLPISVYAPEPVGGVVVDRKGRCAAATSTGGLMNKMTGRIGDSPLIGAGTYACDVCGVSCTGEGEAIIRGTLAREVAAVMEYKGLKLQEAVDFVIKHRLDEGMAGLIAVSNAGEVAYGFNCNGMFRGCATENGFMEVGIWE

SEQ ID NO: 7142 - protein, 363 aa, Prochlorococcus marinus subsp. marinus str. CCMP1375
MLKVGIVGLPNVGKSTLFNALVANAQAQAANFPFCTIEPNVGTVSVPDDRLKLLGALSDSKELVPTRIEFVDIAGLVKGASQGEGLGNKFLSNIREVDAIVHVVRCFEDENVIHVSGSVDPVRDIEIINLELGLSDLSQIEKRRERLKKQIRNNKESQVEDQILEKIHLEIEQGGVARSVTLLDEERQLIKPLGLLTAKPIIYASNLTEDELSLGNVFSKNVKELAENESSENVRISAQVEAELIELGEFERQDYLAGLGVQEGGLQSLIKASYNLLGLRTYFTTGEKETKAWTINSGMTAPQAAGVIHTDFERGFIRAQTINYEKLLTAGSLLEAKNKGWIRSEGKEYIVQEGDVMEFLFNV

SEQ ID NO: 7143 - protein, 332 aa, Glycine max
MAAIFSSSLFVSSPLPKPLSSSYSRIHNAPQLFRARSSLLQDNEEKVIVQDSFPSKTSPLHSADKSTSGNSINTSAFEKRIIKVEQSVNIFLTDSVIKILDTLYHDRHYARFFVLETIARVPYFAFMSVLHMYESFGWWRRADYLKVHFAESWNEMHHLLIMEELGGNAWWFDRFLAQHIAIFYYIMTVLMYAVSPRMAYHFSECVESHAFETYDKFIKVQGDELKKMPAPEVAVNYYTGDDLYLFDEFQTSRVPNSRRPKIENLYDVFVNIRDDEAEHCKTMKACQTHGNLRSPHSYAEDDDSSVCALEADCEGIVDCIKKSVTSNPAKVK

SEQ ID NO: 7144 - protein, 261 aa, Streptomyces cyanogenus
MSQQDQRVALVTGATSGIGQPPGCSPPRGTGCSRRGNAENVAETVKQLQLQDEGLDVDGTALDVRSADGVRAFVQSAVDRFGTVDVLVNNAGRSGGGVTADIADELWDDVIATNLTSVFRMTREVLNTGGMRGKSRGRIINIASTAGKQGVVLGAPYSASKHGVVGFTKALGNELAPTGITVNAVCPGYVETPMAQRVRQGYAAAYNATEDAILEKFQAKIPLGRYSTPEEVAGLVGYLASDTAASITSQALNVCGGLGNF

SEQ ID NO: 7145 - protein, 346 aa, Azotobacter vinelandii
MKALVLEKQHDLKIRDIDLPLVLGPDDVRIRIHTVGVCGSDVHYYTHGRIGHFIVDQPMVLGHEAAGTVIEVGSNVTHLAKGDRVCMEPGIPNPRSKASRLGLYNVDPSVVFWATPPVHGCLTPEVVHPAAFAYKLPDHVSFAEGALVEPFAIGMQAAVKARIKPGDVAVVIGAGTIGMMTALAALAGGASQVLVSDLMVEKLAIAQRYEGITAVNVREQSLQDKVAEATGGWGADVVFEASGSARAYGDALAAVCPGGALVLVGMPVEPVLFDVVAAQAKEIRIETVFRYANVYERAVNLIASGKVDLKPLISATFPFERGVEAFERAASAQPGDVKVQITFGDA

SEQ ID NO: 7146 - protein, 220 aa, Retama raetam
MGKSYPTVSGDYQKAVEKAKKKLRGFIAEKSCAPLILRLAWHSAGTFDVKTKTGGPFGTIKNPAELAHGANNGLDIAVRLLEPIKEQFPILSYADFYQLGGVVAVEITGGPEVPFHPGREDKPEPPPEGRLPDATKGSDHLRDVFGKAMGLSDQDIVALSGGHTIGAAHKERSGFEGPWTSNPLIFDNSYFTELLSGEKEGLLKLPSDTALLSDPVFALC

SEQ ID NO: 7147 - protein, 143 aa, Cichorium intybus
MAREKIKIRKIDNITARQVTFSKRRRGLLKKAEELAVLCDADVALVIFSATGKLFEYASSSMQELLGKYKLHSTNNVNKVDEPSLDLQLVESQESRMSQEVLEKDRELSQLRGEDLQGLTLEELQRLESLLEGRLNRVAPDKG

SEQ ID NO: 7148 - protein, 298 aa, Oryza sativa
  unsure (1)..(298): unsure at all Xaa locations
MGVAAANVAAFVLLAIAPVAAAPSSPPRSGGDSLSFSDVISISFFMAVFFPVFIVLLAFACLRLFHDDGEPALADTSSSEWSRRGGGGGNRAGLDAAEIAALPLVSYRDARRHRIGDARGDPLECAVCLLEFEDDDALRLLPACPHAFHPECIGLWLEKHVTCPLCRANVLDAPPPPPPPPPSLEQDTASPPPAHETVVVIGDAGASEEAEAEERIRIQCLAGVRRAAGRQALPRSNSTGHERGGGGMERFALRLPEHVRLEILMSHRLRHVTSAVASVRGATSRRGEESEKRRGASX

SEQ ID NO: 7149 - protein, 353 aa, Arabidopsis thaliana
MANICIATTATNNQVILRDYVSGFPKESDLYIAAATVDLRVPPGSMAVLVKNLYLSCDPHSRTRMGKPDPSSPTSMAHAFTIGKPISGFGVAKAIHSCHPNYKTGDLLWGRVGWEEYCVISPTPSSHFKIHHTDVPLSFYTGILGIPGLTAYVGFYEICSPKKGKTVFVSAASGAVGQLVGQFAKMVGCYVVGSASSKEKVDLPKTKFGYDDAFNYKEEQDLSAALKRCFPKGIDIYFENVGGKMLDAVLQNMRTHGRIAACGMISQYNLKESEVLHNTATIVHKRIRVQGFAAVEFFDRYSKFLDFILPHVREGKITYVEDIAQGLENGPSALIGLFHGKNVGKQLVEVARE

SEQ ID NO: 7150 - protein, 392 aa, Rhynchophora phillipsonii
DLEPVNPADVPVTAAGALKSYKLAAKAISRLQSLPSGNISLLCDVLVKEVRDLTGYDRVMVYKFHEDEHGEVVSECRRSDLESYLGLHYPATDIPQASRFLFMKNKVRMICDCVAPPVKVIQDERLPQPLSLCASTLRSPHGCHAQYMTNMGIVASLVMSVTVNEEDDMVDSDQPQMARKLWGLVVCHHTSTRFVPFPLRYACEFLIQVFGVQINKEVELAAQVREKHILQIQTMLCDMLLRDAPVAIITQSPNVMDLVKCDGAALYFKNKTWLLGVSPTEEQIRDIAEWLLEYHSGNTGLSTDSLMEAGYPGAAALGDAVCGMAAVSITSRDFLLWFRSHTAKEIKWGGAKHDPDDKDDGRKMHPRSSFKAFLEVVKWRSMPWEDMEMDAI

SEQ ID NO: 7151 - protein, 343 aa, Escherichia coli CFT073
MQVKTQSCVVAGKKTVAVTEQTIDWNNNGTLVQITRGGICGSDLHYYQEGKVGNFMIKAPMVLGHEVIGKVIHSDSSKLHEGQTVAINPSKPCGHCKYCIEHNENQCTEMRFFGSAMYFPHVDGGFTRYKMVETSQCVPYPAKADEKVMAFAEPLAVAIHAAHQAGELQGKRVFISGVGPIGCLIVSAVKTLGAAEIVCADVSPRSLSLGKEMGADVLVNPQNDDMDHWKAEKGYFDVSFEVSGHPSSVNTCLEVTRARGVMVQVGMGGAMAEFPMMTLIGKEISLKGSFRFTSEFNTAVSWLANGVINPLPLLSAEYPFTDLEEALRFAGDKTQAAKVQLVF

SEQ ID NO: 7152 - protein, 194 aa, Glycine max
  unsure (1)..(194): unsure at all Xaa locations
MTTISNCSLLFLFLFLSTLHIASTLSTPTNFIKSSCSTTQYPAPLXIQSLSVYASTIQQDPHELVQTALSLSLNHTEATKTFVAKCNKFRGLKPREYAALKDCAEEISDSVDRLSRSLKELKLCKVKGEDFTWHISNVETWVSSALTDESTCGDGFAGKALNGKIKEAIRARMVNVAQVTSNALSLINQYAAQH

SEQ ID NO: 7153 - protein, 222 aa, Oryza sativa
  unsure (1)..(222): unsure at all Xaa locations
XMLLIYSRKKGCIPLDILSIEDGKRLKSFXHLLHRNKKVDFIEQFNEKLLIKQEGENLQILDVRNFQSIEVSRSEFVTPXSAFTFLXYEMQLSLTFRSRSVSVWNFRGELVTSFEDHMLWHPDCNTNSIYITSNQDLIISYCKADPNDPSSEENACSINISEILTGKCLAKIKAGNLNKQRVSKFQSTPSEALGDITALYYDEEREEIYTGNRLGLVHVWSN

SEQ ID NO: 7154 - protein, 358 aa, Agrobacterium vitis
MREYKIAAIPADGIGPEVIAAGLQVLEALEKRSGDFSIHTETFDWGSDYYKKNGVMMPADGLEQLKKFDAIFFGAVGAPDVPDHITLWGLRLPICQGFDQYANVRPTKVLPGITPPLRNCGPGDLDWVIVRENSEGEYSGHGGRAHKGLPEEVGTEVAIFTRVGVTRIMRYAFKLAQARPRKLLTVVTKSNAQRHGMVMWDEIAAEVSKEFPDVTWDKMLVDAMTVRMTLKPQSLDTIVATNLHADILSDLAGALAGSLGVAPTANIDPERRFPSMFEPIHGSAFDITGKGIANPVATFWTAAQMLEHLGEKDAATRLMSAVERVTEAGILTPDVGGTANTQQVTDAVCEAIAGSNIL

SEQ ID NO: 7155 - protein, 339 aa, Pseudomonas aeruginosa UCBPP-PA14
MARKISYQQAINEALAQEMRRDPSVFIMGEDNAGGAGAPGEDDAWGGVLGVTKGLYHQFPGRVLDTPLSEIGYVGAAVGAATRGMRPVCELMFVDFAGCCLDQILNQAAKFRYMFGGKAVTPLVIRTMVGAGLRAAAQHSQMLTSLWTHIPGLKVVCPSSPYDAKGLLVQAIRDNDPVIFCEHKLLYSMQGEVPEELYSVPFGEANFLRDGDDVTLVTYGRMVHLALDAAASLARQGISCEVLDLRSTSPLDEDSILESVEKTGRLVVVDEANPRCSMATDIAALVAERAFSALHAPIRRVTAPHTPVPFSDALEDLYIPDAAKIEAAVRQALEGRDAA

SEQ ID NO: 7156 - protein, 215 aa, Triticum aestivum
MAQRQDIIISHFSHPGHELVKRHHTGPFRCDMCWEDLSGTAYICRAGCDFCIHESCAGHSQTFSSPEHHVHPLTLVQTRRDATLSCDVCFGLCAPGSFLYRCPPCGFDMHPTCALLPQVVRSVRDPTHDLTPVVPDGRCAACDAGRGARVVTTAARHATVDYHISCAASTGDNNSAHELKMPLTLRCTIKVQEQTRKPSWDCGSAYMYQRSNVML

SEQ ID NO: 7157 - protein, 344 aa, Streptomyces rochei
MRSLTYSQAISEATVQCMEADPAIVLAGQSVDDYKGVYGTTGEAFARFGSARVIDIPNGENAFAGIAIGAATMGLRPLLVHTRDDFMFLAMDALINLAAKWRYMYGGKRGVPVVSRGVVGRGWGQGATHSQSLQSLFGHFPGLHVATPASPADAKGLLVTALQGDTPVVLLENRGLYDLRGEVPSEPVAVPFGKGRVVRAGDDVTIVAASLMVHEAERAAGVLAARGISAEVVDVRSIRPLDDALICASVAKTGHLVVADTSWARYGFTAEVVAVVAENVPGALKAPVRRVTPPDCPAPVSWPLENAFNPGAETVVRACLEVLGVAGGAVPRIRNVMAGFAGPY

SEQ ID NO: 7158 - protein, 238 aa, Geobacillus stearothermophilus
EFIHLPLNDVDALKQAMSEEVAAVMLEVVQGEGGVRPVDPAFLQTASELCQQHGALLIIDEVQTGIGRTGKPFAYQHFDVEPDIITAAKGLGSGIPVGAMIGKAFLKESFGPGVHGSTFGGNPIAMAAAKATLEVVFDPAFLQDVQEKGRYFLARLHDALASLDIVKDVRGLGLLVGIECQTDVAPLLPLIHENGLLVLSAGPNVIRLLPLVVTKAEIDEAVDILTNVLNNANASAVL

SEQ ID NO: 7159 - protein, 373 aa, Oryza sativa (japonica cultivar-group)
MDGQDRVVTIIGRNLWETGNDAGGEMSPPPPPPPPRVVICVGDVHGYISKLESLWANLQSALPPDAFATALVVFLGDYCDRGPSTREVIDFLLALPSRHPAQRHAFLCGNHDLAFAAFVGALPPPPDGTPFSSTWGEYIQNEENEGWYRGPGHEGMHCQGRRWGGIMKEKRNPKRGSSYMGSIYDARPTFESYGVAHGSPDLVKAVPEEHKKFLRELVWIHEEENVPIDTNEGQIICKLIAVHAGLERSIDLNEQFRILRTKDTKISKVAMLSGRQDVWNIPKLIYKLQLRRLLYRNRRKVGNATKIKDLAGKQTIVVSGHHGKLHIDGLRFVIDEGGGYADRPIAAIVFPSKELIRSTEGTSSQNRSRYHQE

SEQ ID NO: 7160 - protein, 546 aa, Avena sativa
MYRVKSESDCEMMHEDQMDSPLADDGGSSGGSPHRGGGPPLKKGPWTSAEDAILVDYVKKHGEGNWNAVQKNTGLFRCGKSCRLRWANHLRPNLKKGAFTPEEERLIIQLHSKMGNKWARMAANLPGRTDNEIKNYWNTRIKRCQRAGLTIYPASIINQSANEDQQGSSDFNCGENLSNNLLNGNGLYLPDFTCDNFIANSEALSYAPQLSAASISNLLGQSFASKGCGFMDQAGMLKQSDSLLPGLSDTINGALSSVDQFSNDSEKLKQALGFDYLHEANSSSRIIAPFGGALTGSHAYLNGTFSASRSTNGPLKMELPSLQDTESDPNSWLKYTVAPTMQPTELVDPYLHSPAPTPSVKSECASPRNSGLLEELIHEAEALRSGKNQQPSVRSSSSSVSTPCDTTVVSPEFDLCQEYWEEHPSTMLVQEYAPFSGTESTAPASAASPDVFQLSKISPAESHSLGSGEQVMEPSYEPGAGDTPPHPENLRPDAFFSGNTSDSSLFNNAIAMLLGNDLNTECKPVLFDPSSWSNMPHACQMSEEFK

SEQ ID NO: 7161 - protein, 299 aa, Streptococcus pneumoniae R6
MAIFFMIFLIVCVLLLVIVTLSTVYVVRQQSVAIIERFGKYQKVANSGIHIRLPFGIDSIAARIQLRLLQSDIVVETKTKDNVFVMMNVATQYRVNEQSVTDAYYKLIRPESQIKSYIEDALRSSVPKLTLDELFEKKDEIALEVQHQVAEEMTTYGYIIVKTLITKVEPDAEVKQSMNEINAAQRKRVAAQELAEADKIKIVTAAEAEAEKDRLHGVGIAQQRKAIVDGLAESITELKEANVGMTEEQIMSILLTNQYLDTLNTFASKGNQTIFLPNTPNGVDDIRTQILSALRAEKK

SEQ ID NO: 7162 - protein, 264 aa, Mesorhizobium loti
MIETADAEYDDTAIRFLEALWGDGYLSPGGPEEVDRVVEGLSLEGKTVLDIGCGSGGITLHLVERHGAARATGFDVEQPVIEAARRRAAGRGLSDRASFVQAPPGALPFADRSFDAVFSKDALLHVPDKDGVFAEIFRVLKPGGVFAASNWMIGHDSEPSPEMKAYIAAEGLSFAMASPARYAHAMRNAGFADVTVRDRNPWYREVARGELERLKGPLYTPVAAVVGAAYVDKNIRTWEAMQKVLDSGEHRPTHLRGWKPDAIG

SEQ ID NO: 7163 - protein, 162 aa, Pseudomonas putida KT2440
MAATMLNIPCVTLGGEHKTLGDFPGKVLLVVNTASQCGFTPQYKGLEQLWQAYRDRGLVVLGFPCNQFGKQEPGDAREIAQFCERNFGVSFPLFRKVEVNGPGAHPLFVELKQRAPGILGSQKIKWNFTKFLVDPASGQVKRYAPTTKPQALEADIERLLSR

SEQ ID NO: 7164 - protein, 369 aa, Streptomyces avermitilis MA-4680
MQTELSKRLGVEHAIFGFTPFPAVAAAISRAGGFGVLGAVRYTAPDDLKRDLDWLEANVDGKPYGLDVVMPAKKVEGVTEADVEAMIPEGHRQYVRDTLAKYGVPELAEGEVSGWRITGWMERVARTQLDVAFDYPIKLLANALGSPPGDVVERAHGQGVLVAALAGSARHARKHAEAGIDVVVAQGYEAGGHTGDIASMVLTPEVVDAVDPLPVLAAGGIGSGRQVAAALSLGAQGVWLGSLWLTTTEAELPSPALIRKLLAAGSGDTVRSRALTGKPARQLRTEWTDAWDDPNGPGTLPMPLQGLLVAEAVSRIQKYEVEPLLGTPVGQIVGRMNSERSVQAVFDDLTRGFERAVDRVNRIAGRSQQ

SEQ ID NO: 7165 - protein, 247 aa, Solanum demissum
MDSKGAAPNQTYEDFVPTTELVQEQDSDTLLIDLTGFKKEQVRVQLIRTGVLKISGQRPVAESKWLRFQKDFPVSQNCDKTKISAKFENGILYVKQPKLITSSENKGQELPTSDAQRQQKPEDKPQPTPQKKDEEQTKDEKTPTPTEELPKHQATNADKPEMEEPNTKEAKDLAEKTPAENTGASSTVEDGNRPSYACRLDKDAFIGTAAVLAEKLKMTRKLMNMTLIALLVLGIGLYISNKMKSNN

SEQ ID NO: 7166 - protein, 77 aa, Triticum aestivum
  unsure (1)..(77): unsure at all Xaa locations
MDYVGSHGVXTVRKYRCRGVKLCIVVKCIVQTFWTRCDCVYELWFTAXMITQTGCMFGMTSSFVGFXYTPHVDVAPL

SEQ ID NO: 7167 - protein, 166 aa, Oryza sativa (japonica cultivar-group)
MAAAAEEKNKKMIKVISSDGEAFEMTEAAASMSRILLHMIEDGCTGDGGAGITLPNVAGSALAKVIEYCTKHAIAAAEGSSSSRKAKEELKKFDVEFMEVGIDMLYDLIMAANFMGVEGLLSLAAQRTAELIKGKSPEQIREMFGIKNDHTPEEEEQIRKEYEWAF

SEQ ID NO: 7168 - protein, 250 aa, Solanum tuberosum
MGRGRVQLKRIENKINRQVTFSKRRSGLLKKAHEISVLCDAEVGLIVFSTKGKLFEYANDSCMERLLERYERYSFAERQLVPTDHTSPGSWTLEHAKLKARLEVLQRNQKHYVGEDLESLNMKELQNLEHQLDSALKHIRSRKNQLMHESISVLQKQDRALQEQNNQLSKKVKEREKEVAQQNQWDQQNHEINSSTFVLPQQLDSPHLGEAYQNTNVVDNGEVEGGNSSQQQGAANNTVMPQWMLRHLNG

SEQ ID NO: 7169 - protein, 874 aa, Hypocrea jecorina
MKTLSVFAAALLAAVAEANPYPPPHSNQAYSPPFYPSPWMDPSAPGWEQAYAQAKEFVSGLTLLEKVNLTTGVGWMGEKCVGNVGTVPRLGMRSLCMQDGPLGLRFNTYNSAFSVGLTAAASWSRHLWVDRGTALGSEAKGKGVDVLLGPVAGPLGRNPNGGRNVEGFGSDPYLAGLALADTVTGIQNAGTIACAKHFLLNEQEHFRQVGEANGYGYPITEALSSNVDDKTIHEVYGWPFQDAVKAGVGSFMCSYNQVNNSYACQNSKLINGLLKEEYGFQGFVMSDWQAQHTGVASAVAGLDMTMPGDTAFNTGASYFGSNLTLAVLNGTVPEWRIDDMVMRIMAPFFKVGKTVDSLIDTNFDSWTNGEYGYVQAAVNENWEKVNYGVDVRANHANHIREVGAKGTVIFKNNGILPLKKPKFLTVIGEDAGGNPAGPNGCGDRGCDDGTLAMEWGSGTTNFPYLVTPDAALQSQALQDGTRYESILSNYAISQTQALVSQPDAIAIVFANSDSGEGYINVDGNEGDRKNLTLWKNGDDLIKTVAAVNPKTIVVIHSTGPVILKDYANHPNISAILWAGAPGQESGNSLVDILYGKQSPGRTPFTWGPSLESYGVSVMTTPNNGNGAPQDNFNEGAFIDYRYFDKVAPGKPRSSDKAPTYEFGFGLSWSTFKFSNLHIQKNNVGPMSPPNGKTIAAPSLGSFSKNLKDYGFPKNVRRIKEFIYPYLSTTTSGKEASGDAHYGQTAKEFLPAGALDGSPQPRSAASGEPGGNRQLYDILYTVTATITNTGSVMDDAVPQLYLSHGGPNEPPKVLRGFDRIERIAPGQSVTFKADLTRRDLSNWDTKKQQWVITDYPKTVYVGSSSRDLPLSARLP

SEQ ID NO: 7170 - protein, 281 aa, Triticum aestivum
  unsure (1)..(281): unsure at all Xaa locations
GPPLCRGLHGALYCVRGDISSHLFSVLLRASREETQYDELTEMCTEXEYSTHPGDRLGLISTLEREKSLSQYISNMLRGTVHYTTQCYTHYISRSHAHFLSRERMDIFAEIXSTLVEMWAHSHVLGDYIESVGDLEYIVTRGALTEESTSSCVXVHTLEHTQERHKGTLLENYGKSHPQSLSQERSLYIELDLGTPLLTYERERSTIMISATESHTHTNVLRDLRSLLGRISTRHRWRYTLGEGVVPLRALGSYTTFCVCGCYFHKVHSVILFTTIIRGYF

SEQ ID NO: 7171 - protein, 392 aa, Magnetospirillum magnetotacticum
MSLTVTVLGATGSIGRSTTDLLAQHAGRFRIGALVGGKDAAALAKLALELKPDFAALADEAAGPALAEALAGSGIPNGAGESAVLEAVARDADIVVAAVSGAAGLKPTHAALRLGRTIALANKESLVCAGDAFMRDAKRYGARILPVDSEHNALAQAMGDGRVSDIAKMTLTASGGPFRTWDRARIAAASPSEAAAHPTWSMGMKINIDSASLMNKGLELIEAHHLFAIEAERLDVIVHPQSIVHGLIAWRDGAVTAGLAMPDMRVPIAHCLGLGDRLEIARGRPLDLAATGSLTFEPADEARFPCLRVARAALAEGGAAPTVMNAANEIAVAAFIRGAIPFYGIAELVERAVEHFAAEHRRAPEDVDTALAIDAQVRAWSLEAVPSARAAG

SEQ ID NO: 7172 - protein, 340 aa, Alnus glutinosa
MGFVSQCFCLVVMVTLGALASQLAAARSLQDASMRERHEEWMASYGRVYKDINEKQKRYKIFEENVALIESSNKDANKPYKLSVNQFADLTNEEFKASRNRFKGHICSTKSTSFKYGNVSAVPSAMDWRMKGAVTPVKDQGQCGCCWAFSAVAATEGITKLTTGELISLSEQELVDCDTSGVDQGCEGGLMDNAFTFIQHNHGLASEANYPYKGVDGTCNTNKQAIHAAEINGFEDVPANSEEALLNAVAHQPVSVAIDAGGSGFQFYSKGVFIGACGTQLDHGVTAVGYGTSDDGTKYWLVKNSWGTQWGEEGYIRMQRDVDAKEGLCGIAMKASYPTA

SEQ ID NO: 7173 - protein, 393 aa, Methanocaldococcus jannaschii
MAMIGLVGKPNVGKSTMFNALTEKPAEIGNYPFTTIQPNKGIAYITSPCPCKELGVKCNPRNSKCIDGIRHIPVEVIDVAGLVPGAHEGRGMGNKFLDDLRQADAFILVVDASGKTDAEGNPTENYDPVEDVKFLLNEIDMWIYSILTKNWDKLARRAQQEKNIVKALKDQLSGLNIDEDDIKMAIRDMDESPIKWTEEDLLNLAKKLRKISKPMIIAANKADHPDAEKNIERLKKEFKDYIVIPTSAEIELALKRAEKAGIIKRKENDFEIIDESKVNEQMRRAFDYIKDFLKKYGGTGVQECINKAYFDLLDMIVVYPVEDENKFSDKQGNVLPDAFLVKKGSTARDLAYKVHTELGEKFIYAIDAKKKIRVGADYELKHNDIIKIVSAAK

SEQ ID NO: 7174 - protein, 216 aa, Magnetospirillum magnetotacticum
GGLTASIDERRWYATSGHMLWIGDRTRQPDHAHVEYARGIKNPIGLKCGPSTTAEGLIRLIDLLNPENEAGRLSLICRFGADKVGDHLPNLIRTVQREGRSVVWVCDPMHGNTIAAGRYKTRPFERVMQEIEGFFGVHRAEGTIAGGIHLEMTGKDVTECTGGARALTADDLQDRYHTYCDPRLNAEQALEVAFLTAELVKRERAEIERPHLDAAE

SEQ ID NO: 7175 - protein, 478 aa, Oryza sativa (japonica cultivar-group)
MLLLKAVYRVVVNNFLALAAAAVAAVLLRRPDELAARLRAVSSPLHAATAAVLAAGVARLVRARRARGVYLVEYGCFRPRPCYRAPFATCLEHAHLMPYLVDEESVAFAIRLLERSGLGDETCVPDAYHYMPPDRSLRASRDESELVIFSAVDDVFARSALTPADIDVLIVNCSIFTPTPVFADMVVNRYKLRAEVQNVNLSGMGCSAGLVSVGLAKNLLQVSPPGTNVLIVSTEILSSQYYVGTERAMLLPNCLFRMGAAAMILSNSPDHARFRLGRVVRTVTAARDSDYRCVFQEEDEQGNTGIRLSKDLATTAGHALKSNIAAFGPLVLPASEQLLVAISFLKRKLKQLSGHAGKVRLYRPDFRTAFEHFCIHAGGRGVIDEVQHGLGLSDDDVEASRMTLHRFGNTSSSSVLYELAYLEAKGRMKRGDRVWMISFGAGFDCNSVAWECVKPAPDADGPWVDCIHRYPVQLPEIA

SEQ ID NO: 7176 - protein, 88 aa, Zea mays
  unsure (1)..(88): unsure at all Xaa locations
YTTHALMAFIPLVFVREERHLEECVTDAAMDHIFDLXGDDCAKSFKKFHAENIHDSMTPSVSCSXMGVVIMFGGHVPPTACQRVAGGS

SEQ ID NO: 7177 - protein, 359 aa, Arabis hirsuta
  unsure (1)..(359): unsure at all Xaa locations
IRCKAAVAWEAGKPLVMEEVEVAPPQKHEVRIKILFTSLCHTDVYFWEAKEQTPLFPRIFGHEAGGIVESVGEGVTDLAPGDHVLPIFTGECGDCPHCHSEESNMCDLLRINTERGGMIHDGESRFSIDGEPIXHFVGTSTFSEYTVIHSGQVAKINPDAPLDKVCIVSCGLSTGLGATLNVAKPKKGQSVAIFGLGAVGLAAAEGARIAGASRIIGVDLNSKRFDEAKKFGVTEFVNPKDHDKPVQQVIAEMTXGGVDRSVECTGSVQAMIQAFECVHDGWGVAVLVGVPSKDDAFKTHPMNSLNERTLKGTXFGNYNPKTDIPGVVEQYMNKELEIEKFITHAVPFSEINKAFDYML

SEQ ID NO: 7178 - protein, 247 aa, Zinnia elegans
MKRHGSSDSVGLMPMCHTLDETREFHSMLMEGLDDDCGGVDGGECDRGLISEKKRRLTAVQVKALEKNFEMENKLEPERKVKLAKELALQPRQVAIWFQNRRARWKTKQLERDYGVLKSNFDSLKHKYESLKQDNESMVKQIKELKSKLYEEDEPDNIPMPEQSDDKPKSPENMVETAYFPDFKDGSSDSDSSAIMGDAQKAYQPQFVKLEEHNFFGGDESCNFFSDDQAPTLQWYCQDQWNLSEEN

SEQ ID NO: 7179 - protein, 161 aa, Antirrhinum majus
LKTKKITLRSSDGEVFEVEESLALESQTIKHMIEDDCADNVIPLPNVTGKILSKVIEYCKRHVDAAAAKADDKLASTGTSDDELKAFDADFVKVDQATLFDLILAANYLNIKTLLDLTCQTVADMIKGKTPEEIRKTFNIKNDFTPEEEEEVRRENQWAFE

SEQ ID NO: 7180 - protein, 475 aa, Methanosarcina mazei Goe1
MEGERFLNHRTPEELEKWKNTGKTEGSEDSMKELETEFNSFEQEVGLLDTVGPKAREIIGQDCNMVSACVSRPYPLVVDRAKGSVVRDIDGKEYIDFVAGIAVMNAGYSNPEVQAAISAQLEKMVHCGYGDFFAEPPLKLAKKLRDLSGYSKVFYCNSGAESIEAAMKLSLWKTKRQNFISFYNAFHGRTLGALSLTCSKVRHKEHFPTIRTVHTDYAYCYRCPLNLDYPSCGIECAKQIENLVFRRELSPEDTAAVFVEPIQGEGGYIVPPVEFHKEVRRICTDNDVLLVADEVQTGCFRTGPFLAMENFEVRADITCLAKALGSGLPIGAMLADNELMDWPPGVHSNTFGGNLLSSAAALASLEFLEKENTENHVREMGAHIRHRLRELQENFPCIGDVRGLGLMTGVEIVKPDKSIDPVRRDKIIREAFKDGVLLLPCGDSVIRFSPPLVMTDEEADLGLDKFEKALKKAVR

SEQ ID NO: 7181 - protein, 331 aa, Porphyra purpurea
MSKVFMFDALRAATDEEMEKDLTVCVIGEDVGHYGGSYKVTKDLHSKYGDLRVLDTPIAENSFTGMAIGAAITGLRPIVEGMNMSFLLLAFNQISNNAGMLRYTSGGNFTLPLVIRGPGGVGRQLGAEHSQRLEAYFQAIPGLKIVACSTPYNAKGLLKSAIRDNNPVVFFEHVLLYNLQEEIPEDEYLIPLDKAEVVRKGKDITILTYSRMRHHVTEALPLLLNDGYDPEVLDLISLKPLDIDSISVSVKKTHRVLIVEECMKTAGIGAELIAQINEHLFDELDAPVVRLSSQDIPTPYNGSLEQATVIQPHQIIDAVKNIVNSSKTITT

SEQ ID NO: 7182 - protein, 207 aa, Zea mays
  unsure (1)..(207): unsure at all Xaa locations
MASEINPKTEAFDAHDGSPRYDEKHGTTEPIQTPKGSWALRNGLTIESFKAHDDYAKGTVELSRDMKPRHLNMIAIGGSIGAGFFVGSGGALQTGGPGSLTIGFLIMGVMIFNVVYALGELAVMYPVSGGFYTYANRFVDPSWGFAMGWNYVMQWXXVLPLELTVCGTVIQYWAPDTSVAIWVSVFLXVIIIVNIFGTLGYAEEEFW

SEQ ID NO: 7183 - protein, 68 aa, Zea mays
  unsure (1)..(68): unsure at all Xaa locations
NKSRKLSGKSLGKIKPGKSKGCKEKKKGWKFRNTVSEALEDITGLXYDEDRDKIYTGNRDGLVHVWSS

SEQ ID NO: 7184 - protein, 338 aa, Zea mays
MAMPSGWRGILGFHYGIVQAPLGPDISGPELVAAVANAGAIGLLRLPDWPAPDHVRELIRKTRSLTSKPFGAAIVLAFPHEENLRVVLEEKLDVLQVYWGDFPNHRVQEAHRAGVKVLHQVGSLEEAAKAKEAGVDGIIVQGREAGGHVIGQEGLFPLLPRVVDLVSDSSIPVIAAGGIVDGRGYVAALALGAQGVCLGTRFVATEESFAHPIYKQKLIEMSHTDYTNIFGRARWPDAPQRVLETPFYDEWKNNFPDQETEEDQPIIGHSIIHGVHKDIRRFAGTVPNATATGDIDIMAMYSGQGVGLITEIIPAAQVVKSLVAEAKEVIREKLSGYQ

SEQ ID NO: 7185 - protein, 369 aa, Escherichia coli; identical to SEQ ID NO: 1973

SEQ ID NO: 7186 - protein, 187 aa, Xylella fastidiosa Ann-1
MNPIRPFLDKTPQLGCTVYIDPTSTVIGDVVLGDDVSVWPQTVIRGDVNQIRIGARTNIQDGTIIHVSHHSPYNAAGYPTLIGTDVTIGHGTIIHACTIEKLCLIGMGACILDGVTIKKYGFVGAGAVISPNKIVGEAELWLGNPARLVRKLSDKEIESLHYSAQHYVKLKNRYLDLSAETTTTPSA

SEQ ID NO: 7187 - protein, 319 aa, Enterococcus faecium
MEFLYNTKSEFILKKKKTSKAGEYSGMKGMERTMTIQWFPGHMAKARREVSEKMKYVDIVFELVDARLPLSSRNPMLDQIIQQKPRLVLLNKADLADPQQTKLWQEYFRKQGHLALAITAQESKGIKGLVPAAKEALKEKRARDAARGIKPRAIRAMVLGIPNVGKSTLMNRLVGKKIAQTGNKPGVTKGQQWLRLGNELELLDTPGILWPKFEDEEIGKKLALTGAIKDQLVHLDDLAIYGLDFFARYYSGRISDRYGLSIEQEEKLAPELLMDITAKRGYKEDYDRGSELVVHDIRQGKLGRYTLDRCEEMEQKSDD

SEQ ID NO: 7188 - protein, 228 aa, Gossypium bickii
  unsure (1)..(228): unsure at all Xaa locations
FTSLCHTDVYFWEAKGQTPLFPRIFGHEAGGIVESVGEGVTHLKPGDHVLPVFTGECGNCRHCKSKESNMCDLLRINTDRGVMLSDGKTRFSINGKPIYHFVGTSTFSEYTVAHVGSVAKINPAAPLDKVCILSCGISTGLGATLNVAKPTKGSTVAIFGLGAVGLAAAEGARXXGASRIIGVDLNPNRFEEAKKFGCTEFVNPKDHNKPVQEVLAEMTNGGVDRSVE

SEQ ID NO: 7189 - protein, 284 aa, Cistus incanus subsp. creticus
ETLIAGGPFVLPLAHKHKVKILPADSEHSAIFQCIQGLPDGALRRIILTASGGAFRDWPVEKLKEVKVADALKHPNWSMGKKITVDSATLFNKGLEVIEAHYLFGAEYDNIEIVIHPQSIIHSMVELQDSSILAQMGWPDMRLPILYTMSWPDRVYCSEITWPRLDLCKLGSLTFKAPDTIKYPSMGLAYAAGRAGGTMTGVLSAANEKAVEMFLNEEISYLDIFKFVELTCEKHQAEVVTAPSLDEIVHYDLWARDYASTLNHVNVRCPPVLAYANGSLNGAV

SEQ ID NO: 7190 - protein, 181 aa, Triticum aestivum
FQPSDDFPEFKLPDVPAPLAENLNGKHEPKSPKAAPRSPKAATHPTFATSVKKPIGAKKVGAKTGGLGVRKLTTKPNESLYEQKPEEPKPAVPALAASTTAKGGPSLHSRFEYVENVPSADLRTGGSGSRVTGHVAPPKSSDFFQEYGMGNGFQKKSSNASKTQIEETDEARKKFSNAKAI

SEQ ID NO: 7191 - protein, 412 aa, Sulfolobus acidocaldarius
MKIYLVEHAIGSFGYDESGKLIDFVPNSKDIGKVTEALIENEKGTPLPSAIELINKLKPDQVVVENDAEVPALQKLGIKASSEIRNMGTEIFRENLVNVAIQTKIVNSEDELYNFLYELSMEYTRRKLRGAASKRDLLAIQAIRAIDDIDKTINLFSERLREWYSIHFPELDKLIEDHWLYASIISKFGHRDNLSDTGLEEIGLNKEKIEKIMNAAKNSIGADITDVDIKSVKTLSDIILKLYEERLELTDYTESVMREVAPNVTSLVGPTLGARLLSLAGSLEDLAKMPASTIQVLGAEKALFRALRKGGRPPKHGVIFQYPAIHNSPRWQRGKIARALAAKLAIAARVDYFSGKFIGNKLNEELKKRIDEIREKYAQPPPRKQEQKVEQKGKKERKNKKDKRRGKKEGRR

SEQ ID NO: 7192 - protein, 604 aa, Cucumis sativus
MEIESLRVSVDEKVLKDEEKNEKEEMKMKMKMKRKLGGVKTMPFILGNEVCDRFASSGFHSNIITYLTQDLNMPLVPASNILTNFAATSSFTSLIGALIADSFAGRFWTITIASIIYELGMVTITISAILPSLHPPPCPTQINCTQASGTQLMILYLALLLTSLGAGGIRPCVVAFAADQFDMTKVGIAGRTWNFFNWYYFCMGMATLTALTVVVYIQDNVGWGWGFGLPTIAMALSVVAFVVGSPLYNKLKPSGSPLVRLAQVVVAAFKNRKAVLPDDSKLLYRNHELDAAIAIQGRLVHTDQFKWLDKAAVITSPDSTANPPNLWRLATVHRVEELKSIIRMLPIWAAGILLVTASSHQHSFTIQQARTMNRHLTPTFQIPPATLSIFGILSMLTGLVLYDRLLVPFAKKLTHNPSGITCLQRMGVGFAINILATLVSSIVEIKRKKVAANHGLLDNPTATIPFSVFWLVPQFWLHGIAEVFMSVGHLEFMYDQSPESLRSTATALYWLAISVGNYIGTLMVYLVHKYTGEEHNWLPDRNLNRGRLEYYYWLVSGIQVMNLVYYVICAWFYTYKPLEEEKINIENKDGDQEWERCEDTIKIA

SEQ ID NO: 7193 - protein, 125 aa, Glycine max
MAKFNVVQKKRRALIAEKKRQLHGDPLTGKLKIKDQPLSLSGKRKRKLFKKWRRDQKDALQNGLVTMEDVQMAVAEGDTKDAPRPSAKIHLKKKTLKLKQLKRKGKNKRKSDVPAADVSADAMVE

SEQ ID NO: 7194 - protein, 367 aa, Glycine max
  unsure (1)..(367): unsure at all Xaa locations
MAALYLPISMLALIVVVSLGLWSGVQGAPQVPCYFIFGDSLVDNGNNNQLQSLARADYLPYGXIDFPGGPSGRFSNGKTTVDAIAELLGFDDYIPPYADASGDAILKGVNYASAAAGIREETGQQLGGRISFSGQVQNYQSTVSQVVNLLGNEDSAANYLSKCIYSIGLGSNDYLNNYFMPQFYSSSRQYSPDEYADVLIQAYTEQLKTLYNYGARKMVLFGIGQIGCSPNELAQNSPDGKTCVEKINSANQIFNNKLKGLTDQFNNQLPDARVIYVNSYGIFQDIISNPSAYGFSVTNAGCCGVGRNNGQITCLPMQTPCQNRREYLFWDAFHPTEAGNVVVAQRAYSAQSASDAYPVDIQRLAQI

SEQ ID NO: 7195 - protein, 750 aa, Geobacillus stearothermophilus
MENQNRQNAAQCPFHGSVTNQSSNRTTNKDWWPNQLNLSILHQHDRKTNPHDEEFNYAEEFQKLDYWALKEDLRKLMTESQDWWPADYGHYGPLFIRMAWHSAGTYRIGDGRGGASTGTQRFAPLNSWPDNANLDKARRLLWPIKKKYGNKISWADLFILAGNVAIESMGGKTIGFGGGRVDVWHPEEDVYWGSEKEWLASERYSGDRELENPLAAVQMGLIYVNPEGPDGKPDPKAAARDIRETFRRMGMNDEETVALIAGGHTFGKAHGAGPATHVGPEPEAAPIEAQGLGWISSYGKGKGSDTITSGIEGAWTPTPTQWDTSYFDMLFGYDWWLTKSPAGAWQWMAVDPDEKDLAPDAEDPSKKVPTMMMTTDLALRFDPEYEKIARRFHQNPEEFAEAFARAWFKLTHRDMGPKTRYLGPEVPKEDFIWQDPIPEVDYELTEAEIEEIKAKILNSGLTVSELVKTAWASASTFRNSDKRGGANGARIRLAPQKDWEVNEPERLAKVLSVYEDIQRELPKKVSIADLIVLGGSAAVEKAARDAGFDVKVPFFPGRGDATQEQTDVESFAVLEPFADGFRNYQKQEYSVPPEELLVDKAQLLGLTAPEMTVLVGGLRVLGANYRDLPHGVFTDRIGVLTNDFFVNLLDMNYEWVPTDSGIYEIRDRKTGEVRWTATRVDLIFGSNSILRSYAEFYAQDDNQEKFVRDFINAWVKVMNADRFDLVKKARESVTALQSFTINRSTTNRLQ

SEQ ID NO: 7196 - protein, 81 aa, Glycine max
VFSSFPLETSVFNSLDCSFAQLPGAISCTQCKGTGVNSVDHFNGQFKAGGLCWLCRGKRDILCGSCNGAGFLGGIMSTFDD

SEQ ID NO: 7197 - protein, 223 aa, Crucihimalaya himalaica
GDARWNHIARSSGLRRTGKSCRLRWLNYLRPDVRRGNITLQEQFMILKLHSLWGNRWSKIAQYLPGRTDNEIKNYWRTRVQKQAKHLRCDVNSNLFKETMRNVWMPRLVERINAQSSSATCEPLESMVTDPGQPIDEPSPVEPGFAQFNTNHYHQQQLVPATEISATSSNSPAETLSDVQNGVVNGSGYDLVGQTGFGEFNDWGCVGGDNMWTNDESLWFLQD

SEQ ID NO: 7198 - protein, 308 aa, Streptococcus pneumoniae TIGR4
MRYITLGQDDKELSEIVLGMMRIKDKSVKEVEELVETALSVGINAFDLADIYGRGRCEELLGLVLKNRPDLREKMWIQSKCGIRIEEFTYFDFSKDYIIKSVDGILQRLKIDHLDSLLLHRPDALMESDQVAEAFNLLYKQGKVRDFGVSNQNPMMMELLKKDVKQPLAVNQLQLSAAFTPGFESAFHVNMEDSQAAMRDGSIFEYCQLHDVVIQAWSVLQFGYFKGNFVGNEKFQALNQVLDRLAIKYGVTSSTIAISWILRYPAKMQAVVGTTNPKHLREVSRAANFSLTRKEWYEIYLAAGNNLP

SEQ ID NO: 7199 - protein, 363 aa, Buchnera aphidicola
MKKKFRIAVLPGDGIGPEVMREAYKILNILERKFFLKLELREFDIGGIAIDREGIALPEKTLRGCENSDAILFGSVGGKKWDYLPIESRPERASLLPLRKHFNLFSNLRPAKLRVDLKNLSPLRSDIVRDGFDILCIRELTGGIYFGKPKGRFKNKNGEYAFDTEIYYDFEIERIANLAFELASSRRCKVCSIDKANVLESSVLWREIVKKVSKNYPDVHLSHLYIDNACMQIIKNPTQFDILLCSNIFGDIISDECAMITGSIGMLPSASLNNQKFGLYEPAGGSAPDIEGKNIANPIAQILSLSMLIRYSMNLNEIADKIDLSVHYALKEGYRTLDISDGKNYIKTNEMGDIIAEFLDNGK

SEQ ID NO: 7200 - protein, 618 aa, Zea mays; identical to SEQ ID NO: 5707

SEQ ID NO: 7201 - protein, 463 aa, Yersinia pestis KIM
MELPVKNKLKRGLTTRHIRFIALGSAIGTGLFYGSADAIRMAGPSVLLAYLIGGVVAFVIMRALGEMSVNNPQASSFSRYAQDYLGPMAGYITGWTYCFEILIVAIADVTAFGIYMGLWFPDVAHWVWVLSVVLIIGAVNMMSVKVFGELEFWFSFFKVATIIIMILAGIGIIVWGIGNGGQPTGIHNLWTNGGFFSNGFVGMLLSLQLVMFAYGGIEIIGITAGEAEDPKKSIPKAINSVPWRILVFYVGTLFVIMSIYPWNQVGTNGSPFVLTFQHMGITIAAGILNFVVITASVSAINSDVFGVGRMLNGMAEQGHAPKAFTAISKRGVPWVTVLVMMCAMLIAVYLNYIMPENVFLVIASLATFATVWVWIMILFSQIAFRRSLSKDQVKALDFPLRGGTFTSVLAIIFLVFIIGLIGWFPTTRISLYVGLVWIVLLLVGYYFKVKYQKKQATLIKNAD

SEQ ID NO: 7202 - protein, 194 aa, Xylella fastidiosa 9a5c
MNMLNVLRFPVLALALALAFVSSGVLADAGSLLDLDYRPLAGKETVNLQRLYGGKVLLVVNTASKCGFTPQYEGLEALHQKLSPLGFAVLGFPSNDFKGQEPGDEQQIQKFCTLTYGVKFPMFQKVHVKGDEVTPLYQRLTQTTGVAPGWNFHKYLIARDGHVVAQFDSRTRPDDPILLEAIKRELAKPVQVAH

SEQ ID NO: 7203 - protein, 463 aa, Oryza sativa (japonica cultivar-group)
MGCSGLRLPTWAAAAPPSPSDWDGRRPRRGAPVVRRRCSAPSSTPAPSAAAAPSHLAAGGSPRVGTAEHDWLWDCRGIGGGGRDYAREMEVAVRVVQAACTLCQRVQSSLLLPASASASGSVHSKIDRSPVTVADWGVQAIVSWLLSDCFQDENISIVAEEDDETLSSSDGAALLESVVAAVNGCLIEAPKYGLRSPEKELKAHDILQAIRRCSSIGGPKGRFWVLDPVDGTLGFVRGDQYAVALALIEDGEVVLGVLGCPNYPMKKEWLNYHQRYYRLMSKVSPPTSGSWHKGCVMYAHRGCGQAWMQPLVHDFGKLDWRNSREVRVSTVSDPISATFCEPVEKANTSHSFTAGLAHSVGLRKQPLRVYSMVKYAAIARGDVEIFMKFARAGYKEKIWDHAAGVVIIREAGGVITDAGGRPLDFSRGVFLEGLDRGIIACSGPLLHHRIVGAVDASWNSSTL

SEQ ID NO: 7204 - protein, 239 aa, Magnetospirillum magnetotacticum
MNGDLASIWVYLSTSPLLGLTSTLIAYQAAMWLFEKGGRSPMLNPILVSVAIIVGFLMATGTEYRTYFDGAQFVHFLLGPATVALAVPLYNQMPILRRAWPAILLVIGVGAVMAGASAVVLAWALGGSEKVLLSLASKSVTIPIAMGITERIGGIPSLTAVMVMLTGIFGAVCGGWILDLFRIKDQAARGLALGIASHGIGTVRALQMSETAGAFGGLAIGLTGLVTAILVPLLVGLLR

SEQ ID NO: 7205 - protein, 332 aa, Schizosaccharomyces pombe
MSNVSSEDGIAPETQLIIDDPDVQQIDADEDLLDDVPDDVDCVELIQSRIQSMASLGLERFKNLQSLCLRQNQIKKIESVPETLTELDLYDNLIVRIENLDNVKNLTYLDLSFNNIKTIRNINHLKGLENLFFVQNRIRRIENLEGLDRLTNLELGGNKIRVIENLDTLVNLEKLWVGKNKITKFENFEKLQKLSLLSIQSNRITQFENLACLSHCLRELYVSHNGLTSFSGIEVLENLEILDVSNNMIKHLSYLAGLKNLVELWASNNELSSFQEIEDELSGLKKLETVYFEGNPLQKTNPAVYRNKVRLCLPQLRQIDATIIPKTSKQFP

SEQ ID NO: 7206 - protein, 351 aa, Schizosaccharomyces pombe
MVNDFNEKNGIKKRLLDFFPVVLEGIREILESMQYFPEETEKLLYSIKRNTLGGKNNRGLAVLQSLTSLINRELEEAEFRDAALLGWLIEILQGCFLMADDIMDQSIKRRGLDCWYLVVGVRRAINESQLLEACIPLLIRKYFRNMPYYVDLLDTFREVTFLTELGQQEDLLSSRDGEASLRSFDLMKYDFIITYKTSFYSFYLPIKCALLLSRNSNQKAYDTTIKLSKLLGYYFQVQDDYLDCFGDYTVLGKVGMDIQDNKCTWLVCYAEKFASADQLNLLRAHYGKAGSENIAVIKQLYHELQIPELYHKFEDDMVDSISKEIDLIDESTGLKKCIFTKFFQLIYKRSR

SEQ ID NO: 7207 - protein, 328 aa, Nostoc punctiforme
MSTILVTGGAGYIGSHAALALKNAGYEVIVLDNLSNGHRELVEEVLQVKLIVGDMSDRSLLDDIFSTHNITAVMHFAAYIAVGESVTDPAKYYQNNVAGTLTLLEAMLAASVNKFIFSSTCALYGVPKFVPLTEEHPQDPISPYAISKWMVERILSDFDTAYNLKSVRFRYFNAAGADPNRLLGEDHEPETHLIPLVLLTAFGKRESILIFGTDYPTPDGTCIRDYIHVTDLAQAHILGLEYLLKGGESEVFNLGNGSGFSVREVIETAKEITGKEIKIEERDRRPGDPPILVGSSDKATKILGWHPEYPNLNEIIAHAWKWHQQRHK

SEQ ID NO: 7208 - protein, 273 aa, Zea mays
  unsure (1)..(273): unsure at all Xaa locations
RAQWDLPAKGGFSFDLCRRNSMLEKNGLKLPGFRKTGTTIVGLVFQDGVVLGADTRAXEGPIVADKNCEKIHFMAPNIYCCGAGTAADTEAVTDMVSXSQLQLHRYATGRESRVVTALTLLKSHLFRYQGHVSAALVLGGVDCTGPHLHTVYPHGSTDTLPFATMGSGSLAAMSVFESKYKEGLTREEGIQLVSEAICAGIFNDLGSGSNVDVCVITKGKTEYLRNHQLPNPRTYVSSKGYSFTKGQTEVLSAKITHLKQKVEVTEGGDAMEE

SEQ ID NO: 7209 - protein, 1263 aa, Bacteroides thetaiotaomicron VPI-5482
MIGKEVLNYTIVSLIGKGGMGSVYLAEHKYIKQQKVAIKVINSDMVNDFTRQRLKEEAEHLASLNHQNIVRFHDYHIDELGSIYLIMEYADGISLDKYIQTVSGLIVEDKICPLFEPILDAVEYAHEHNIIHRDIKPANIIITKEGIPKILDFGIATIINRESVEKDDMVMGTPSYMSPEQVRGDHLDSRSDIYSLGVMLHQMLTGNAPYDTTTLTEYDINKKVVEEPLPRMRTYYKYVSDKVQKIVDKATAKEPGERYQTCDDFKKALHRVIYPPKIPKWVWTSVAAIVLLMIGGGVYFWDYNRTKVYYYKDYVEQWGVPQGIGELSSREMSHVNRLYRFEYKKHKLQRMSHVNSKENIIEDGESERNERPLDMLLYYTDKGNISRAKVLDRSGKVLYVKSYNDKLNTVIFQYDDEYGTEKTLGAQTIGYVRALEDNGVEKGKISRWLLEYDENGYVSTIRYAGFQNVLVGDAHNIYGRKYVRDEKGRVLSEHYLSFDGTPKATKWGLGMKKFYYDENDNWVKAEYLTVDGKPAYDDADGIGVYVMEYDKYGNVVYALHQDADGKLMLPKKNGVAGIKYIYDQHGFPIEASYLDIDRKACFIPNDGFSKVVRKFDDNGYIINQTFYDVDGNQCLSNDGNSSAKYINDNRGNVQEMWFYGLDGKLNEINEGYAGVKLNYDSIGNIIEYVTYGIDQKPCLKSDGTAGYKAEYNDMNLITKLVNIGVDLSPCKDNNGIVIAARDYDKRGNQIKVSFYDAGGKTLVLSNENIAGWNSVYDDNGNETERSFFDDKNNLTVCAGSCAKWISKFDEQGNETNLRYYNLSGKLMMVNGSAGANYKRDKRGNILEKIEIGTDEQLASGKLIARYKYDKFDNQIEFSVYDRNNKPALNSLDYHKYVCIYNSRNQRIEIEYYGKDGELTSYNNDKYAIQKDEYDERGYIVRTSYYGKDKQLVVSNEGWASSTREYDVLGNVLKQSFFGIDGKPTDPKVMVPEGLCRYDRWGNRIYLAAGDGKGHLIINPKTGWSIQKSEYNSRGKLLSEAYFDENEKPLISRMDGYHKAVISYTSSGNEKEKCYYDIMNKPMLCPDGYFKEVYEYNDNQQAISLSYLGVNGKSIDCKDGYSKIELTYNKDGEMESRKYTNASGRILLTQKWNGKEWVNSSPEPISRNWQQDVRKFNAELPIDFGENTKHLVASSFLVTGSNSCELSFKTPKSKYEMTEAEVNEYFASIKLVVTKIKSESLPSSVVITGILFDSKGRQLRSIRK

SEQ ID NO: 7210 - protein, 216 aa, Zea mays
MAPRTSERAMTSAAAGLARGAGPHYRGVRKRPWGRYAAEIRDPAKKSRVWLGTFDTPEDAARAYDAAAREYRGAKAKTNFSFPSCLPLAAADVAGACRSGNSSSTTTTTTVDSFGGDVQAPPMQAMPLPPSFCASGAVRFPFSSYPVTHPYYFFGQAAAGCHMLKLPPTTVTVAQSDSDSSSVEDLSPSPPAAVSATRAAAFDLDLNCPPPAEAEA

SEQ ID NO: 7211 - protein, 135 aa, Fusarium proliferatum
EAFSLFDKDGDGQITTKELGTVMRSLGQNPSESELQDMINEVDADNNGTIDFPEFLTMMARKMKDTDSEEEIREAFKVFDRDNNGFISAAELRHVMTSIGEKLTDDEVDEMIREADQDGDGRIDYNEFVQLMMQK

SEQ ID NO: 7212 - protein, 502 aa, Petunia x hybrida
MEIQLSSLVPFLLFLSSIFLLLRKWKTQELNLPPGPWKLPFIGSLHHLVFAGPLPHHGLTNLAKRYGPLMLLQLGEQPTVFISSPQMAKEVLKTHDLAFATRPKLTFAEIIKYGSTDIAFSPYGEYWRQIRKICVMELLSAKMVNSFSSIREDELSNMISWIRLRPNIPVNLTEKVKWFTSSVVCRSALGKICKDQNKLIILMREILSLAISVNFADFFPRWKFLHDLGGSKTRLLKEHHKIDEILQDIVNEHKQNRVNGKMGNGEFGGEDLIDVLLRVRESGQHQLPITDDNIKAVIVDMFSAGTETSSTTIIWALAEMMKKPSVLAKAQAEVRQAMKGKKGFQLIDLDELKYLKLVIKETLRMHPPIPLLIPRECMEETKINGFNIPLKTRVIVNIWAIGRNPESWEDPESFMPERFENNPIDFTGNHHQFIPFGAGRRMCPGMLFGLTNVAQLLAQLLHHFDWKLPNGQSPQDLDMTESPGVSATRKDDLVFVATPYDS

SEQ ID NO: 7213 - protein, 462 aa, Zea mays
  unsure (1)..(462): unsure at all Xaa locations
SSRAARGPRCRIVRDVRESFGSLSRRSLEVRISGLPGLSGGHHRGKSVGSVSDLRDRPVVVDQSRWVGLPPELLRDVMRRLEEGESNWPSRKNVVACAAVCGTWREICKDIVLSPEFCGKLTFPVSLKQPGPRNGIIQCFIKRDKSTSTYYLYLCLSPVVLSEDGKFLLAAKRNRRTTYTEYIISVDPKXISRSSDGCVGKMRSNFLGTKFIVHDTRAPHNAGSLVSCERGSRRISSRRVSPKVPTASYPIARVNYELNLLGTRGPRRMNCTMHSIPASTLDPQGMVPEPGQPKQIFVPGSSSFEDSFRSANNTPSSSRFSVADRSLDWSSSRFSETSGLAQQDDNDSDQAKERPLVLCNKEPRWHEQLQCWCLNFHGRVTVASVKNFQLIAAPQLDSEPSQQAQQQTQPSNSSSASDHDKVILQFGKVANDMFTMDYRYPLSAFQAFAICLTSFDSKLACE

SEQ ID NO: 7214 - protein, 245 aa, Maytenus undata
ALSIAGAVQSQKLAVRAISQLQSLPGGDIKLLCDTVVESVRDLTGYDRVMVYKFHEDEHGEVMAESKRPDLEPYIGLHYPASDIPQASRFLFKQNRVRMIVYCHASPVLVIQDDRLMQPLCLVGSTLRAPHGCHAQYMENMGSIASLAMAVIINVNDGEGIGGRNPTRLWGLVVCHHTSARCIPFPLRYACEFLMQAFGLQLNMELQLAAQLLEKHVLKTQTLLCDMLLRDSPTGIVTQSPSIMD

SEQ ID NO: 7215 - protein, 371 aa, Zea mays; identical to SEQ ID NO: 2219

SEQ ID NO: 7216 - protein, 720 aa, Methanosarcina mazei Goe1
MKQVVLNLKDGDLTVEEVPIPTIKGSGVLVRNHYSVISAGTESGVVDLADKSLIGKARARPDLAMKVINKAKQDGPISAFQQAMGRLEKREPLGYSSAGTVISVSEDIKDIKPGDRVACAGAGYANHADVVFVPRNLCAKVPENVDFKNACFTTVGSIAMQGVRNADVKIGENIVVIGLGLIGLITLQILKASGCRVFGVDLDESKVNLARELGADLSYSRNSPNLEERIKQFSRGIGADSTIITAATRSNDPVDFAGKITRERGKVVIVGLVGMDIPREEYYNKELEMRISRSYGPGRYDRNYEEYGQDYPAPYVRWTENRNMQAFLDLISMKKISMEPIITHEYEIEQAPEAYNIIKERKPYLGLVLKYDTDKRIEDKVILKSPGPVSAISESFSPVLGVIGAGIFATSILLPNLSKIKGVKLKGLSAASGLSCESVAKKYGFEYCTSDYHKILSDPEINCVSIVTRNSLHASLVIEALKNKKNVLVEKPLALNEEELNAIIEAKKENGGFIMVGFNRRYSELGVKLKDFFKNRSQSMVAYYRVNAESIPKDHWVYDESEGGSRIITECCHFIDFMQFIIGSSPVEVYARKIESQVKTPEDNENVSITIAFEDGSIGTLIYTTHGDSSVSKEHAEFFADGMVGAITDFKQLKLVKDGKCTQINKRLITEKGHKNELENFFKMVKQGPSKYSFEENVLTTVSTLKAAEHVMSGGPVKLI

SEQ ID NO: 7217 - protein, 162 aa, Saccharomyces cerevisiae
MTTSFYDLECKDKKGESFKFDQLKGKVVLIVNVASKCGFTPQYKELEELYKKYQDKGFVILGFPCNQFGKQEPGSDEQITEFCQLNYGVTFPIMKKIDVNGSNADSVYNYLKSQKAGLLGFKGIKWNFEKFLVDSNGKVVQRFSSLTKPSSLDQEIQSLLSK

SEQ ID NO: 7218 - protein, 389 aa, Triticum aestivum
MAPPSRPVAVLAWGSGEDGQLGMGRCDEKDWARCIGALDAYAVSAVVAGSRNSLAICNDGSLFTWGWNQRGTLGHPPETKTESSPAHVDALIGVKIVQAAIGGWHCLAVDDKGRAYAWGGNEYGQCGEEPERKEDGTRALRRDIPIPQRCALKLKVRQVAAGGTHSVVLTQEGHVWTWGQPWPPGDIKKISTPVRVQGLEQVSMIAVGAFHNLALSVDGILWAWGNNEYGQLGNRDTQPRPLPIRVEGLSNLSLVDIAAGGWHSAALTKEGEVYAWGRGEHGRLGFGDDKSSHMVPLKVQLLAGEDIVQVSCGGTHSVVLTSDGRIFSYGRGDHGRLGDGREVTTGHPMEVPINLPPPKTSTSSEGLWQANYVACGGRHTLAIVTWTDM

SEQ ID NO: 7219 - protein, 751 aa, Geobacillus stearothermophilus
MENQNRQNAAQCPFHGSVTNQSSNRTTNKDWWPNQLNLSILHQHDRKTNPHDEEFNYAEEFQKLDYWALKEDLRKLMTESQDWWPADYGHYGPLFIRMAWHSAGTYRIGDGRGGASTGTQRFAPLNSWPDNANLDKARRLLWPIKKKYGNKISWADLFILAGNVAIESMGGKTIGFGGGRVDVWHPEEDVYWGSEKEWLASERYSGDRELENPLAAVQMGLIYVNPEGPDGKPDPKAAARDIRETFRRMGMNDEETVALIAGGHTFGKAHGAGPATHVGPEPEAAPIEAQGLGWISSYGKGKGSDTITSGIEGAWTPTPTQWDTSYFDMLFGYDWWLTKSPAGAWQWMAVDPDEKDLAPDAEDPSKKVPTMMMTTDLALRFDPEYEKIARRFHQNPEEFAEAFARAWFKLTHRDMGPKTRYLGPEVPKEDFIWQDPIPEVDYELTEAEIEEIKAKILNSGLTVSELVKTAWASASTFRNSDKRGGANGARIRLAPQKDWEVNEPERLAKVLSVYEDIQRELPKKVSIADLIVLGGSAAVEKAARDAGFDVKVPFFPGRGDATQEQTDVESFAVLEPFADGFRNYQKQEYSVPPEELLVDKAQLLGLTAPEMTVLVGGLRVLGANYRDLPHGVFTDRIGVLTNDFFVNLLDMNYEWVPTDSGIYEIRDRKTGEVRWTATRVDLIFGSNSILRSYAEFYAQDDNQEKFVRDFINAWVKVMNADRFDLVKKARESVTALQNFGADRSMVEVALQ

SEQ ID NO: 7220 - protein, 304 aa, Hordeum vulgare subsp. spontaneum
MATAGKVIKCKAAVAWEAGKPLSMEEVEVAPPQAMEVRDKILYTALCHTDVYFWEANGQTPVFPRILGHEAGGIVESVGEGVTELVPGDHVLPVFTGECKECAHCMSEESNLCDLLGINVDRGVMIDDGQSRFTIDGKPIFHFLGTSTFSEYTVIHVGCVAKIDPEAPLDKVCLLSCGISTGLGATLNVTKPKKGMTVAIFGLGAVGLAAMEGARMSGASRIIGVDLNPAKHEQAKKFGCTDFVNPKDHTKPVQEVIVEMTDGGVNRAVECTGNADAMISAFECVHDGWGVAWRTRSRCSRPTP

SEQ ID NO: 7221 - protein, 384 aa, Clostridium perfringens str. 13
MKRISILGVTGSIGTQTLDVLRFHKEDFELVGITANRNIELTLDIIKEFSPKYVAINHEESYKKLVDLVKSEGLKCEVIYGMEGLVKVATLDEIDIVVTSVVGMIGLKPTVEAIRKGKDIALANKETLVVAGELVMREAKENGVKILPVDSEHSAIFQSLQGNAHNKIDKILLTASGGPFRGFTIEDLKSVTPERALKHPKWNMGQKISIDSSTLMNKGLEVIEAHWLFDCSYKDIEVVVHPQSIIHSMVQYTDGAVIAQLGVPDMKLPIQYALNYPNREGNISEKLDLFKIRELTFEKPDLDTFKCLKLAYEAGEKGKLMPTILNGANEVCVELFLNKKITYLQIPEIIEECMNTFDYNKEVTLDNVINLDKEVRQYIYEKYN

SEQ ID NO: 7222 - protein, 85 aa, Oryza sativa
  unsure (1)..(85): unsure at all Xaa locations
XWPPRVRGRADRRRRHIGKENYGKSDPACVAKVKDLYNELHLQRVFSEYERESYEKLISAIEAQPNEAVRAVLKSFLHKIYKRSK

SEQ ID NO: 7223 - protein, 175 aa, Zea mays
  unsure (1)..(175): unsure at all Xaa locations
MAEEASAPAAGTEAPPGKMTMVVGVDESEHSFYALQWALQHFFPAGPAAAVPPSSCVTAKPXAASAVGLAGPXAAADVLPYVEADLKRSALRVVEKAKGLCTQVLASDAVFEALEGDARNVLCEAVERHGAEMLVVGSHGYGAIKRAVLGSVSDYCAHHAHCTVMIVKKPKQHKH

SEQ ID NO: 7224 - protein, 397 aa, Azotobacter vinelandii
MPRQGRGGSVEEARTDPHLRRSARGPGAARRGGPPRPGGRGGGRSGGCGGLRRGRQPGAGRGPAARCLRLGLDPMSRVSYREALRQGLREALCRDPQVFLMGEDVGRYGGIHAVSRGLLEEFGERRIRDTPLSELSFVAAGIGAALGGMRPIVEVMTANFSLLALDPLMNTAATLRHMSGGQFSVPLVLRIATGAGRQLAAQHSHSLEGWYAHIPGLKILVPATLEDARGMLWPALQDPDPVLIFEHGALYDLEGELDERAVVDIHSARVRRVGSDLTLVAYGGTLGKALAAAERLAGEGISAEVLDLRVLHPLDDAAIMASVCKTRRLLVVDEGWRSGSLAAEIIARVVERDFHELHAPPARVCSLEVPIPYARHLEEAALPQVPGIVAAARGLLS

SEQ ID NO: 7225 - protein, 334 aa, Ralstonia solanacearum
MEYRYLGRSALKVSPLCLGAMMFGGETDEATATRIIGKAFDQGINFIDTADVYHAGRSEAIVGRAIAARRDSWVVATKFGFPSAQGPNEQGQSRKWIMQSVEASLKRLGTDYIDILYFHRAIPDLPLEEGVRAVGDLIRQGKVRYFGVSNFRGWRIAEVARLADQLGIDRPVASEPLYNLVDRSAEVEQLPAAAHYGLGVVSYSPLARGVLTGKYTVDAPPPADSRAGRGDKRIQQTEWRPESLRIAQQIAAHAAARGTTPIAFALAWVLNNQWVSSTIAGPRTEAHWDHYAEALNLRLGPDDEQFVDRLVPPGHASTPGYTDPGYPVEGRKAR

SEQ ID NO: 7226 - protein, 751 aa, Raphanus sativus
MLARVCRFESSSSSSVSAARFFCTGSIRHALAEKSRDGESGEAGFRGESLKLRSGSYEIKGLEDAIDLFSDMLRSRPLPSVIDFNKLMGAVVRMERPDLVISLYQKMERKQIRCDIYSFTILIKCFCSCSKLPFALSTFGKLTKLGLHPDVVTFTTLLHGLCLDHRVSEALDLFHQICRPDVLTFTTLMNGLCREGRVVEAVALLDRMVENGLQPDQITYGTFVDGMCKMGDTVSALNLLRKMEEISHIKPNVVIYSAIIDGLCKDGRHSDSHNLFIEMQDKGIFPNIVTYNCMIGGFCISGRWSAAQRLLQEMLERKISPNVVTYNALINAFVKEGKFFEAAELYDEMLPRGIIPNTITYNSMIDGFCKQDRLDAAEDMFYLMATKGCSPDVFTFTTLIDGYCGAKRIDDGMELLHEMPRRGLVANTVTYNTLIHGFCLVGDLNAALDLSQQMISSGVCPDIVTCNTLLDGLCDNGKLKDALEMFKAMQKSKMDLDASHPFNGVEPDVLTYNILICGLINEGKFLEAEELYEEMPHRGIVPDTITYSSMIDGLCKQSRLDEATQMFVSMGSKSFSPNVVTFNTLINGYCKAGRVDDGLELFCEMGRRGIVADAIIYITLIYGFRKVGNINGALDIFQEMISSGVYPDTITIRNMLTGFWSKEELERAVAMLEDLQMSVGMSFNTFCFQISLLTFIILEKSCSLCCSIRETFLNEWFGVFVLQGISWRMNERMKDTFLFQIYKALLILFCR

SEQ ID NO: 7227 - protein, 296 aa, Magnetospirillum magnetotacticum
MTMPRDGSRRRCWPKTSGGATMADARDIDSLSAIVTEAIATISGFERVLVYRFDTDGCGDVVGESLAPDWPQSFLGLRFPDTDIPAQARALYRQTADRWIPTRDYVPVPLVPAANDRDRPISLALSRYRSVSPIHRMYQGNIGVDGSMSISVMRDGELWGLIIGHHRKPHRVPVAIQHLIVALGRAFSLRLDSLLNYTAKVDQEREMQAFSAMLGKLAAADDFLMALTEGKPNIVDLLPGCVGAAVVWESDHEPLHLRALGVTCRGLPVAPGWGGGRVRRPVMAVSTAQPKTLIYC

SEQ ID NO: 7228 - protein, 140 aa, Zea mays
MQSSSMKREISEAHDTIRFGINAGVKADLAPPHPLQSTIQSETKFWADKKKFGTDAIYGSALNIRKDLDAQILSRFQRPPGALPSSLLGYEALTGSLDDFGFEDYLNMPHDSDSFRQPDMHHGMEVRLGLSKGPICPSFN

SEQ ID NO: 7229 - protein, 172 aa, Triticum aestivum
  unsure (1)..(172): unsure at all Xaa locations
MAAASVSLKSSLFLSSPLSDFGGAAISISAQNRRRSWQPRGARMQVAAAADSKNILIMGGTRFIGLFLSRKLVQEGHQVTLFTRGXDFDFVKTSLSAKGFNVVYDINGREATEVSPILEALPNLEQFIYCSSAGVYLKSDLLPHFETDAVDPKSRHKGKLETESLLETSGVN

SEQ ID NO: 7230 - protein, 275 aa, Vibrio vulnificus CMCP6
MPDLRLDELAKIVNPQRILPTTMEFVDIAGLVAGASRGEGLGNKFLANIRETDAIGHVVRCFENENIVHVAGKVSPIEDIEVINLELAMADLDSCERAIQRQAKKAKGGDKDAKFELTVLEKLLPVLTEGGSARTVELSKEELAAVGYLNFLTLKPTMYIANVNEDGFENNPYLDAVREFAAKENNVVVPVCAAIESEMAELEDDERAEFLADMGIEEPGLNRVIRAGYELLSLHTYFTAGVKEVRAWTIPIGATAPKAAGKIHTDFRKASSVQK

SEQ ID NO: 7231 - protein, 385 aa, Triticum aestivum
  unsure (1)..(385): unsure at all Xaa locations
MEANQSPPRKRPRRDRNREKASFLNSAEAMKLDIWSEFPEDLFETVIARLPVAAIFRFRSVCRKWCSLVGSDNFSQQYSEVPQGMPWFYTITHENGNNNVAMYDPSLNKWHHPSVPLAPANIVMPVASAGGLVCLLDLSHRNFYICNPLTQSLKEIPPRSVQAWSRVSVGMVLNGRSSNEGYKVMWLRNDGNHEVYDSVQNMWSQPGEFPPSIKLPLALNFRSQPVAVGSTLYFMCSEPEGVLSYDVSTGIWIHFIIPLPLHLTDHTLAEFQGKIMLVGLLCKNAATCVCIWELQKMTLLWKEVDRMPNIWCLEFYGKHMRMTCLGNSGLLMLSLKAKRMNRLVMYNLVSKEWQKVPDCMLPCSRKKXQWIACGTAFGPCPSASP

SEQ ID NO: 7232 - protein, 298 aa, Sorghum bicolor
MGSFKGHVLPGTLFLLVGLWRVWCSASRHAASPSTFRVRAWNPVRTTTSSSPLRLLELYVVAGGAFADMCVEVLYSTHLRIFVDGGEVNPAHLNDLEHGGMLLMFFLFGALALASQLWPRYLPLTDGALCLVAATAFTAELVLFYFHSTTHMGLEGYYHYLLVVLVALCVAATVLGALLPASFPVDLASGVLIALQGLWFYQTAFTLYGPMLPAGCARDADGHIDCHARAAQERAEQLANFQFFGLVFLAFCYVLGCYAVAAARYGHPELAAMHDKHVAAMEGHGDAGGGDRQEECAI

SEQ ID NO: 7233 - protein, 553 aa, Neurospora crassa
MSAATAGFPHACVPHLSLQTDRPTHLGRQIPQAMPLIVDTDFQSGSPNAESRFGKHKSVAVIGSGISGVCAAAHLLKYGLSVTVFERSNGAGGVWKFDERPPEDPPYIYRPPSIGDQQHIPPGAVFDGGDAKLSNLEVRFAPPSPCYVGLKTNVPTPLMGTTLGNWPEGSPASVSHSAALQYIRSLAKRSGLDAVTEFHTRVEDVRKTSDGSKWRITTLALEIEDGTLSARFTEKVRDFNLVVVASGHYNMPRIPQIEGLKTWKDSFPDRVIHSKRYRNPEKYRNQNVLVIGAGVSATDVCKELGEVSHKTYQSTRNGRFDLPASVLPPNAVRVASVEKFVPLEAKIEGEEPTLGNNQPIPGSVVLTDGTILQDIHQIVLATGYIVSYPFLPQLHSDTAVDADPDNELVVTSDGIMTHNLHQDIFYINDPTLAFIGVPYHVATFSLFDFQAQALARVFAGRAKLPTQEDMRREYEKRVEEKGRGRFFHSLVTPGHEIAYVRDLAEWVNGYVKETGGEPMPVHSEEFLNEYQVLKSRLRGLYPEVAKNDGELQE

SEQ ID NO: 7234 - protein, 325 aa, Zea mays
  unsure (1)..(325): unsure at all Xaa locations
MTIDLGLQAAPPPPSSGGGGAGAGVPSSCTALPPGFRFHPTDEELIVHYLRKRAAAAPCPAPVIAXEVDIYKFDPWDLPAKAVFGEAEWYFFSPRDRKYPNGVRPNRAAGSGYWKATGTDKPITLSSSSSAAAAAGMIGVKKALVFYRGRPPKGVKTSWIMHEYRLAEALHAVVNAYRPTRFKNNASSSMRLDDWVLCRIYKKTTPQLAYSMSPPPHEEVEASSTSFMDGGGGFDLSRLHPPDDGGGGDDIMALAAATSYYAARPLPRPASISDYLLDYSAVSELFEATPLPETTRCSPGRRRTQQAGSTTTSVTAAASLLQPPP

SEQ ID NO: 7235 - protein, 436 aa, Haemophilus somnus 129PT
MSTQKSNKIGVVQLTILTMVNMMGSGIIMLPTKLAEIGTISIVSWLVTAVGSTALAYAFAQCGMFSKKSGGMGGYAEYSFGKAGNFMANYTYGVSLVIANTAIAISAVGYGSELLNVTLSPISIALCTIFTLWLATVLNFGGARITGNISSFTIWGVIIPVVGICLIGWFWFSGEMYVSAWNPHNVPTFEAIGVSISMTLWAFLGLESACANTDVVENPERNVPIAVLGGTLGAAVIYIVSTNVIAGIVPNLELANSTAPFGLAFAHMFEETTGKVVMGLMVMSCFGSLLGWQFTIAQVFKSSAEEGYFPAFFKKVTSKNAPIIGMVTITAIQSLLALMTISPSLNKQFNILVDLAVVTNVIPYLLSMAALMVLLKVEKVALNKAKITTFVAFIGSLYSLYALYAAGEQAMLYGSIVTFIGWTLYGFISYKFDIKK

SEQ ID NO: 7236 - protein, 333 aa, Hordeum vulgare subsp. vulgare
MEEVFSSNSKSKAGQMAGEAAAAAEKKSRPKPEQKVECPRCKSGNTKFCYYNNYSMSQPRYFCKACRRYWTHGGSLRNVPIGGGCRKPKRPGTSDAHKLGMASSSEPTGVVPPSNCTGMNFANVLPTFMSGGFDIQSSLSLTTFGSSSSSNPTALMSPGGTTSFLDVLRGGAGGLLDGSLGPNNGYYYGGHANGSSIGMLMTPPTVSFGIPSPMQQHGGLVVGGNGIGGTTSSTFQGSAGEEGDDGTGSIMGLQWQPHVGNGGGGVVGLGGAHHLGTGNNVTMGNNNNNNNQNNNNGGGAGDDDDGGSSRDCYWINNGGSNPWQSLLNSTSLM

SEQ ID NO: 7237 - protein, 164 aa, Lupinus polyphyllus
MARPQQRYRGFRQRHWGSWVSEIRHSILKTRIWQGTFESAEDAARAYDEAARLMCGTRARTNFPYNPNASQSSSSKLLSATLIAKLHRCYMASLQMTRPSSLPEAPRIIASPNNAVKGIGADAMLLPKKREQEEQETGGNLDFKKVKVECSQQFKPLEEDHIAQ

SEQ ID NO: 7238 - protein, 211 aa, Triticum aestivum
  unsure (1)..(211): unsure at all Xaa locations
MVSLKLQKRLASSVLKCGKGKVWLDPNEVNEISMANSRQNIRKLVKDGFIIRKPQKIHSRSRARRAHEAKQKGRHSGYGKRRGTREARLPTKILWMRRMGVLRRLLRKYREAKQIDKHVYHDMYLKHVGNMFKYQRDDMESIHKSXPEKPREKSQSEHFVSTRARSEAREERKHAGRXEGLAXGPRDHAPAPAAAAPASAAAAPKKAKAKK

SEQ ID NO: 7239 - protein, 399 aa, Pyrobaculum aerophilum str. IM2
MKTKVQVAIIGKPNAGKSTFFAAATLKDVKISPTPFTTIDPNIGVGYVRIDDCPCKSVACNPKSYVVVEGVCYAPVELIDVAGLVPGAWQGRGLGNQFLDHLRRAPVLIHVVDASGSTDEEGRLVKPGSHDPLKDVEFLEREVDMWIASIIKRDWDKVVRFVEFSKRDIVEVLLEKLAGLGMGRVHVEKALEVAGLAKRPPSKWGEEDFYKFSHSVRSLSKPIVIAANKIDLPEGEEGYKRLREAYPDRIIIPTSAEAELALRRAASKGLIKYKPGDDKFEITGELTAQQRAVLDKIAEVMKKWGGTGVVQAINAAVFKALRYVAVYPVEDERRLSDKNGNVLPDILLVPHTYTARDVAYTIHTELGDRFITAIDVRSGRRLASDEPVTHGLVLKIVAR

SEQ ID NO: 7240 - protein, 464 aa, Triticum aestivum
  unsure (1)..(464): unsure at all Xaa locations
MFFLASMYFAFPRRAGAPGQVFAAGLPLWVPNSGRNVFPANYCYRGYLASTAGFRTILLVPFETGVLELGSMQQVAESSDTLQTIKSVFAGTGGNKDIIPSREGNGHIERSPGLAKIFGKDLNLGRSSAGPVIGVSKVDERPWEQRTAGGGSSLLPNVQKGLQSFTWSQARGLNSHQQKFGNGILIVSNEATHGNNRTADSSTTTQFQLQKAPQLQKLPLLQKPPQLVKPLQMVNQQQLQPQAPRQIDFSAGTSSKXGVLVTKPAVLDGDSXEVNGLCKXEGTTPVIEDRRPRKRGEESLRMGREEPLNHVEAERQRREKLNQRFYALRAVVPNISKMDKASLLGDAIAYITDLQKKLKDMETERERFLESGMVDXPRERAPRPEVDIQVVQDEVLVRVMSPLENHPVKKVFEAFEEADVRVGESKLTGNNGTVVHSFIIKCPGSEQQTREKVIAAMSRAMSSV

SEQ ID NO: 7241 - protein, 380 aa, Chlamydomonas reinhardtii
MAFALRGVTAKASGRTAGARSSGRTLTVRVQAYGMAAEYIWADGNEGKPEKGMIFNEMRSKTKCFEAPLGLDASEYPDWSFDGSSTGQAEGNNSDCILRPVRVVTDPIRGAPHVLVMCEVFAPDGKPHSTNTRAKLREIIDDKVTAEDCWYGFEQEYTMLAKTSGHIYGWPAGGFPAPQGPFYCGVGAESAFGRPLAEAHMEACMKAGLVISGINAEVMPGQWEYQIGPVGPLALGDEVMLSRWLLHRLGEDFGIVSTFNPKPVRTGDWNGTGAHTNFSTKGMRVPGGMKVIEEAVEKLSKTHIEHITQYGIGNEARLTGKHETCDINTFKHGVADRGSSIRIPLPVMLKGYGYLEDRRPAANVDPYTVARLLIKTVLKG

SEQ ID NO: 7242 - protein, 139 aa, Triticum aestivum
  unsure (1)..(139): unsure at all Xaa locations
QLGRTDMRLPILYXLXWPERVYCXEITWPRLDLCELGSLTFKAVDNVKYPSVDXAYAAGRAGGTMPGVXSAANEKAVELFINEKISYLDXFKVVEMTCNAXRNELVTSPSLEEIIHYDQWARKFSAXLQPXSRRSIVLA

SEQ ID NO: 7243 - protein, 328 aa, Triticum aestivum
MQYNNLGRSGLRVSQLSYGAWVTFGNQLDVKEAKSLLQACRDAGVNFFDNAEVYANGRAEEIMGQAIRDLGWRRADVVISTKLFWGGQGPNDKGLSRKHVVEGLKASLKRLDMEYVDVVYCHRPDATTPIEETVRAMNWVIDQGWAFYWGTSEWTAQQITEAWGVANRLDLVGPIVEQPEYNLFSRHKVESEFVPLYSTYGIGLTTWSPLASGVLTGKYSKGNIPAESRFALDNYKNLANRSLVDDTLRKVNGLKPIASELGVSMAQLGIAWCASNPNVSSVITGATKESQIVENMKALEVVPLLTPEVLEKIEAVVQSKPKRLESYR

SEQ ID NO: 7244 - protein, 788 aa, Triticum aestivum
MTTDQPVISLRPGGGGGGPRGGRLFAPAFAVAASGSGDFLRPHGGGASGVSRIGDLHSESRERVRYSRDQLLDLRKITDVTEQILRLQQEIEAELNGDDQSWVRNDSNVQLQTQAQPQVQAQNRFTETDNRDWRARTEKPPAPAVQEEKSWDNIREVKEQYNASGRQQEQFNRQDQSSSQKAQVGPPPALIKADVPWSARRGNLSEKDRVLKTVKGILNKLTPEKFDLLKGQLLDSGITTADILKDVISLIFEKAVFEPTFCPMYAQLCSELNDNLPTFPSEEPGGKEITFKRVLLNNCQEAFEGADSLRVEIASLTGPDQEMEKRDKERIFKLRTLGNIRLIGELLKQKMVPEKIVHHIVKELLGSDKKACPDEEHVEAICQFFNTIGKQLDENPKSRRINDTYFVQIRELVANPQLTPRSKFMVRDLIDLRSNNWVPRRAEIKAKTISEIHTEAEKNLGLRPGATANMRNGRNAPGGPLSPGGFSVNRPGTGGMMPGMPGSRKMPGMPGLDNDNWEVQRSRSMPRGDPLRNQGPLINKVPSINKPSPINPRLLPQGTGALIGKSALLGTGGPPSRPSSLTASPTPLPAQTTASPKPSSATPASVPIPDKAASSAKVIPAGLQKKTASLLEEYFGIRILDEAQQCIEELQSPDYHPEIVKEAINLALDKGASFVDPLVKLLEHLYTKKTFKTEDLENGCLLYGSLLEDIGIDLPKAPTQFGEVVARLILSCGLRFEAAEGILKAMEDTFFRKAIFTSVTKTLGADPAGQAILSSHAAVVDACNSLSI

SEQ ID NO: 7245 - protein, 389 aa, Agrobacterium tumefaciens str. C58 (Cereon)
MSRITRPGMRNQPLEEKMTQPATAAVLEEKNGRFILREVKLEAPRPDEVLIRMVATGICATDAHVRQQLMPTPLPAILGHEGAGIVERVGSTVSHLKPGDHVVLSYHSCGHCKPCMSSHAAYCDHVWETNFAGARLDGTIGVAAPDGNTLHAHFFGQSSFSTYALAHQRNAVKVPDDVPLELLGPLGCGFQTGAGSVLNALKVPVGASIAIFGVGAVGLSAIMAAKVADAAVIIAIDVNTERLKLASELGATHCVNPREQADVASAIRDIAPRGVEYVLDTSGRKENLDGGIGALAPMGQFGFVAFNDHSGAVVDASRLTVGQSLIGIIQGDAISGLMIPELVGLYRSGRFPFDRLLTFYDFADINEAFDDVAAGRVIKAVLRFPPQAA

SEQ ID NO: 7246 - protein, 226 aa, Triticum aestivum
MGVATVTEMKQSVSVSGKKMFRTSLNNRHANEWPPTDVSSDLTVEVGTSSFALHKFPLVSRSGKIRRLVAEAKDAKLARLTLHATPGGAPAFELAAKFCYGVHVDITVANVAMLRCAARYLQMTDDFSDKNLELRAEAFLRDAVLPSIASSVAVLRTCEALLPAAEDVPRAPLSLAPPASTRPPCPPPTRWGTGSTCPPPGVCPPPLARRPRGGWPGHARRPARSR

SEQ ID NO: 7247 - protein, 504 aa, Listeria monocytogenes
KPLTNLKNLGWLFLDENKIKDLSSLKDLKKLKSLSLEHNGISDINGLVHLPQLESLYLGNNKITDITVLSRLTKLDTLSLEDNQISDIVPLAGLTKLQNLYLSKNHISDLRALAGLKNLDVLELFSQECLNKPINHQSNLVVPNTVKNTDGSLVTPEIISDDGDYEKPNVKWHLPEFTNEVSFIFYQPVTIGKAKARFHGRVTQPLKEVYTVSYDVDGTVIKTKVEAGTRITAPKPPTKQGYVFKGWYTEKNGGHEWNFNTDYMSGNDFTLYAVFKAETTEKAVNLTRYVKYIRGNAGIYKLPREDNSLKQGTLASHRCKALTVDREARNGGKLWYRLKNIGWTKAENLSLDRYDKMEYDKGVTAYARVRNASGNSVWTKPYNTAGAKHVNKLSVYQGKNMRILREAKTPITTWYQFSIGGKVIGWVDTRALNTFYKQSMEKPTRLTRYVSANKAGESYYKVPVADNPVKRGTLAKYKNQKLIVDCQATIEGQPWYRIRASSTF

SEQ ID NO: 7248 - protein, 327 aa, Prochlorococcus marinus subsp. marinus str. CCMP1375
MAGTLLFNALREAIDEEMARDPHVCVMGEDVGQYGGSYKVTKDLYEKYGELRVLDTPIAENSFTGMAVGAAMTGLRPIVEGMNMGFLLLAFNQISNNMGMLRYTSGGNFKIPTVVRGPGGVGRQLGAEHSQRLEAYFHAVPGIKIVACSTPTNAKGLMKAAIRDDNPVLFFEHVLLYNLTEELPEGDYLCSLDQADLVREGKDVTILTYSRMRHHCLKAVEQLTKKDIDVELIDLISLKPFDIKTICNSIRKTHRVIIVEECMKTGGIGAELMALINEHCFDDLDCRPIRLSSQDIPTPYNGQLENLTIIQPHQIVETVEQVVNLGV

SEQ ID NO: 7249 - protein, 224 aa, Phaseolus vulgaris
EQMPEKKHRLSSEQVHLLEKSFEEENKLEPERKTQLAKKLGLQPRQVAVWFQNRRARWKTKQLERDFDVLKSSYDTLLSSYDSLMKDNEKLKSEVVSLNEKLQDQAKEVPEEPFYDKKVDPLPVEDIATIFSTRVEDHQSSGSVGSAVVDEGSPQLVVDSVDSYLPADNPGGCVGPVERIQSEEEDGSDDGRSYMDVFVVSETENQNHEEGEALVWWTNMYYVE

SEQ ID NO: 7250 - protein, 369 aa, Oryza sativa
MEAIRKQASKLREQVARQQQAVMKQFGGGYGADGAFADEAEAQQHSKLEKLYISTRAAKHFQRDIVRGVEGYIVTGSKQVEIGNKLCEDGKKYGAENTCTSGSTLSKAALCFAKARSLMEKERGNLLKALGTQVAEPLRAMVMGAPLEDARHLAQRYDRMRQEAEAQAIEVSKRQMKLRETSGNGDMISRLEAAESKLQELKSNMGVLGKEAVASMTAVEAQQQRLTLQRLIAMVESERSYHQRVLQILDQLEREMVSERQRIEGAPPPAVESSMPPPPSYEEINGVFMSPTVAELVETVEFFLAEAIQSYRAESETELNLAAGDYIVVRKVSNNGWAEGECRGKAGWFPYDYIEKRDRVLASKVAQVF

SEQ ID NO: 7251 - protein, 154 aa, Triticum aestivum
  unsure (1)..(154): unsure at all Xaa locations
MXXLKLQXXLASXVLXCXKGKVWLXPNEVNEISMXNSRXNIRXLVXDGFIIRXPQKIHSRSRARRAHEAKQMGRHSGYGKRMGTXEAKLPTKILWMXRXRVLMRLLRNTVXAXKIXNHMXHDMYLXVXGXISXNKRSSWIIPQSRNRETPIGNQ

SEQ ID NO: 7252 - protein, 531 aa, Glycine max
MYHTFQPSFPDFLSFTPRAPSLQKNTTKEMSFAGFLSLQSMSATCGFFFFSFTLLFSFFSFLVFISRMKPWCNCDLCKSYLTVSWLKKFPNLCDWYTHLLRKSPTGTIHVHVLGNTITSNPHNVEHILKTNFQNYPKGKPFSTILGDLLGRGIFNVDGESWKFQRKMASLELGSVAIRTYAMELVNEEIHARLIPIMESTARGELNSVCVLDLQDILRRFSFDNICKFSFGLDPGCLLPNLPVSDLAVAFDLASKLSAERAMNASPFIWKLKRLLNIGSEKKLRETINVVNDVAKEMIKQRREMGFKTRNDLLSRFMGSIDDDVYLRDIVVSFLLAGRDTIAAGLTGFFMLLSKSPEVEELIREEVGRVMGPGQEFPSFEQIREMHYLNAAIHDSMRLFPPIQFDSKFATEDDVLPDGTFVRKGSRVTYHPYAMGRMENIWGPDCLDFRPERWLRDGVFVPECPFKYPVFQAGVRVCLGKDLALMEMKSVVVALVRRFDIRVAQPDQEPRFAPGLTATLRGGFPVRVCERK

SEQ ID NO: 7253 - protein, 356 aa, Triticum aestivum
  unsure (1)..(356): unsure at all Xaa locations
MAPLLKDELDIVIPTIRNLDFLEMWRPFFQPYHLIIVQDGDPTRTVXVPEGFDYELYNRYDINRILGPKASCISFKDSACRCFGYMVSKKKYVYTIDDDCFVAKDPTGKDIDALAKHIQNLLCPSTPLFFNTLYDPYQEGADFVRGYPFSLREGVPTAVSHGLWLNIPDYDAPTQLLVKPRERNGRYVDAVMTIPKGSLFPMCGMNLAFDRELIGPAMYFGLMGDGQPIGRYDDMWAGWCVKVICDHLGLGVKTGLPYIWHSKASNPFVNLKKEYKGIFWQEDIIPFFQAAKLTKECDTVQKCYISLSQQVKEKLGKIDPYFVKLADAMVTWIEAWDMLNSKDSKEADANGKLKGR

SEQ ID NO: 7254 - protein, 339 aa, Zea mays
MAVASTSPLSAKPATAPSPPAPGSGLLALGVRRAPATAAWRRLRVEAIRTQRTEVPVEESAPARDAAAAAPLDGNGAGADGSVVPSSDDSWVVKLEQSFNIFATDSVIMVLKGVYGDRYYARFFALETIARVPYFAFISVLHLYATFGWWRRADYIKVHFAQSWNEFHHLLIMEELGGDSLWFDCFLARFMAFFYYFMTVAMYMLSPRMAYHFSECVERHAYSTYDEFLKLHEEELKRLPAPEAALNYYMNEDLYLFDEFQASRTPGSRRPKIDNLYDVFVNIREDEAEHCKTMKTCQTHGNLRSPHSTPNCLEDDTECVIPENDCEGIVDCVKKSLTK

SEQ ID NO: 7255 - protein, 516 aa, Escherichia coli CFT073
MFMATYMTFSLKQSGRAMSKHDTDTSDQHAAKRRWLNAHEEGYHKAMGNRQVQMIAIGGAIGTGLFLGAGARLQMAGPALALVYLICGLFSFFILRALGELVLHRPSSGSFVSYAREFLGEKAAYVAGWMYFINWAMTGIVDITAVALYMHYWGAFGGVPQWVFALAALTIVGTMNMIGVKWFAEMEFWFALIKVLAIVTFLVVGTVFLGSGQPLDGNTTGFHLITDNGGFFPHGLLPALVLIQGVVFAFASIEMVGTAAGECKDPQTMVPKAINSVIWRIGLFYVGSVVLLVMLLPWSAYQAGQSPFVTFLSKLGVPYIGSIMNIVVLTAALSSLNSGLYCTGRILRSMAMGGSAPSFMAKMSRQHVPYAGILATLVVYVVGVFLNYLVPSRVFEIVLNFASLGIIASWAFIIVCQMRLRKAIKEGKAADVSFKLPGAPFTSWLTLLFLLSVLVLMAFDYPNGTYTIAALPIIGILLVIGWFGVRKRVAEIHSTAPVVEEDEEKQEIVFKPETSS

SEQ ID NO: 7256 - protein, 98 aa, Glycine max; identical to SEQ ID NO: 4110

SEQ ID NO: 7257 - protein, 356 aa, Nicotiana tabacum
MSPLSDLISLNLSDSTQKIIAEYIWIGGSGMDLRSKARTLSGPVTDPSELPKWNYDGSSTGQAPGEDSEVILYPQVYFKDPFRRGNNILVMCDAYTPAGEPIPTNKRHAAAKIFSNPDVVAEEPWYGIEQEYTLLQRDINWPLAWPIGGFPGPQGPYYCGTGADKAFGRDIVDSHYKACLYAGFNISGINGEVMPGQWEFQVGPSVGISAGDEVWVARYILERIAEIAGVVVSFDPKPIPGDWNGAGAHTNYSTKSMREDGGYEVILKAIEKLGLKHKVHIAAYGEGNERRLTGKHETANISTFKWGVANRGASVRVGRDTYKAGKGYFEDRRTASNMDPYAVTAMIADTNHICKS

SEQ ID NO: 7258 - protein, 476 aa, Arabidopsis thaliana
MALQRQLLKRATSDIYHRRAISLLRTDFSTSPSIADAPPHIPPFVHQPRPYKGPSADEVLQKRKKFLGPSLFHYYQKPLNIVEGKMQYLYDESGRRYLDAFAGIVTVSCGHCHPDILNAITEQSKLLQHATTIYLHHAIGDFAEALAAKMPGNLKVVYFVNSGSEANELAMMMARLYTGSLEMISLRNAYHGGSSNTIGLTALNTWKYPLPQGEIHHVVNPDPYRGVFGSDGSLYAKDVHDHIEYGTSGKVAGFIAETIQGVGGAVELAPGYLKSVYEIVRNAGGVCIADEVQTGFGRTGSHYWGFQTQDVVPDIVTMAKGIGNGLPLGAVVTTPEIASVLASKILFNTFGGNPVCSAGGLAVLNVIDKEKRQEHCAEVGSHLIQRLKDVQKRHDIIGDVRGRGLMVGIELVSDRKDKTPAKAETSVLFEQLRELGILVGKGGLHGNVFRIKPPMCFTKDDADFLVDALDYSISRL

SEQ ID NO: 7259 - protein, 180 aa, Oryza sativa
  unsure (1)..(180): unsure at all Xaa locations
MTVDQRTTAKAIMPPVEMPPVQPGRKCGGEESTGTTDRKKRPRRSRDGPTSVAETIKRWAELNNQQELDPQGPKKARKAPAKGSKKGCMKGKGGPENTRCDFRGVRQRTWGKWVAEXIREPDRQSRLWLGTFPTAEAAACAYDEAARAMYGPMARTNFGQHHASTTTTINNQSDVVFTLH

SEQ ID NO: 7260 - protein, 178 aa, Triticum aestivum
  unsure (1)..(178): unsure at all Xaa locations
MAGVSRSMVAPLLVLXNLVMYIVVIGLASWNLNHFINGXTNYAGVAGNGATFYFLLFAILAGVVGAASKLAGVHHVRTWRGDSLSTSASSALVAWAITALAFGLACKEIHVGGHRGWRLRVLEAFIIILAFTQLLYVMALHAGLFGNQFGDGYGGAEHQYGDHHHHKGMGTAAATARV

SEQ ID NO: 7261 - protein, 211 aa, Oryza sativa
  unsure (1)..(211): unsure at all Xaa locations
MAAPDVEYRCFVGGLAWATDDRSLEAAFSTYGEILDSKIINDRETGRSRGFGFVTFSSEQSMRDAIEGMNGKELDGRNITVNEAQSRXXSGGGGGGYGGGGGGYGGGRXGGXGYGGRGGGGLYSQSLEYLLAVLVVLHYCRVSADMXARCQSAALTEGXSEPPCLPAVQLLCMLRLCLCISGRQTLAAARRLHARVAVGCQRTAGLYVLRR

SEQ ID NO: 7262 - protein, 372 aa, Eremothecium gossypii
MAAVKRIVVLPGDHIGREVVEEAVKVLGAVEQSLSDVHFDFQYHLVGGAAIDATGSALPDEALGAAKEADAVLLGAVGGPKWQGGAVRPEQGLLKLRQELGVYANLRPCNFAADSLLELSPLRPEIARDTDIMVVRELLGGSYFGERHEDEGDGVAWDTDKYTVKEVQRIARMAGFLALQHDPPLPVWSLDKANVLASSRLWRKTVEETFQSEFPNVQLQHQLIDSAAMILVKNPRAFNGVVVTSNMFGDIISDEASVIPGSLGLLPSASLASLPDSKSAFGLYEPCHGSAPDLPAGKANPIGCILSAAMMLKLSLNMVAAGEAVEQAVQEVLDSGVRTGDLLGSSSTSEVGDAIALAVKEALRRQSAAGLS

SEQ ID NO: 7263 - protein, 343 aa, Salmonella typhimurium LT2
MEVKTQSCVVAGKRAVAVTEQNIEWNNKGTLVQITRGGICGSDLHYYQEGKVGNFTVKAPMILGHEVIGKIVHSDSDLLREGQPVAINPSEPCGHCKYCLQHEENHCTEMRFFGSAMYFPHVDGGFTRFKAVDTAQCIPWPEQADEKAMAFAEPLAVAIHAAHEAGDLQGKRIFISGVGPIGCLIVSAVKTLGAAEVVCADISTRSLSLARQMGADTLVNPQHDSLDDWKAEKGYFDISFEVSGHPSSISTCLEVTRAKGVMVQVGMGGAVPNFPMMMVISKEISLKGSFRFTTEFNTAVSWLANRVINPLPLLSAEYPFTDLEAALIFAGDKTQAAKVQLVF

SEQ ID NO: 7264 - protein, 502 aa, Xylella fastidiosa Dixon
MRLFITPHVSYPFGFLHSSRLVMSFLPSFLKRKSIDLITVHEEGRRLVPTLSWPHLIAFGIGAIVGTGIYTLIGVGAEKAGPAVLLSFVIAGVICACAALAYAEMATLMPVAGSTYTYSYVALGEGIAWIVGWSLILEYSLVVSTVAVGWSGYMTGFLKSVGVDMPLALTAGPYAGGIINLPAVVITCVVAGLLIVGTKESTTLNAVLVVVKIIALSVFVVIALPHFDMAHLKPFMPYGFTKSIDTGGVERGVMAAAAIIFFAFYGFDAISTAAEETKNPSRDLSIGIIGSMIGCTLIYVLVALAAIGAMHYTVFGPSTEPLALILRQLDQGNTARLIGAAAIIALPTVLLAFLYGQSRILFVMSRDGLLPRGLSTVNERTGTPIATTLFTAILVATAAGLVPLGEIAALANAGTLTAFIAVALCLLVMRVREPQRVRAFRTPLAWVVGPIAIAGCLYLFWSLPKMTQSLFLLWNALGLCVYLVYGRHTSLLSKGVSIDTPR

SEQ ID NO: 7265 - protein, 139 aa, Zea mays
WTVRHVAAPGGGVAGGTTDLVIVHAKPSPSSIVSFGGPGAGEAIRHVDAGLRKTAEAVVARARRVCAAASSARALVEVVEGEPRTVLCRAAEKHRADLLVLGSHGYGAVKRALLGSVSDYCAHHAPCSVMIVKQPTKSK

SEQ ID NO: 7266 - protein, 239 aa, Oryza sativa
  unsure (1)..(239): unsure at all Xaa locations
WIPGRQANLLRRERVGETSSGGGGACSAAAMRIEEVQSAAKKQRIATHTHIKGLGLDANGAAIGLASGFVGQAAAREAAGLVVDMIRQKKMAGRALLLAGPPATGKTALALGISQELGSKVPFCPMVGSEVYSSEVKKTEVLMENFRRAIGLRIKENKEVYEGEVTELSPEEAESTTSGYGKSISHVIIGLKTVKGTKQLKLDPTIYDALIKEKVAVGDGIYIEANSGAVKRVGRCDSX

SEQ ID NO: 7267 - protein, 745 aa, Methanosarcina mazei Goe1
MAPVETTERLGRSLGFFSTFAIGTGTMIGAGIFLLPGIAMANAGSGAIISFLLGGLITIATSISMAELATGMPLAGGSYYYISRTMGAAFGAVIGLGSWLALIFKGTFALIGLAEYAQIFHPMPIYLVAAVTGVLLLIINFRGAKSSGSLQNFIVVILLLILFVFIGKVSFEVRPENLLPVAPHGVVSIFTTAGMIFISYLGLAEAAAVAEEVKNPSKNLPRAFIASAVVVTLFYAGIMAVVAGFSGPEGGASTVTPLADIAGFIAGDSGKFFIAFSALLATLSTANGAILSSSRFPFAMSRDALMPKWFVSIHKKYETPHNAILVTGSVMVLLLFLFDIEQLARLGGAFNILIFILLNMAVIILRKRTLPGYEPTFRDPFFPFTQIFGVVGSMLLLPLLGGLPLLFSVLMIFAGAGWYMFYGKDKAMPAYNLFDLLENNVERVSAEPEPVGRVLVPVSNPGHERDLLKLADLLGNEIICLHVVEVPSQISLTVGQELYHEKQIEIDSRFRDYFEQYPAKFGNKRDYIVAFDHTISNSIIEQAEIENADIIIMGWHDSKRFKYSFGDVTNDVLLSSKSQIALLKGHLPDSIKKVLVAYNGRENSVHGLSLAKKIAENTGASIRIISIVSPDEDPEKKAKIAEELEGLVKKIPSTPASFKLLERYSIEDAILEVSNGYDLTIIGDSSERFKISLLGTLSQRIARHARKPVMIVKKSKPISKESLNYLLKKYARKAYAKFRKEKGRD

SEQ ID NO: 7268 - protein, 295 aa, Rhizobium sp. CC2129
RGKTQIKEFDAFPTLEQLPLWGFDGSSTQQAEGRSSDCVLKPVAVYPDPVRTNGALVMCEVMMPDGKTPHPSNTRATVLDDEGAWFGFEQEYFFYKNGRPLGFPEQGYPAPQGPYYTGVGYKNVGDIARRIVEEHLDICLAAGINHEGINAEVAKGQWEFQVFGKGSKKAADEVWLARYLLLRLTEKYGIDVEFHCKPLGDTDWNGSGMHANFSTAYMREVGGKDYFEALMAAFEKNLHDHINVYGPDNHLRLTGKHETAPWDKFSYGVADRGASIRVPHSFVNNGYRGYLEDRR

SEQ ID NO: 7269 - protein, 333 aa, Staphylococcus aureus subsp. aureus MW2
MQNKQILFNKIPEGMPQEDTFKIEETDTPKLESDGVLVQTLYISVDPYMRGRMTKADSYVQPFEIGKPIVSHVVAKVIDSTLADYKKGDVVVGMLPWRIINHVQADQITKVPTTDVPLDLYLSVLGMPGQTAYHGLLDIGQPKAGDTVVVSAASGAVGSVVGQIAKIKGCRVVGIAGGDKKVNYLTGTLGFDAGIDYKKEDFAEALAQAVPDGIDVYFENVGGTVGDEVFKHLNRFARVPVCGAISSYNHPEADIGPRIQGTLIKKQVMMRGFLVSEFANAFKEASEQLATWVQEGKIQSQVTIEDGFENAPHAFKNLFTGDNFGKQVIKVTE

SEQ ID NO: 7270 - protein, 356 aa, Securigera parviflora
MSLLSDLINLNLSETTDKIIAEYIWIGGSGLDLRSKARTLPGPVSDPSELPKWNYDGSSTGRAPGEDSEVILYPQAIFKDPFRRGSNILVICDAYTPAGEPIPTNKRHAAAKVFSHPDVVAEVPWYGIEQEYTLLQKEVNWPLGWPLGGFPGPQGPYYCGTGADKALGRDIVDAHYKACLYAGVSISGINGEVMPGQWEFQVGPSVGISAGDEVWVARYVLERITEIAGVVLSFDPKPIKGDWNGAGAHTNYSTKTMREDGGYEIIKKAIEKLGLRHKEHIAAYGEGNERRLTGRHETADINTFLWGVANRGASIRVGRDTEKAGKGYFEDRRPASNMDPYVVTSMIADTTILWKP

SEQ ID NO: 7271 - protein, 366 aa, Triticum aestivum
MSDSALQDLNAAQSVVLEKSKDSSVEPCSSKPVLNGNKCVKKEGNAVPDVTNGCDAVVVDIEYIDSENLTDLPDVDTSLSTLLARLDSKDWIKTCEALNNVRQLAIYHKQRLQELLEPLVPLIVKSVKNPRSALCKTALMTCADIFKAYGEQMVDLIDQLLMPLFLKSSQDKRFVCEAAEAALMSMTSWISPSILLPKMQPYLKNRNPRIRAKASVCFSKSVPRLGLEGIKEYGMDKLIQVAATQLSDQLPESREAARNLSLELQAFYEKSQASGLGEDDSAPAISPEAETWEAFCLSKLSALSAQAILRVTVGVPVAPKEGGISAALKEGGIPAALKEGGISVVVAPKEGGAPVATKEGAAAVGC

SEQ ID NO: 7272 - protein, 382 aa, Phanerochaete chrysosporium
MAFGSLLAFVALAAITRAAPTAESAVCPDGTRVTNAACCAFIPLAQDLQETLFQGDCGEDAHEVIRLTFHDAIAISQSLGPQAGGGADGSMLHFPTIEPNFSANSGIDDSVNNLLPFMQKHDTISAADLVQFAGAVALSNCPGAPRLEFMAGRPNTTIPAVEGLIPEPQDSVTKILQRFEDAGNFSPFEVVSLLASHTVARADKVDETIDAAPFDSTPFTFDTQVFLEVLLKGTGFPGSNNNTGEVMSPLPLGSGSDTGEMRLQSDFALARDERTACFWQSFVNEQEFMAASFKAAMAKLAILGHSRSSLIDCSDVVPVPKPAVNKPATFPATKGPKDLDTLTCKALKFPTLTSDPGATETLIPHCSNGGMSCPGVQFDGPA

SEQ ID NO: 7273 - protein, 452 aa, Nostoc punctiforme
MQQLKSAEEIPGSYGLPILGETLEIFRDSELYLWRRFQQYGSVFKTSVLGRKRAYLIGPSANRLVLVEQAENMSSRIGWYFLESTFGNNILLQDGEEHRLTRRLMYPAFHGKAIATYFDTIQNIVQDFLKDWGERGTISLNSSFRQLTLMIATRLFLGSQNKSEVEQTSQWFTQLLDSSMAIFKWNVPFTLYGRGQNARGKLVAFLREAIAQRIEQGNLEESKDVLGLLLAAVDEDGNKLSETQVINEALLLLFAGHETTASLLTWVIFELGNHPEWRERLRQEQLAVVGNNPLSLSHLKQFPQLTNVLKEAERLYPPVYAYNRGVLKDIEYGGYRIPAGWFVTISPMLTHRLPELYTEPDRFDPDRFAPPREEDKKHPLALMGFGYGSHSCLGMEFAQMEMKIVLSTLLRHYDWTVKPDYSAIAPVRQPSKVKDILQAYIEPLLIKHPLDS

SEQ ID NO: 7274 - protein, 333 aa, Staphylococcus aureus subsp. aureus Mu50
MQNKQILFNKIPEGMPQEDTFKIEEIDTPKLESDGVLVQTLYISVDPYMRGRMTKADSYVQPFEIGKPIVSHVVAKVIDSTLADYKKGDVVVGMLPWRIINHVQADQITKVPTTDVPLDLYLSVLGMPGQTAYHGLLDIGQPKAGDTVVVSAASGAVGSVVGQIAKIKGCRVVGIAGGDKKVNYLTETLGFDAGIDYKKEDFAEALAQAVPDGIDVYFENVGGTVGDEVFKHLNRFARVPVCGAISSYNHPEADIGPRIQGTLIKKQVMMRGFLVSEFANAFKEASEQLATWVQEGKIQSQVTIEDGFENAPHAFKNLFTGDNFGKQVIKVTE

SEQ ID NO: 7275 - protein, 342 aa, Streptomyces coelicolor A3(2)
MKALVKENAEPGLWLADVPEPTIGSGDVLIKVLRTGICGTDLHIRAWDGWAQQAIRTPLVVGHEFVGEVVDTGRDVTDIKAGDRVSGEGHLVCGKCRNCLAGRRHLCRATVGLGVGRDGAFAEYVALPASNVWVHRVPVDLDVAAIFDPFGNAVHTALSFPLVGEDVLITGAGPIGLMAAAVARHAGARNVVITDVSEERLELARKVGATLALNVSDATIADGQRELGLREGFDIGLEMSGRPEAMRDMIANMTHGGRIAMLGLPAEEFPVDWARVVTSMITVKGIYGREMFETWYAMSVLLEGGLDLAPVITGRYSHRDFEAAFADAASGRGGKVILDWTA

SEQ ID NO: 7276 - protein, 156 aa, Glycine max
ASATQLFRPSKRRTARASSKKESIESQAGVSRSMVAPLLVLTLVMYIVVIGLASWNLNHFINGTTNYAGVAGNGATFYFLLFAILAGVVGAASKLAGVHHVRTWRGDSLATSASSALVAWAITALAFGLACKEIHVGGHRGWRLRVLEAFIIILAF

SEQ ID NO: 7277 - protein, 183 aa, Glycine max
  unsure (1)..(183): unsure at all Xaa locations
VTPVPQNDXPNPVVPIQYTEEFSEVMDYFRAVYLTDERSPRALALTAEAVQFNSGNYTVWHFRRLLLESLKVDLNDELEFVERXGAGNSKNYQMWXXALVWSFFHTLXHRRWVXEKLGPEARNNELEFTKKILSVDAKHYHAWSHRQXALQTLGGWEDELNYCTELLKEDIFNNSAWNQRYFV

SEQ ID NO: 7278 - protein, 320 aa, Glycine max
  unsure (1)..(320): unsure at all Xaa locations
MALVRHRRHPNLRLPLPEPSERRPRFPLPLPPTTTIAKPSAGDTIASADLEKLAVLGHGNGGTVYKVRHKTTSATYALKIIHSDADATTRRRAFSETSILRRATDCPHVVRFHGSFENPSGDVAILMEYMDGGTLETALATGGTFSEERLAKVARDVLEGLAYLHARNIAHRDIKPANILVNSEGEVKIADFGVSKLMCRTLEACNSYVGTCAYMSPDRFDPEAYGGNYNGFAADIWSLGLTLFELYVGHFPFLQAGQRPDWATLMCXAICFSDPXSLPETASPEFHDFVECCLKKESGERWTAAQLLTHPFVCKDPETC

SEQ ID NO: 7279 - protein, 98 aa, Triticum aestivum
GCATSSGGGEELWVSVDGKRAVQAQRLRWNFRGNQTVFVDGAPVDVMWDLHGWWFRDTPGCAVVMLRARSALESRLWLEEEGAAPGFSLVVQAFKAPP

SEQ ID NO: 7280 - protein, 197 aa, Rhodospirillum rubrum
MACRVFGKRSSTEEPAYTVIATLGDGVEIRHYGPRVAAEVAARHSGGAGERTHAFRLLFAYITGANTARQNLPMTKPVGVGAVGGASQRLAMTIPVATGAGAALQFFLPAGLTAQTAPVPSDPRVTLRDIAAQDMAVLGFSGFRHGIEVDRRKAQLRQSLTASGWTASGEAVAYFYDPPFSLPFLRRNEVAVPVERG

SEQ ID NO: 7281 - protein, 436 aa, Brassica rapa
MKGVRNIYHHSYTLSFLLVFLVMILFRPAFSINTLSPTESLTISSNRTLVSPGDVFELGFFRTNSRWYLGMWYKKVSERTYVWAANRDNPISNSIGSLKILGNNLVLRGNSNKSVWSTNITRRNERSLVLAELLGNGNFVMRDSNNKDASEYLWQSFDYPTDTLLPEMKLGFQPKTGLNRFLTSWRSSDDPSSGDFSYKLEAQRLPEFHLWNKELFRVHRSGPWNGIRFSGIPEDQKLSYMVYNFTENSEEVAYTFRLTNSSIYSRLIVSSEGYIERQTWNPTLGMWNVFWSFPLDSQCESYRMCGPYSYCDVNTSPVCNCIQGFNPSNVEQWDLRSWSGGCIRRTRVSCSGDGFTRMKNMKLPETTMATVDRSIGVKECEKKCLSDCNCTAFANADIRNGGTGCVIWTGRLDDMRNYVADHGQDLYVRLAAADLV

SEQ ID NO: 7282 - protein, 270 aa, Triticum aestivum
RPGSLTVLAEFIGGSFVEGNALAMNYFKSFGYVTCAHAVMFSNDLKLAHYVKIPPRHTFFAQIIATFISTFVCVGVLNFQMTQIDGVCTEDARWKMTCPSVNTFFTASVLWGTVGPSKIFGKNGLYTEVLIGFPLGVVVVLVVWAINKRFPHWTWTRQIHPVAIMYGGIVWAPYNMSYVWPSVPIAYFSWIYLKSRYLVSWSKYNFVLSAAWSCGIAIAGIIIFFSLQLEGTEFKWWGNTVGYTGCEDDACPLQPLDGSDYFGPSSGEFH

SEQ ID NO: 7283 - protein, 141 aa, Zea mays
MILRSAPRRLHLLRPHHLRLLSAAALASAVPVPAPAQSPIEWAEAPLASVRPATADASLFHVSLDLSAHRGLLASHTTLAGPPSCFEFLVKRLPGTPSARLCDLRPGDLVHVGASVVGRGFDVARISDARDVLVFATGSGI

SEQ ID NO: 7284 - protein, 455 aa, Zea mays
MRIEEVQSTSKKQRIATHTHIKGLGLDANGMAIALAAGFVGQSAAREAAGLAVDMIRQKKMAGRAVLLVGPPATGKTALALGIAQELGSKVPFCPMVGSEVYSSEVKKTEVLMENFRRAIGLRIKENKEVYEGEVTELSPEEAESTTGGYAKSISHVIISLKTVKGTKQLKLDSSIYDALIKEKVAVGDVIYIEANSGAVKRVGRCDSFATEYDLEAEEYVPIPKGEVHKKKEIVQDVTLHDLDAANAQPQGGQDILSLMGQMMKPRKTEITEKLRQEINKVVNRYIDEGIAELVPGVLFIDEVHMLDIECFSYLNRALESPLSPIVILATNRGICNVRGTDMTSPHGIPVDLLDRLVIIRTETYGPTEMIQILAIRAQVEDIDMDEESLAYLGEIGQQTSLRHAIQLISPASVVSKTNGREKICKADLEEVSGLYLDAKSSARLLQEQQERYIT

SEQ ID NO: 7285 - protein, 477 aa, Ferroplasma acidarmanus
MERISEGRTLKKGAAGFYSLLGQSIAMISPLGAVAATMTGAAEFAKGSLPLAYIISIFGVLIWINTPYQFSKKINGAGGFYTFNSQGASPTYGLIIGYMMWFSYFMVITNAILFTSGVFIPGTISYFLHFNIGSYTWIPIMTAFIVILTVIAYLGIKPSLAYSFTASVIEIALLVITSVVIIVALGSKNTYVPFTAGPADGFAAVAVGMVLAIFSMSGSSAVVTLGEEAQQPRKNIKKALLISFIITGVVFVLTSYALTVGWGVSKMSTFFTSSVPGLIVSDKYLGLPFTIVLFVFIINSLFAGSLAPLNTSSRMIFSMSRDGLGPSMFSKVHPVHKTPYIAIITMAGVAYVVSLAAGLLIGPEDGFLYLVTASSAALFVGHILSNFGLGVTYKKLKEFKILTHAVIPAIATVILAIAMFYSFVPPAYPVDYSIITAVVFIIISAIAIVIYAIKHPEAIKRAGSTDMEVQNDIYREK

SEQ ID NO: 7286 - protein, 609 aa, Zea mays
MDQLALLATELGDSSDFEVEGIQNLTENDVSDEEIEPEDLARRMWKDRVRLRRIKERQHKLALQQAELQKLRPKPISDQAMRKKMSRAHDGILKYMLKLMQVCNARGFVYGIIPDKGKPVSGASDNIRAWWKEKVKFDKNGPAAIEKYESDNLVSATAQSGGTKSQHSLMDLQDATLGSLLSSLMQHCDPPQRKYPLEKGASPPWWPSGKEEWWTALGLPSGQVPPYKKPHDLKKVWKAGVLTGVIKHMSPNFDKIRNHVRKSKCLQDKMTAKESLIWLGVLQREESLVHRIDNGVSEITQRSMPEERIADTNSSSNEYDVYGFEDAPVSTSSKDDEQDLSPVAQSAVEHVPKRGRERAYNKRPNQIVPGKAKEPPKRKRTRHSSTVTEPDAHRVVDAPENSRNLIPDMNRLDQVEIPGTSNQIVTFDHGGTTTEALQHRGDAQVQVHPPGAEVNSFYSAPTANPTPISIYMGDQPIPYQNNDSTRPRSENSFPVDAHTGLNNLPSSYQNLPPKQSLPLPMMDHHVVPMGIRAPTDSIPYGDHILGGGNSTSVPGDMQQLIDFPFYAEQDKFVGSSFEGLPLDYISISSPIPDIDDLLHDDDLMEYLGT

SEQ ID NO: 7287 - protein, 394 aa, Zea mays subsp. mays
LGAARRARLPPGEMGWPLVGGMWAFLRAFKSGKPDAFIASFVRRFGRTGVYRSFMFSSPTVLVTTAEGCKQVLMDDDAFVTGWPKATVALVGPRSFVAMPYDEHRRIRKLTAAPINGFDALTGYLPFIDRTVTSSLRAWADHGGSVEFLTELRRMTFKIIVQIFLGGADQATTRALERSYTELNYGMRAMAINLPGFAYRGALRARRRLVAVLQGVLDERCSARAKGVSGGGVDMMDRLIEAQDERGRRLDDDEIIDVLVMYLNAGHESSGHITMWATVFLQENPDMFARAKAEQEAIMRSIPSSQQGLTLRDFRKMEYLSQVIDETLRLVNISFVSFRQATRDVFVNGYLIPKGWKVQLWYRSVHMDPQVYPDPTKFDPSRWEGHSPRAGTFL

SEQ ID NO: 7288 - protein, 321 aa, Pseudomonas putida KT2440
MKYLVVGGAGYIGSHMVKHLLAAGHEVLVADLVSPGPGIQWAKLDIADEAALDVLFGVCRFDAVFHFASFIQVGESVSAPGKYYQNNVAATLSLLQAMVNAGIRHLVFSSSAAVYGNPQYVPIDEAHTKGPINPYGLSKWMVEQILEDFDRAYGLKSVSLRYFNAAGADPEGQLGERHEPETHLIPLILQAASGRREAVTVFGRDYDTPDGTCIRDYVHVADLAAAHALAVDYLLDGGERAAFNLGNGLGFSVQQVIDTARAVTGRQITALDAQRRAGDPPRLVADASKAMQVLGWRPAFASLEQIVRHAWQWELQYPWRR

SEQ ID NO: 7289 - protein, 267 aa, Glycine max
NQQPGLNIITEYIIGYMYPERPVANMCFKVYGYISMVQALTFLQDFKLGHYMKIPPRTMFMAQVVGTILSVFIYTVTAWWLMRTIPHLCDTTMLDPDSPWTCPMDNVFFDASVIWGLLGPRRIFGDLGEYAKVNLFFLGGAIAPFLVWLAHKAFPEQRWITLIHMPVLLGATSMMPPATAVNFTSWILVGFLSGYIAYRYRQEWWKRCNYVLSGGLDAGTAFMTILLFLALNNNNIMLNWWGNNPEGCPLANCPTEKGIVVKGCPVH

SEQ ID NO: 7290 - protein, 143 aa, Triticum aestivum
MAMAYKMATEGMNIKEECKRWFTEMKWKKVHRFVVYKIDERTRAVLVDKVGGPGEGYEELVAALPGDDCRYAVFDFDFVSVDNCQKSKIFFIAWSPAASRIRAKILYATSKQGLRRVLEGVHYEVQATERSEMGFDVIRERAQ

SEQ ID NO: 7291 - protein, 876 aa, Saccharomycopsis fibuligera
MLMIVQLLVFALGLAVAVPIQNYTQSPSQRDESSQWVSPHYYPTPQGGRLQDVWQEAYARAKAIVGQMTIVEKVNLTTGTGWQLDPCVGNTGSVPRFGIPNLCLQDGPLGVRFADFVTGYPSGLATGATFNKDLFLQRGQALGHEFNSKGVHIALGPAVGPLGVKARGGRNFEAFGSDPYLQGTAAAATIKGLQENNVMACVKHFIGNEQEKYRQPDDINPATNQTTKEAISANIPDRAMHALYLWPFADSVRAGVGSVMCSYNRVNNTYACENSYMMNHLLKEELGFQGFVVSDWGAQLSGVYSAISGLDMSMPGEVYGGWNTGTSFWGQNLTKAIYNETVPIERLDDMATRILAALYATNSFPTEDHLPNFSSWTTKEYGNKYADNTTEIVKVNYNVDPSNDYFTEDTALKVAEESIVLLKNENNTLPISPEKAKRLLLSGIAAGPDPIGYQCEDQSCTNGALFQGWGSGSVGSPKYQVTPFEEISYLARKNKMQFDYIRESYDLAQVTKVASDAHLSIVVVSAASGEGYITVDGNQGDRKNLTLWNNGDKLIETVAENCANTVVVVTSTGQINFEGFADHPNVTAIVWAGPLGDRSGTAIANILFGKANPSGHLPFTIAKTDDDYIPIETYSPSSGEPEDNHLVENDLLVDYRYFEEKNIEPRYAFGYGLSYNEYEVSNAKVSAAKKVDEELPEPATYLSEFSYQNAKDSKNPSDAFAPADLNRVNEYLYPYLDSNVTLKDGNYEYPDGYSTEQRTTPNQPGGGLGGNDALWEVAYNSTDKFVPQGNSTDKFVPQLYLKHPEDGKFETPIQLRGFEKVELSPGEKKTVDLRLLRRDLSVWDTTRQSWIVESGTYEALIGVAVNDIKTSVLFTI

SEQ ID NO: 7292 - protein, 222 aa, Zea mays
  unsure (1)..(222): unsure at all Xaa locations
MASLDAVRGDLALLILYLNKAEARDKICRAIQYGSKFISNGEPGPAQNVDKSTSLARKVFRLCKFVNDLHALISPPAKGTPLPLILLGKSKNAMLSTFLFLDQIVWAXRTGIYKNKERAEFLGRIAFYCFLGSXTCTXIIELAELLHAPKAMNKLEDERKHXEMYRDEQWAMKLHPGNEXAVGLLQRAPKKVTPRVXGGFGFASPLIGWYKRVPSPPAKKSK

SEQ ID NO: 7293 - protein, 363 aa, Cuervea kappleriana
SQKLAVRAISQLQSLPGGDIKLLCDTAVESVRNLTGYDRVMVYKFHEDEHGEVVAESRRPDLEPYIGLHYPATDIPQASRFLFKQNRVRIIVDCHASPVSVIQDDGLMQPLCLVGSTLRAPHGCHAQYMENMGSIASLAMAVIINGNDEDGIGGRNATRLWGLVVCHHTSARCIPFPLRYACEFLMQAFGLQLNMELQLAAQLLEKHVLKTQTLLCDMLLRESPTGIVTQSPSIMDLVKCDGAALYYQANYYPLGVTPTEAQIRDIVEWLLAFHGDSTGLSTDSLADAGYPGATLLGDAVCGMAVAYITNRDFLFWFRSHTAKEIKWGGAKHHPEDKDDGQRMHPRSSFKAFLEVVKSRSLPG

SEQ ID NO: 7294 - protein, 345 aa, Saccharomyces cerevisiae
MEGVYFNIDNGFIEGVVRGYRNGLLSNNQYINLTQCDTLEDLKLQLSSTDYGNFLSSVSSESLTTSLIQEYASSKLYHEFNYIRDQSSGSTRKFMDYITYGYMIDNVALMITGTIHDRDKGEILQRCHPLGWFDTLPTLSVATDLESLYETVLVDTPLAPYFKNCFDTAEELDDMNIEIIRNKLYKAYLEDFYNFVTEEIPEPAKECMQTLLGFEADRRSINIALNSLQSSDIDPDLKSDLLPNIGKLYPLATFHLAQAQDFEGVRAALANVYEYRGFLETGNLEDHFYQLEMELCRDAFTQQFAISTVWAWMKSKEQEVRNITWIAECIAQNQRERINNYISVY

SEQ ID NO: 7295 - protein, 402 aa, Schizosaccharomyces pombe
MNSNNKRVALQEISNYVSKSLNVKGWVNAQVREISLQNGCSPSDKHFPSQSWHGISSIEESQIQKDYDSFLASPLEEEIVFTEKQLLVDLDVCSISNVQSPNCSVSEFGIAIEESNDNCAEEDEEEELQMRYSADESVSVEYAKEILSHMEKLEIRFMPDYRHMSAQPYYVTEMRASVINWIVGVHTCINLLPESLFLSINVLDRFLSLQNVPASKMKLCGATALFIACKYEEIHPPTVKDLEIVLEGEWIGEDICGMEKYMLMVLQYQLGWPGPVSFLRLLTIVNKWESQLRIMIKYFLEVSLVEQRFSSLRASQLVATCAYTGQSILQEENWSNTLPQITGYDYMSLVSYVHLLLKCLENPFDHHYAIYSKYATPYFHGISRQVHDWIATNTNLMAMDGS

SEQ ID NO: 7296 - protein, 164 aa, Zea mays
MMMACALAVAQPAASLAPPSGKRTLSGGRPPRLPPPRLSGKLAFATPCCVRGAGKLIRSRAAVAKAAQDGSESSGSIVKYVTSSFSTAEDIFALAGIGFAAVAALWASVNLIEIIDKLPVLPLLFELVGILVAWLFIYNNLLFKPKRKEFLENIKSSGSRILGQ

SEQ ID NO: 7297 - protein, 109 aa, Glycine max
MDMDVSFRSAIVNGDTLKMFVGQRVRTVLKVQHTQGGILVGQSTDGHQLTIRGASEGRESHYLEVVGIADNDQSISAESCKDFGDDFDADAFNGLCKLVVNVKVKEVFL

SEQ ID NO: 7298 - protein, 213 aa, Zea mays
MTTNVPTTNKMFRLAALSAVTNENKAGNADVEYIDSENLVDLPDVDAALCTLVKRLDSKDWVMTCEALNNVRQLAMYHKERLQELLEPLVPLIVKSVKNPRSAVCKTALMTCADIFKVYGDLLVESIDPLLVQLFLKASQDKRFVCEAAEAALTSMTSWISPLLLLPRMQPYLKNRNPRVRAKASVCLSKSVPCLVSELSCLKILYSCSFCKP

SEQ ID NO: 7299 - protein, 365 aa, Buchnera aphidicola (Uroleucon ambrosiae)
  unsure (1)..(365): unsure at all Xaa locations
MKTKYRISVLPGDGIGPEVMREAYKILNILKNHFSLPLEIKEFNIGGAAIDQEGVALPKKTLLGCENSDAILFGSVGGKKWDHLPIDKRPERASLLPLRKHFNLFANLRPAQLYSELKYLSPLRSDIXIKNGFNILCIRELTGGIYFGKPTGRXLKKNNIEYAFDTEIYYDYEINRIAHLAFQLAQTRNYKVCSIDKSNVLNSSVLWRETVQKVSKNYPDVHLSHLYIDNATMQIIKDPNQFDILLCSNLFGDIVSDECAIITGSIGMLPSASLNEKKFGLYEPAGGSAPDIEGKNIANPIAQILSVSMLVRYGMNLKKIADKIDQSVISVLKKGYRTADISNNNNYLKTNEMGDVIANTLISGE

SEQ ID NO: 7300 - protein, 289 aa, Fusobacterium nucleatum subsp. nucleatum ATCC 25586
MSMTQINWYPGHMKKTKDLIEENLKLIDVVLEIVDARIPLSSKNPNIASLSKNKKRIIVLNKSDLVSKQELDKWKKYFKEQDFADEVVEMSAETGYNVKKLYEAIEFVSKERKEKLLKKGLKKVSTRIIVLGIPNVGKSRLINRIVGKNSAAVGNKPGFTRGKQWVRIKEGIELLDTPGILWPKFESKTVGINLAITGAIRDEILPLEDVACSLLRKMLEQGRWESLKERYKLLEEDRDDKVLENILSKIALRMAMLNKGGELNVLQAAYTLLRDYRVAKLGKFGLDEI

SEQ ID NO: 7301 - protein, 173 aa, Oryza sativa; identical to SEQ ID NO: 6396

SEQ ID NO: 7302 - protein, 536 aa, Zea mays
MASPAIPFAPLTSHRAAPFVLGCPPPWPPPPPPAARPRPPPPRPDAAAAARLLEEEAGAGSSRARSPGGPELESMVLDLNAESPTPGSASAASSSSVVVGGGFFRFDLLGGTPDEEGCSPSPPIVTRQLFPLPYPDAAGSTAASTASNGSPPPEVAVAWARRPADLGAPALAQGKVVSAPSSPAVVSPAAGKKSRRGPRSRSSQYRGVTFYRRTGRWESHIWDCGKQVYLGGFDTAHAAARAYDRAAIKFRGLDADINFQLKDYEDDLKQMRNWTKEEFVHILRRQSTGFARGSSKYRGVTLHKCGRWEARMGQLLGKKYIYLGLFDSEIEAARAYDRAAIRFNGPDAVTNFDSVSYDGDVPLPPAVEKDVVDGDILDLNLRISQPNVHDLRSDGTLTGFGLSCNSPEASSSIVSQPMGPQWPVHPHSRSMRPQHPHLYASPCPGFFVNLREAPMQEEENRSEPACPQPFPSWSWAWQTQGSRAPVLPATTAASSGFSTAAATGVDAATAGHSVPPPSGSLRQFSGYHQLRFPPTA

SEQ ID NO: 7303 - protein, 624 aa, Oryza sativa (japonica cultivar-group)
MTKISCFSALLAGKRKLSKVTSKIGYGKKSGGNEFQKVKPVEFMEGTDTVDIVKGGGDIVLACDTKVVAFNAAELACEGRDKDDDMVSVKRDTSDVDLVAGGDADSSGYNSDAADKDASSAAAAPDASEPGVGLMVPAMASRLERSCSNIETARRGSKAFELPAKSLSYGDLMALPAGGSATATPVGAPDDSPAASVKTTCSADHVMLKKCSSSQVLPSRSRKLWWRLLLRSHRNLHRPAATVPAAVPSAEQRHDGYASDTLDAGAATADVKNKGIAVGHEPIPNQWMAFSSEATSLDRVSAWVNSLVDNPFKANEECIVEHDDDDDDTARPHCTEIGEPSSFGGKFPAQARRRMAGEAIKANSIIQTLTTSSSVAHISGMGLTVIPVISPFSSLRAVNLSGNLIVQISSGSLPKGLHSLDLSRNKISVIEGLRELTRLRVLNLSYNKISRIGHGLSNCGAIRELYLAGNKISDVEGLHRLLKLAVVDLSFNKITTTKALGQLVANYSSLRALNLVGNPVQTNIGDDALRKSASGLLSRLEYLNKQPVRPQRAREAAKDSVAKAALGNGGWSSRRRPTPSSRRLSQSPGSSVKNRGRDNGSGSHRGSRSRSKSRPHQGFSLARK

SEQ ID NO: 7304 - protein, 392 aa, Spachea correae
DLEPVNPADVPVSAAGALKSYKLAARAISRLQSLPSGNISLLCDVLVKEVRDLTGYDRVMVYKFHEDEHGEVVSECRRPDLEAYLGLHYPATDIPQASRFLFMKNKVRMICDCLAPPVKVIQDEKLPQSLSLCGSTLRSPHGCHAQYMANMGSIASLVMSVTVNEDDDMVDGDQQRMARKLWGLVVCHHTSPRFVPFPLRYACEFLIQVFGVQINKEVELAAQGREKHIMQTQTLLCDMLLRDAPVAIVTQSPNVMDLVKCDGAALYYRKKFWLLGVTPTEAQIRDIAEWLLEYHSGNTGLSTDSLMEAGYPGTSVLGNAVCGMAAVKITSRDFLFWFRSHTAKEIKWGGAKHDPDDKDDIRKMHPRSSFKAFLEVVKWRSLPWEDMEMDAI

SEQ ID NO: 7305 - protein, 321 aa, Escherichia coli K12
MGKAVIAIHGGAGAISRAQMSLQQELRYIEALSAIVETGQKMLEAGESALDVVTEAVRLLEECPLFNAGIGAVFTRDETHELDACVMDGNTLKAGAVAGVSHLRNPVLAARLVMEQSPHVMMIGEGAENFAFARGMERVSPEIFSTSLRYEQLLAARKEGATVLDHSGAPLDEKQKMGTVGAVALDLDGNLAAATSTGGMTNKLPGRVGDSPLVGAGCYANNASVAVSCTGTGEVFIRALAAYDIAALMDYGGLSLAEACERVVMEKLPALGGSGGLIAIDHEGNVALPFNTEGMYRAWGYAGDTPTTGIYREKGDTVATQ

SEQ ID NO: 7306 - protein, 157 aa, Oryza sativa (japonica cultivar-group)
MAADKKEVADDTILLISSDGEHFNVPSAAASLSQLVSNMIENDCTTNGVPLPNVASKVLAKVIEYCVKHAAAAEDEEKELKSFDAEFMIDVDKNMLYGLLLASNFLNIKSLLDLCCQHTANLIKGKSPEQIRKEFGIKNDFTPEEEEIRKENTWAFE

SEQ ID NO: 7307 - protein, 505 aa, Candida maltosa
MAIFTPELWLICFAVTVYIFDYIYTKYLMYKLGAKPITHVIDDGFFGFRLPFLITLANNQGRLIEFSVKRFLSSPHQTFMNRAFGIPIILTRDPVNIKAMLAVQFDEFSLGLRYNQFEPLLGNGIFTSDGEPWKHSRIMLRPQFIKSQVSHVNRLEPHFNLLQKNITAQTDNYFDIQTLFFRFTLDTATEFLFGQSVHSLNDGENSLQFLEAFTKSQAILATRANLHELYFLADGIKFRQYNKMVQDFSQRCVDKVLNMSNSEIDKLDRYFFLYEMVKITRNPQVLRDQCLNILLAGRDTTASLLSFAFFELALNEPIWIKLRTEVLHVFQTSLELITFDLLKTKCPYLQAILHETLRLYPSVPRNARFSKKNTTLPHGGGVDGMSPILIKKGQPVAYFICATHVDEKFYTKDALIFRPERWCEEPLIKKNLAWSYLPFNGGPRICLGQQFALTEASYVLTRLAQCYTKISLQPNSFEYPPKKQVHLTMSLLDGVHVKISNLSIS

SEQ ID NO: 7308 - protein, 225 aa, Zea mays
MASAAGGGAAGEGEWLKVSQLRPMVEAQDPNAKAVDNLTLRRFLRARDHDVDKASAMFLKFLKWRREAAPGGSVPEEQVRRELSQDKLCMGGVDRAGRPILVAFAARHFSAGRDMAEFKTALNCAGFVVYFFDKICARIPRGQEKFLCIVDLKGWGYSNCDVRAYIAAIEILQYFYRLTRYIQRRRLLPRLLNKSPVMMTLATRPLNLMSCKKWFEDGQAREQQR

SEQ ID NO: 7309 - protein, 371 aa, Azotobacter vinelandii
MTIKSRAAVAFGPNQPLQVVEVDVAPPKKGEVLVRIVATGVCHTDAYTLSGQDSEGVFPCILGHEGGGIVEAVGEGVTSLQVGDHVIPLYTAECRECKFCKSGKTNLCQAVRATQGKGLMPDGTTRFSYQGQPLYHYMGCSTFSEYTVLPEISLAKIPEDAPLEKVCLLGCGVTTGIGAVLNTAKVTEGSSVAIFGLGGIGLAAIIGAKMAKASRIIAIDINPAKFEVAGQLGATDFVNPKDHDKPIQEVIVEMTDGGVDYSFECVGNVQLMRAALECCHKGWGESTIIGVAGAGQEISTRPFQLVTGRVWRGSAFGGVRGRTELPSYVEKAQKGEIPLDTFITHNLPLERINEAFDLMHEGKSIRTVIHF

SEQ ID NO: 7310 - protein, 392 aa, Gallardoa fischeri
DLEPVNPADVPVTAAGALKSYKLAAKAISRLQSLPSGNISLLCDVLVKEVRDLTGYDRVMVYKFHEDEHGEVVSECRRSDLESYLGLHYPATDIPQASRFLFMKNKVRMICDCLAPPVKVIQDEQLPQPLSLCGSTLRSPHGCHAQYMTNMGTIASLGMSVTVNEDDDMMDGDQHQMTRKLWGLVVCHHTSPRFVPFPLRYACEFLIQVCGVQINKEVELAAQVRKKHILQIQTMLCDMLLRDAPVAIITQSPNVMDLVKCDGAALYFKNKIWLLGVTPTEEQIRDIAEWLLKYHSGNTGLSTDSLMEAGYPGASALGDAVCGMAAVSITSRDLLFWFRSHTAKEIKWGGAKHDPDDKDDLRKMHPRSSFKAFLEVVKWRSKPWKDVEMDAI

SEQ ID NO: 7311 - protein, 432 aa, Glycine max
  unsure (1)..(432): unsure at all Xaa locations
MAQILAPSTQWQMRISKSSPNATPITSNMWSSLLWKQNKKVSPTSSAKFRVLAIKSDNSTINRLEGLLNLDITPFTDKIIAEYIWIGGTGIDVRSKSRTISKPVEDPSELPKWNYDGSSTGQAPGDDSEVILYPQAIFKDPFRGGNNILVICDSYTPQGEPIPTNKRHRAAEIFSNPKVQAEVPWYGIEQEYTLLQTNVKWPLGWPVGGYPGPQGPYYCSAGADKSFGRDISDAHYKACLYAGINISGTNGEVMPGQWEYQVGPSVGIEAGDHIWASRYILERITEQAGVVLSLDPKPIEGDWNGAGCHTNYSTKSMDXMRRWKILSLCFLIFNIMPILFGXRYGEGKERRLIGKQDTASNNTFSWGVANRGCSIRVGRDTEKNGKGYLEDRRPASNMDPYVVTSLLAETTLLWEPTLEAEALAAQKLALKV

SEQ ID NO: 7312 - protein, 353 aa, Oryza sativa; identical to SEQ ID NO: 5698

SEQ ID NO: 7313 - protein, 90 aa, Glycine max
  unsure (1)..(90): unsure at all Xaa locations
WFCLQEEYDTHDPKGPSSMVLQFLRKRSKIIEIVAARDIVFALAQSGVCAAFSRENNQRICFLNVSADEVIRSLFYNKNNDSLITXSVYA

SEQ ID NO: 7314 - protein, 143 aa, Glycine max
MAMAFKMATTGMWVTDECKNSFMEMKWKKVHRYIVFKIDEKSRLVTVDKVGGPGESYGDLAASLPDDDCRYAVFDFDFVTVDNCRKSKIFFIAWSPTASRIRAKMLYATSKDGLRRALDGISYEVQATDPTEMGFDVIQDRAK

SEQ ID NO: 7315 - protein, 203 aa, Escherichia coli K12
MERTLTTVSYYAFEGLIPVVHPTAFVHPSAVLIGDVIVGAGVYIGPLASLRGDYGRLIVQAGANIQDGCIMHGYCDTDTIVGENGHIGHGAILHGCLIGRDALVGMNSVIMDGAVIGEESIVAAMSFVKAGFRGEKRQLLMGTPARAVRNVSDDELHWKRLNTKEYQDLVGRCHVSLHETQPLRQMEENRPRLQGTTDVTPKR

SEQ ID NO: 7316 - protein, 318 aa, Nostoc sp. PCC 7120
MKSQVQPKLIIHGGAGSSLHGKGGLEAVRQTLHAVVEEVYALLLSGVNASVAVVRGCQLLEDEPRFNAGTGSVLQSDGQIRMSASIMDGALGRFSGVINVSRVKNPIELAQFLQNSPDRVLSDYGSAELAREMQIPSYNALTELRLQEWIQERQDNFKRTMAGVIAEPELLETSNAGRGTIGVVALDTYGKLAVGTSTGGKGFERIGRVSDSAMPAGNYATSYAAVSCTGIGEDIIDECLAPKIVIRVTDGLSLQDSMQRSFAEAHDNKRDFGAIALDANGAIAWGKTCDIILAAFHDGEKIGDTLELAVGTQVGSIS

SEQ ID NO: 7317 - protein, 262 aa, Hordeum vulgare subsp. spontaneum
SAESNMCDLLRINTDRGVMIGDGKSRFSIGGKPIYHFVGTSTFSEYTVMHVGCVAKINPEAPLDKVCVLSCGISTGLGASINVAKPPKGSTVAIFGLGAVGLAAAEGARIAGASRIIGVDLNASRFEEARKFGCTEFVNPKDHTKPVQQVLADMTNGGVDRSVECTGNVNAMIQAFECVHDGWGVAVLVGVPHKDAEFKTHPMNFLNERTLKRTFFGNFKPRTDLPNVVEMYMKKELEVEKFITHSVPFSEINKAFDLMAKG

SEQ ID NO: 7318 - protein, 233 aa, Triticum aestivum; identical to SEQ ID NO: 6395

SEQ ID NO: 7319 - protein, 320 aa, Arabidopsis thaliana
MRDLVSCFSENSINVTHPLSISSSSSSCSKYSTNNVCISPSLIPSIQTSITSIYRITLSKHLIIKVTWCNPHNNNGLSISVASADQNPSTTLKLNTSSRFFRKKKGNKSVDSDLGKIEVFWDLSSAKYDSNLCGPEPINGFYVIVLVDGQMGLLLGDSSEETLRKKGFSGDIGFDFSLVSRQEHFTGNNTFYSTKVRFVETGDSHEIVIRCNKETEGLKQSNHYPVLSVCIDKKTVIKVKRLQWNFRGNQTIFLDGLLVDLMWDVHDWFFSNQGACGRAVFMFRTRNGLDSSRLWLEEKIVKKDQQDKLDFSLFIYACKT

SEQ ID NO: 7320 - protein, 341 aa, Oryza sativa (indica cultivar-group)
MDHRELWPYGLRVLVIDDDCSYLSVMEDLLLKCSYKVTTYKNVREAVPFILDNPQIVDLVISDAFFPTEDGLLILQEVTSKFGIPTVIMASSGDTNTVMKYVANGAFDFLLKPVRIEELSNIWQHIFRKQMQDHKNNNMVGNLEKPGHPPSILAMARATPATTRSTATEASLAPLENEVRDDMVNYNGEITDIRDLGKSRLTWTTQLHRQFIAAVNHLGEDKAVPKKILGIMKVKHLTREQVASHLQKYRMQLKKSIPTTSKHGATLSSTALDKTQDHPSRSQYFNQDGCMEIMDYSLPRDDLSSGSECMLEELNDYSSEGFQDFRWDSDKQEYGPCFWNF

SEQ ID NO: 7321 - protein, 390 aa, Oryza sativa (japonica cultivar-group)
MAAAVRRLLRRGLSTATAPPPTPGSILNPSSPSTPLTSRQKSRLAISLLKSTPPPPPDQILSICRAAALSPDSHLDRVALSLAASKLSSAPDSVRDLASSLLTPHHAPHAIALFGQAGLLPDAVSTFKSSPSTRSLNALLFACLVSGNHAEAARVFQTFPDAYSVKPNTDTFNAIIKSFAESGTTRSFYSVLDEMCQKGVKPNATTFTTAIAGFYKEERFDDVGKVIELMKKHGCGESLPVFNVRVQGLCKLGRSGDAKALLNEMVKKGTKPSWLTYNHLIHGFCKEGDLEEAKRLYKEMAKKGLVGDSSFYYMLIYYLCKGGDFDTAVGVYNEIAARNWVPCFSTMKMLVNGLAGSSRVDEAKGIIEKMKEKFPDKAEGWKEVEDALPQ

SEQ ID NO: 7322 - protein, 339 aa, Magnetospirillum magnetotacticum
MRVVARGPEDGLSTRAIAVTSEVVGPIEAMAKGRLTVLGQSVSTAGLTTTRRFAAGERVAVSGLRRGDGTIVASLIEPRPAGADRVTGPVRRGRDGSLRIGSLRLVGLEPRLAGQRALVEGEAGKAGLTVASARDVSRPFPAGLARASIEGYVAQGGGSLRLGSGLSVSGRVDPSALPGAGRPAIIETGIGRGGRMTVESVRSEAPGRGGPGSGGQGFGGREPLGSGSEHPGSGPAGRPGPGGEAPFSRPGGRDTGGFGTGQRGPGGSGMPGGYPIDTRPGSGATPGDGFGGAFGGPGGGPGRPGGGRPGGFGGGGPGGFGGGGGPGGFGGGGGGGGPR

SEQ ID NO: 7323 - protein, 314 aa, Brassica napus
MKGVRNIYDHHSYTFLLVFVVMILFHPALSIYINTLSSTESLTISNNRTLVSPGDVFELGFFKTTSSSRWYLGIWYKQLPEKTYVWVANRDNPLPNSIGTLKISNMNLVLLDHSNKSVWSTNLTRRNERTPVMAELLANGNFVMRDSNNNDASEFLWQSFDYPTDTLLPEMKLGYNLKKGLNRFLISWRSSDDPSSGDYSYKLEPRRLPEFYLLQGDVREHRSGPWNGIRFSGILEDQKLSYMEYNFTETSEEVAYTFRMTNNSFYSRLTLSSTGYFERLTWAPSSVIWNVFWSSPANPQCDMCRCVGLTLTVT

SEQ ID NO: 7324 - protein, 408 aa, Buchnera aphidicola str. APS (Acyrthosiphon pisum)
MISKKTLITRDNFDKLILPIYNPIPFIPIKGKGSRIWDQKGKEYIDFSGGIAVTSLGHCHPILNKTLKNQSKMLWHLSNIFTNEPALRLAKKLLSSSFASRIFFANSGAEANEAAFKLARYYSSKIYNFKKNKIISFYNSFHGRTFFTVSVGGQSKYSNNFGPKPAGIVHASFNDINSVKNLIDHDTCAVVVELIQGEGGVIPANLTFVQALKELCKQYNVLLIFDEIQTGIGRTGKLFYYEYYAITPDILTIAKSLGGGFPISAMLTTNEVASVIAPGIHGTTYGGNPLACAVAESVIDIINTKKVLSGVEKKSKKIISELNIINKRFKLFTEIRGRGLLIGIVLKPNVSRNIHKILNFSLSEGVIFLTAGNNVIRLAPSLIIKELDIIEGMKRFYRALEKYLSRKE

SEQ ID NO: 7325 - protein, 337 aa, Zea mays
MAPWAIAIHGGAGVDPNLPEHRQEEAKRVLARCLQVGVDLLRAGAQALDVVEAVVRELETDPFFNSGRGSALTRAGTVEMEASIMDGRGRRCGAVSGVSTVKNPVSLARRVMDNSPHSYLAFDGAEEFARAQGLETVDNSYFITDDNVGMLKLAKEAGSILFDYRIPLAGTDTCSALAGAADSNGGGVHKAGMVMNGLPISVYAPETVGCAVVDASGACAAATSTGGLMNKMAGRIGDSPLIGSGTYACGACAVSCTGEGEAIIRCTLARDVAAVMEYKGLPLQQAVDYCVKERLDQGFAGLIAVSGTGEVAYGFNCTGMFRGCATEDGFMEVGIWE

SEQ ID NO: 7326 - protein, 142 aa, Triticum aestivum; identical to SEQ ID NO: 5500

SEQ ID NO: 7327 - protein, 623 aa, Neurospora crassa
MAPQTKDEVSDDNEFVGFDEESDEEMHDNDGMSVDDDDEDDSDMDSIADPRKKYDIEEKDSDEEDLERFVLGNNDTFRAQLFRDDFLADITDSKALIRTDKQDDTTGLEHVDDNALFAFDTGVPGNKKQTEAAPSALEAYEQKEDPPAWEDSDDERLTVSLAAASRLRKLRQSEEEDVVNGTEYARRLRSQYLRLYPLPEWAKESSAASQRRRRRSSAAGSSSEEDSDAEDDIESALPLETFLRDVNSFNASADARGSKRRKLRPETIDIQRSRDIPDIHKQSVSSLSFHPKHPILLSCSVSSIMYLHQVDPTAHPVPNPALTSVQVKRTDLRRSEFLGPDGDDVIFAGRRRYFHSWNLSSGAVKKITQIQGHQREQRTMEHFRPSPCGRYLGLIASEKKGGGMINIVNVRTMQWIAQARTNGRGGISDFAWWGNGNGLSILGKNGQVTEWSMLSRRTVGVWRDEGSIGGTVIALGGQKGTGPSQIGGDRWVAVGSNSGIMNIYDRNDLVEPVKKEGGASASKEETVQIKSIPTPQRTFEQLTTPISVVTFAPDGQLLAFGSFHKKDALRLVHLPSCTVYRNWPTEQTPLGRITAVAFSHQNGGDVLAVGNDVGKIRMWEIRS

SEQ ID NO: 7328 - protein, 501 aa, Matricaria chamomilla
MATSNSMITILIFLTYVSYSISTKTLPSEFSILEGQENDILSSAKVSDLFGKWKELHGKTYQHEEEENLRLENFKKSVKFVMEKNSERKSELDHTVGLNKFADLSNEEFKEMYMSKVKGSRSNELKMGGVKRNMSVSSRTCDAPTSLDWRDKGVVTPMKDQGQCGSCWAFSVSGSIESANAIATGDLIRLSEQELVDCDTYDYGCDGGNMDTAYRWIIKNGGLDSEDDYPYTSSNGRDGKCDKTKSAKSVVSLDSYVEVESNEDAVLCAVATTPVTIGIVGSAYDFQLYTGGVYNGQCSSKPYDIDHAVLIVGYGSQDGKDYWIVKNSWGTYWGLEGYILMERNTDIKNGVCGMYLEPVYPITAAPTPPGPPPPPAPPSPPHPPPPPTPPAPSKCGDFHYCAADQTCCCIFEFYNYCLIYGCCGYSDAVCCKNSAACCPSDYPICDVQAGYCYKNSAKTFGVPAKKRQLAKHKMPWEKIEETIKEEFQPLAWNRNPFAAAA

SEQ ID NO: 7329 - protein, 364 aa, Oryza sativa; identical to SEQ ID NO: 4633

SEQ ID NO: 7330 - protein, 348 aa, Pseudomonas sp. TW3
MLAIRKTKAGPGGLSVDDVAAPKEAHSTDVLVKVEAAGICGTDLLIYKWGEFAKRMKLPTILGHEVSGVIEQVGSDVKGLRPGMRVSLESHLPCGTCYTCRRGWAHVCPKTRYPGVDFDGGFASFVVVPESVCWPVPCGIPPLQAAMMEPFGLAVHASLEGSGVSGLNVLVSGCGPIGLMNIAAAKALGASKVIATDIHPLRLTAAAKMGADECINAAEESVYKTVRSLLGERGVDVAIDYSGQAAALKELIQSITHGGELRLMGVPSHDILLNLEEWLFKGLIVRGLHGRRLYETWERSTSLLVTGRVDLSSLVSHRLPLSAAEDAFEMALNGQSLKILFEPNGSCI

SEQ ID NO: 7331 - protein, 125 aa, Glycine max
  unsure (1)..(125): unsure at all Xaa locations
YQPLVWVCLIAMTAPVVTKEGGGEGEEGNKNNKMVTMQFVLPAVYGKAEEAPKPTDERVVIREEGERKYGVVKFGGVASEQVVREKVEKLRESLEKDGFKVVGGXYNPPWTIPAFRTNEVMIPVE

SEQ ID NO: 7332 - protein, 366 aa, Glycine max
MSVQLSSLWVPNSPPIPQHFVPNRGRFSASALSSQSPTIQIIGVGGPSWRENGYGNPNNNNLFDGCQGESDHWSELDTDLYHWTKALRPVQWFPGHIAKAEKELKEQLKLMDVVIEVRDGRIPMSTSHPQMDLWLGNRKRILVLNREDMISTADRNAWADYFTRNGTKVVFSNGQLGMGTMKLGRLAKELAADVNVKRRSKGLLPRAVRAGIVGYPNVGKSSLINRLLKRRMCPAAPRPGVTRELRWVRFGKDLELLDSPGILPMRISDQSAAIKLAICDDIGERSYDVADVAAILVQMLSKLPTVGRDALCKRYKIDVDCRDGRIFIEKLAVRVFNGDVHQAAFRVLADFRKGKFGWTALERPPK

SEQ ID NO: 7333 - protein, 249 aa, Pyrococcus abyssi
MPFEIVFEGAKEFAQLIETASRLIDEAAFKVTEEGISMRAMDPSRVVLIDLNLPASIFSKYEVDGEETIGVNMDHLKKVLKRGKAKETLILRKGEENFLEISLQGTATRTFKLPLIDVEEIEVDLPELPFTAKVVILGDVIKEAVKDASLVSDSMKFIAKENEFTMRAEGETQEVEVKLTLEDEGLLDIEVQEETKSAYGISYLSDMVKGLGKADEVTIKFGNEMPMQMEYYIRDEGRLIFLLAPRVEE

SEQ ID NO: 7334 - protein, 157 aa, Zea mays
MTESLVRNKPGMASIKEMPVVQDGPPPGGFAPVRFARRIPTSGPSATAIFLTTFGAFAYGMYQVGQGNKVRRSPVLATWGWNHACRALKEEKIAARSAILPMLQAEEDERFVKEWKKYLEEEARIMKDVPGWKVGESVYNSGKWMPPATGELRPEVW

SEQ ID NO: 7335 - protein, 245 aa, Methanosarcina mazei Goe1
MFKAAINAELLKDAIASLAVIVDEVRFKIKPEGISVKAVDPANVAMGIFELGSSAFEEYSADECEIGIDLNKITDLLGIADRNDTVRMELDEGSNKLLIDVGGLSYTLSLLDPSTIRAEPRVPQLELPAKVVLNGADLRRAVKAAEKISDHMLMGVSGDTFYMEAKGDTDQVRLEMGRDQLIDLKAGEACSLFSLDYLTDIVKPTNKVNEVTLSLGRDFPILIDFEIANGAGRISYLLAPRIESD

SEQ ID NO: 7336 - protein, 340 aa, Zea mays subsp. parviglumis
MGRAPCCEKVGLKRGRWTKEEDQILANYIAEHGEGSWRSLPKNAGLLRCGKSCRLRWINYLRADVKRGNISKEEEDVIIKLHATLGNRWSLIASHLPGRTDNEIKNYWNSHLSRQIHTYRRKYTAGPDTAPIAIAIDMSKLRSAETRRGGRTPGRSPKSASSSSMTKSKQPDPEPEPESGGASSPRHSDGARSAVVDPDPDPNQPNSSSSGSTGEGEDATGPWLLDPVELGDLWEAESEMDALMSIGGNAHDSATAEGFDAAQAQAQVDDLFDDMDWDNFAAHLWGEPEQQTDHSAQPQPQQAAEPQAAAAAAAAAEAVACDPDEHELEALETWLLSDSF

SEQ ID NO: 7337 - protein, 376 aa, Rhodobacter sphaeroides
MRTRAAVAVEAGKPLEIMEVNLEGPKAGEVMVEIKATGICHTDEFTLSGADPEGMFPAILGHEGAGVVVEVGPGVTSVKPGDHVIPLYTPECRQCPSCLSQKTNLCTAIRGTQGQGLMPDGTSRFSMLDGTPILHYMGCSTFSNYTVLPEIAVAKVRPDAPFDKICYIGCGVTTGIGAVINTAKVEIGAKAVVFGLGGIGLNVIQGLKLAGADMIIGVDLNNAKKEWGERFGMTHFVNPSEIDGDVVAHLVNMTKTPFDQIGGADYTFDCTGNVKVMRQALEACHRGWGQSIVIGVAPAGAEIQTRPFQLVTGRVWKGSAFGGARGRTDVPKIVDWYMEGKIQIDPMITHILSLEEINKGFDLMHAGESIRSVVVF

SEQ ID NO: 7338 - protein, 51 aa, Zea mays
HASAEIWAWSAIFVASFGVACFNPTAFGTTARTCLPFLLAANVLGYMVGSG

SEQ ID NO: 7339 - protein, 688 aa, Zea mays
MKALGAHAADLLRGPHLLRAAIFAFAVALAFFVGYHWPNASPRLVFFSSDASSSSPRPSSRSPSVVLSPNSNVSFDPSLIPIPSTPPASSTPNAWSPPSLPPPTSAPPPPLPPPPPPARLGIVGEDGAMQDDFDIGNVGANDTDLATDETAPQEPRDVGASGGPPRVRIERFPVCPESMREYIPCLDNEDDIKRLPSTERGERFERHCPAKDKGLSCLVPAPNGYKAPIPWPRSRDEVWFSNVPHTRLIDDKGGQNWITKVKDKFRFPGGGTQFIHGANQYLDQISQMVPNVAFGSHTRVVLDVGCGVASFGAYLLSRDVLTLSIAPKDVHENQIQFALERGVPAMAAAFATRRLLYPSQAFDIIHCSRCRINWTRDDGILLLEVNRLLRAGGYFAWAAQPVYKHEEAQQEAWKEMENLTARLCWEFVKKEGYIAMWRKPLNNSCYINRGPEGKPPLCDADDNPDDVWYVGLKACISRLPENGEAPTPVQWPARLMEPPKRLQGVEMDAYSSKNELFKAETKFWDDIIDGYIRIFKWRKFKVRNVMDMRAGFGGFAAALIRQKLDWWVMNVVPISEPNTLPVIFDRGLLGVAHDWCEPFDTYPRTYDLLHASGLFSKEQNRCNISSILLEMDRILRPGGKAYIRDRKEVIQEIKEITNAMGWRGTIRDTAEGAYASRKVLMCDKPMAR

SEQ ID NO: 7340 - protein, 393 aa, Zea mays
MPSASAHLRLLPDQLTSAPFTPHLLLLLRRRLPLLRLAWPWPPPALRSHAAMERYEVIRDIGSGNFGVTKLVRDVRTKELFAVKFIERGQKIDEHVQREIMNHRSLKHPNIIRFKEVVLTPTHLAIVMEYAAGGELFERICSAGRFSEDEARFFFQQLISGVSYCHSMQVCHRDLKLENTLLDGSVAPRLKICDFGYSKSSVLHSQPKSTVGTPAYIAPEVLSRKEYDGKVADVWSCGVTLYVMLVGAYPFEDPDDPKNFRKTITRILSVQYSIPDYVRVTMECGHLLSRIFVGNPEQRITIPEIKKHPWFLKNLPIEMTDEYQQSMQLADMNTPGQSLEEVMAIIQEARKPGDAMNLAGQLPCLGSVDLDDIDFDDIDDIDTENSGDFVCAV

SEQ ID NO: 7341 - protein, 383 aa, Triticum aestivum; identical to SEQ ID NO: 2347

SEQ ID NO: 7342 - protein, 477 aa, Thermoplasma acidophilum
MIIIDLSDVIMAKSLRRNVLNFREVMFQGIAASAPAGAAVATMTGSAAFALGSLPLAAAVAFVIVFLNALIIRRISNHVAGPGGYYDYIKRGFGSGVGSFSGWIYILYQIAALAFISLSIAVFVPALLSYIYGITVPSYLWIPLLIASAGFGYVISFLGIKGSLRYVSVMGSLEIAVVVFIGLFIVFSHPSANTVSVFTLKYDSYGVSGIALGVLFMYTAFSGFGGMTPLGEEAKNAKKMIGNAVLLSSIVLGVFFVFAAYAFTIGWGPANMESYANNLVPGIKLAQVDIGIWAAILITVFYINSILTDNVTFSNSVARITLSMSRDGILPSSLSKVHDTRRTPHLAGLVMVSAAVVMGFLSVEFLGPFGGFLFTGVLSTLAALLVHMIANLSLPAILKKSDQRIGVSNIALPVLVTGILAYVFYGTFISISLPVITASASFGAWVIFSIIYSYLKGRSAKITWSEANEDRMEVPDD

SEQ ID NO: 7343 - protein, 428 aa, Raphanus sativus
NNSYTLSFLLAFFVLILFRLAFSINILSSTESLTISSNRTLVSPGNVFQLGFFRTNSSSRWYLGIWYKKLSERTYVWVANRDNSLPNSIGTLKISNMNLVLLDYSNKPVWSTNLTRGNERSPVVAELLANGNFVMRHSNNNDASEFLWQSFDYPTDTLLPEMKLGYDLKTGLNRFLTSWRSSDDPSSGNFSYKLETRGLPEFYLSSENFPRHRSGPWNGIRFSGIPEDQKLSYMVYNFTENSEEVAYTFRMTNTSIYSRLTVTYLGEFQRLTWNPLIGIWNRFWSSPVDPQCDTYIMCGPYSYCDVNTSPICNCIQGFNPSNVQQWDLRVWAGGCIRRTQLSCSGDGFTRMKNMKLPETTMATVDRSIGVKECEKRCLSNCNCTAFANADIRNGGTGCVIWTGALEDIRTYFAEGQDLYVRLAAADLV

SEQ ID NO: 7344 - protein, 247 aa, Magnetococcus sp. MC-1
MKDRVAMVSGGAGGIGTEIVRSLHAQGYKVASTCTVMECARVQQWKKERELEHVEVVMVEVDVRNYESCLKGVEEVESRLGPIDVLVNNAGITKDGVMKKMSPEQWQSVIDVNLTGTWNMTKAVLDGMLERQYGRIINISSVNGQKGQFGQVNYAAAKAGMHGITMSLAQEVARKGITVNTVSPGYIGTDMVMAIDEEIRNKIIATIPVGRLGKPEEIARLVTFLAAEESGFMTGADFSINGGMYTH

SEQ ID NO: 7345 - protein, 375 aa, Aquifex aeolicus
MKKVKLIGTLDYGKYRYPKNHPLKIPRVSLLLRFKDAMNLIDEKELIKSRPATKEELLLFHTEDYINTLMEAERCQCVPKGAREKYNIGGYENPVSYAMFTGSSLATGSTVQAIEEFLKGNVAFNPAGGMHHAFKSRANGFCYINNPAVGIEYLRKKGFKRILYIDLDAHHCDGVQEAFYDTDQVFVLSLHQSPEYAFPFEKGFLEEIGEGKGKGYNLNIPLPKGLNDNEFLFALEKSLEIVKEVFEPEVYLLQLGTDPLLEDYLSKFNLSNVAFLKAFNIVREVFGEGVYLGGGGYHPYALARAWTLIWCELSGREVPEKLNNKAKELLKSIDFEEFDDEVDRSYMLETLKDPWRGGEVRKEVKDTLEKAKASS

SEQ ID NO: 7346 - protein, 152 aa, Zea mays
MAGMGDMPMRPARPGPPMQHRGPPPMARLRPEPIDREKTCPLLLRVFTRVAGHHQNEEFAVRGKEPKDEVQIYTWKDATLRELTDLVKEVALPARKRNARLSFAFVYPDKNGRFVVRQVGSTFAYGHGRGDDAKTLAELGFQIGDYLSVAIM

SEQ ID NO: 7347 - protein, 463 aa, Bacillus anthracis str. A2012
MANKELKRGLEARHIQMIALGGTIGVGLFMGSASTIKWTGPSVMLAYAIAGIFIFFIMRAMGEMLYMEPSTGSFATFGHKYIHPLAGYMTAWSNWFQWVIVGMSEIIAVGAYMQYWFPDLPAWIPGVIAMVILGAANLISVKSFGEFEFWFAMIKIVTILLMIIAGFGLIFFGIGNGGEAIGISNLWSNGGFFTGGFSGFFFALSLVVGAYQGVELIGITAGEAKDPKKTLTRAIQSTIWRILIFYIGAIFVIVTVYPWDQLSTIGSPFVATFAKVGITAAAGLINFVVITAAMSGCNSGIYSAGRMLYTLGVNGQAPKYFTKLSGNGVPLFGTVGVIIGLAVGVVLSYIAPKNLFVYVYSASVLPGMVPWFVILISQINFRKEKGAEMKDHPFKMPFAPVTNYLTIAFLIMVLVGMWFNDDTRISLVVGIVFLAIVTISFYAFGIGKRPPLDVPNDQEISSK

SEQ ID NO: 7348 - protein, 473 aa, Oryza sativa (japonica cultivar-group)
MAIESWLTKVRSAIISSKPSPSSSSSSSWRSKTVGILALEVATLMSKLVHLWRSLADAALARLRHHLINLDGVRKLVSHHDAALLALACAELTDALRVAAHSVAALATRCADPFLRDFADAFADFADTGRDPHRWVSTWKDMDTRAHKMDKQVAATSALRTAMEDLADAEHGLRKLLQTSSSRRLSATNISLAAEQQQLIFAKKQEVKHLKQTSLWSSTFDAVVSSLARAAFTILARIKLVFGAAHDHRPTTTPLHRSLTLSSAVHPSSVDVQVQPPVSRKSMSMDMGMGEALYLERQRQSGLLERSAAALVPPPGTLGAAALAPRYAWVIISIERMARSPRLVGAEERDELYGMLTASVRAQLRARLSGTVAAAEPGLAGQWRAAVGGILEWLAPMAHATVRWQAERSLEQQRKTTREMETQTLVVQTLQMAERGKVEAAVAELLVGLNYLCRFHKEITTCRTRTCHHDDAP

SEQ ID NO: 7349 - protein, 395 aa, Dichomitus squalens
MAFKWSSILALVTLATLASAAPTQSTVTCSDGTVVPDSVCCEFIPLREALNDQVIQSDCGEDAHELLRLTFHDAIAISQSLGPSAGGGADGSMLLFPTVEPAFFANLGIADSVNNLIPFMSQFPNISPGDLVQFAGAVAITNCPGAPQLEFLAGRPNGTAPAIDGLIPEPQDSIDDILARFDDAGGFTPFEVVSLLASHTVARADHVDPTLDAAPFDSTPFTFDTQIFLEVLLKGTGFPGTDNNTGEVASPIPVTNGTDVGELRLQSDFGLAHDSRTACFWQGFVNQQDFMAQSFKAAMAKLAVLGHNAADLVNCSAVIPTPLPATGKPATFPATLGPDDLELSCTTEPFPSLTTDPGAQETLIPHCSDGSMDCESVQFDGPATNFGGDDDDDDS

SEQ ID NO: 7350 - protein, 354 aa, Oryza sativa
  unsure (1)..(354): unsure at all Xaa locations
ASSLSKSDKKKVLDFAAWSFNITTSVGIIMVNKALMATHGFSFATTLTGLHFVTTTLMTIVFRWLGLSQPSHLPLPDLIKFVIFSNLSIVGMNVSLMWNSVGFYQIAKLCMIPASCLLEVVFDHVHYSRDTKLSIMVVLIGVAVCTVTDVSVNAKGLAAAVIAVWSTALQQYYVHFLQRKYSLNSFNLLGHTAPAQAGSLLLVGPFVDFLLTGKRVDHFGFTSIALFFLTLXXCVIAIGVNLSQFICIGRFSAVSFQVLGHMKTVLVLSLGFLFFGKEGLNFQVVLGMILAVVGMIWYGNASAKPGGKERRSVLPVRSEKPNGALDEKDGSEKXYVTCDLYDNFFCEVFLVMQV

SEQ ID NO: 7351 - protein, 152 aa, Glycine max
  unsure (1)..(152): unsure at all Xaa locations
MGYIGAHGVAALHRYKYSGVDHSYVAKYVLQPFWSRFVNFFPLWMPPYMITLMGFMVLLVSALLGYIYSPQLDTPPPRWVHFAHGLLLFLYHTFDAVDGKQARRTNSSSPLGELFDHGCDALACTFEALAFGSTPMCGRXTFLGWVISANTF

SEQ ID NO: 7352 - protein, 93 aa, Oryza sativa (japonica cultivar-group)
MLEGKAMVEDTDMPVKMQLQAMSAAYKALDRFDVLDCRSIAAHIKKEFDMIHGPGWQCVVGASFGCYFTHSKGSFIYFKLGALRFLVFKGAAS

SEQ ID NO: 7353 - protein, 583 aa, Yarrowia lipolytica
MIPFTKINLELLLLPLLIIPITLFLLVLNVQVNTVHRRYKEYRLKLARCPQQSTGLFGWWLIYAVVRCNRDRFYSAKVVDYFTKLRTFIVSLGGELVIYTSESENIKALLATQFSDYDLGKTRHALLFTLMGDGIFTLDGQGWAHSRALLRPQFSKETVSPLSSLETSLQQLMAIVKRRVALKGEVDIQELFFMLTMDTATNLLYGESVDSLGDCLKETKKETHVMTDGKRNLLQSRDHHSNVPNEWEPIYGTYEKKGLGIGSENSLQSGVSPRDSPVFEVSVSEDIRKAYPAALTTALEFSAMRSKLQRFYWIWGDVLYRQKFHSAVNTVHAFSNHFVNQALKLTPQELQMKSAEKYTFLYELAQRTRDPVAIRDQLINILIAGRDTTAALLSFVFLCLVANPEKLAKLREGIMTDFGTSTDSITFESLKRCVYLRYVINEALRLCPPVPINMRQANKDTTLPTGGGKNHDEPIFVAKNQIVTYSVLFMHHNQNIWGPDASEFRPERWGEPACPKGWEYLPFNGGPRICLGQQYALTEAAYVIVRLVQEFTEIEWRDRKGLPVLFKTHITMSLGEGLRVHMK

SEQ ID NO: 7354 - protein, 189 aa, Nostoc punctiforme
MNLPLETQRLILRDFVESDWLAVHQYASDDEVVRYLTFGPNSEEDTKNFLQREISLQGEEPRQHFALAVTLKTQQQLIGVCHISVTDIDNKTGSIGYCFTKEFWGQGYATEAVKAVVSFGFQELGLHRIFATCHPENIASARVMQKIGMQQEGYLREHHWIKGQWRDSWLYAILEHEWRSLDFRRCWKG

SEQ ID NO: 7355 - protein, 244 aa, Moritella marina
MSFSSKTVLVTGASRGIGRAIAEHFAKLGATVIGTATSAQGAERIGAYLGDAGFGLELNVTSQDSVDALYAEIKTQVGHIDILVNNAGITADNIFLRMKEDEWCNVIDTNLTSLYRLCKPCLRGMMKQRHGRIINIGSVVGTTGNGGQANYAAAKSGLLGFTKSLASEVASRGITVNAVAPGFIETDMTAELTEEQKQTILAQVPTSRLGSTTEIAETVGFLASDGASYITGETIHVNGGMYMA

SEQ ID NO: 7356 - protein, 153 aa, Aspergillus fumigatus
MVKAVAVRGDSKITGTVTFEQADENSPTTVSWNIKGNDPNAKRGFHVHQFGDNTNGCTSAGPHFNPYGKTHGAPEDSERHVGDLGNFETDAEGNAVGSKQDKLIKLIGAESVLGRTLVVHAGTDDLGRGGNEESKKTGNAGARPACGVIGIAA

SEQ ID NO: 7357 - protein, 240 aa, Chloroflexus aurantiacus
MDERIFSIWVYLAQTPLLWLTATIAVYRLMTVISRRLGSSPLLNPVLLSIVTIVSILLLTNTPYATYFDGAQFVHFLLGPATVALAIPLYEAERTLRRIFWPALTGLVVGSATGIAAAVLSGRLFGLSDVTLRSLAPKSITTPIAMGIAEQLGGLPSLTAVIVIVTGMVGALLGWELLGLAGVRDDGERGFALGLASHGLGTARSLQFSSEAGALAGLAMGLNGAMTSLLAPVLTHWLGL

SEQ ID NO: 7358 - protein, 332 aa, Oenococcus oeni MCW
MNVLVTGGAGYIGSHTVDRLLAHGDRVSVVDNLWTGHRQAVPDQAKFYEADVRDKTALKKIFDENDFDAVVHFAALTQVGESMKKPLFYFDNNTFGVISLLEAMRDHNVKKIVFSSSAATYGVPKHNPITEDEIQKPINPYGLTKLQMEQIMAWSDQAYGIKGVALRYFNVAGAKADGSIGEDHNPETHMIPNILMVAQGKKDKMVIFGDDYNTPDGTNVRDYVHVVDLADAHVLALEYLQRENKSNRFNLGTEMGMSNKQLISAAKKVTGIDFKVEIGPRRAGDPDALVASPKKAKEVLGWDPKLSNVEDEIKSAWNWMTKHPNGYDDKEQ

SEQ ID NO: 7359 - protein, 193 aa, Zea mays
MAKDGAGGGPDWNGLLKWSLAHGSDGTNPPRALSEEDRKWFMEAMQANTIDVVGRMKEIAQVMKTPNDVLQSHGVTPENIEDMLDELQEHVESIDMANDLHSIGGLDPLLGYLKNSHAGIRAKAAEVVSTVVQNNPKSQQLVMESNGLEPLLTNFRSDPSTTARTKALGAISSLIRNNQSGLAAFRLGNGHAA

SEQ ID NO: 7360 - protein, 209 aa, Glycine max
MMKTTMNISNANHEKVEKAFAFLTGNHFINHHYGAILSKCLKGLPVRDFDAQEIIPGLYLGDVYAAHNTKELKSRNFTHIVTCTVGVVPPFPDAFKYMHLKILDFAGETIDVHFTSTTDFIGDAIANGGKVLVHCIRGVSRSATIVSAYLMKSMSLSAEDAVEHVRRVRAIARPNYGFMMQLQLYHKELNKGMMNVEISDEQNLPAAEW

SEQ ID NO: 7361 - protein, 473 aa, Arabidopsis thaliana
MVRSNSLPNIADSSSEKSSPFKYSSHHSRSSDDLHALDTRQTDKSVHETDEEVKQEEDQDRDYDMHNSGDNNKENLVEDGYDDSYDYSSLAKDWIVPPTDELKLSKFLEGETTNQQAEFSGKDSKFKRIEDWVNDLQHVNLSEEADEITGYDDELPREPVVLNEQATSSAKVDAIKLTPGMEAAKKYISSLSASATTAQLVSHGLVVIPFLSAFVGLRVLNLSGNAIVRITAGALPRGLHALNLSKNSISVIEGLRELTRLRVLDLSYNRILRLGHGLASCSSLKELYLAGNKISEIEGLHRLLKLTVLDLRFNKFSTTKCLGQLAANYSSLQAISLEGNPAQKNVGDEQLRKYLLGLLPNLVYYNRQGTKDARLGTSTHQLDRGLRSELKNSSRKSSHGASSSHKPGSSTARKAPALQKRSKERRSRLPPVGHKLSPAAYENYHVATGDRLSSLRTELSMRRSRSEGTLGPI

SEQ ID NO: 7362 - protein, 284 aa, Oryza sativa
  unsure (1)..(284): unsure at all Xaa locations
KQIAWWAGERATATRQDMRSVDSFSQVPFXPAGAAAAAAGAGXQSGCSAANSPTTCSCGPRRPVQAPPTRPTAARSRQRAATAATAAPRTAXAATAAAERKFECHYCCRNFPTSQALGGHQNAHKRERQHAKRAHLQASLAMHRYMPGHMYGLFNYHHHIALRPPPAAAAAAATAGALPGAAPGAFAGPGSMAQPINGSPVQAGLWSVPPPTENFGSTAGRQGADKPVAGTPAAGEXXACKDEMVPMSLLSSSPSLSSCSSTSPEMLGRCELGQKEGVSLDLHL

SEQ ID NO: 7363 - protein, 151 aa, Zea mays; identical to SEQ ID NO: 743

SEQ ID NO: 7364 - protein, 176 aa, Zea mays
MNRKPGDWDCRACQHLNFSRRDICQRCSEPRGVADRGSGGGGGGDYASFGGRGGSSFGGGFGAAGSDVRPGDWYCSCGAHNFASRSSCFKCSAYKEEAAVNSGAGGFDGDMSRSRGYGFGSGAAAAAGAGAARTTNRPGWKSGDWICTRSGCNEHNFASRMECFRCNAPRDSGTEV

SEQ ID NO: 7365 - protein, 84 aa, Glycine max
VLFLLPPYEGKPEEEPGARIDRFTAALTPKAIQTLSEDFSARAIKKNVRIHGHHKNAKHMCARVTGDNLGIRERSADLILQNRL

SEQ ID NO: 7366 - protein, 331 aa, Oryza sativa (indica cultivar-group)
MEANLPPGFRFHPRDEELIVDYLYHKLSGGDGGGGAGEFYGGVAMVDVDLNKCEPWELPAYFLHNLIIFPARARARAAGRRRRADAARVGATEWYFFSLHDRKYATGQRTNRATRSGYWKATGKDRAIVTRRRAAGGEAVAGGEVVGMRKTLVFYQGRAPRGSKTEWVMHEFRVDGHAVADHPSSSTSSSSSNLLKEDWVLCRVFYKSRTANPRPVVSGEAAVSLSGELSLPPPPPLPVAPAVIDGYTGGGYYEQDSSAGCHHHHHRPPTSAALPFKDLTDFRDLLSNMVQGGGAAAAAAKSEGFHLGWSEEESSGYVQQSAMASQAWNPF

SEQ ID NO: 7367 - protein, 154 aa, Candida albicans
MVKAVAVVRGDSKVQGTVHFEQESESAPTTISWEIEGNDPNALRGFHIHQFGDNTNGCTSAGPHFNPFGKQHGAPEDDERHVGDLGNISTDGNGVAKGTKQDLLIKLIGKDSILGRTIVVHAGTDDYGKGGFEDSKTTGHAGARPACGVIGLTQ

SEQ ID NO: 7368 - protein, 238 aa, Populus tomentosa
MGRGKIEIEKIENPTNRQVTYSKRRNGIFKKAQELTVLCDAKVSLIMFSNTNKLNEYISPSTSTKKIYDQYQNTLGIDLWGTQYEKMQEHLRKLNDINHKLRKEIRQTRGEGLNDLSIDHLRGLEQHMTEALNGVRGRKFHVIKTQNETYRKKVKNLEERHGNLLMEYEAKLEDLQGGLVDNEAAVALVDGASDNEAAVALADGASNLYAIRLHHGHNHHHPNLHLEDGFGAHELRLP

SEQ ID NO: 7369 - protein, 244 aa, Vibrio harveyi
MNLEGKIALVTGASRGIGRAIAELLVERGATVIGTATSEGGAAAISEYLGENGKGLALNVTDVESIEATLKTINDECGAIDILVNNAGITRDNLLMRMKDDEWNDIINTNLTPIYRMSKAVLRGMMKKRAGRIINVGSVVGTMGNAGQTNYAAAKAGVIGFTKSMAREVASRGVTVNTVAPGFIETDMTKALNDDQRAATLSNVPAGRLGDPREIASAVVFLASPEAAYITGETLHVNGGMYMV

SEQ ID NO: 7370 - protein, 62 aa, Oryza sativa
WFQYEDMRYMYILLISILFCRCMLRGFGFHRCPYWIRPSITVSNHNGVLFTTKKHPRTKELM

SEQ ID NO: 7371 - protein, 482 aa, Schizosaccharomyces pombe
MTTRRLTRQHLLANTLGNNDENHPSNHIARAKSSLHSSENSLVNGKKATVSSTNVPKKRHALDDVSNFHNKEGVPLASKNTNVRHTTASVSTRRALEEKSIIPATDDEPASKKRRQPSVFNSSVPSLPQHLSTKSHSVSTHGVDAFHKDQATIPKKLKKDVDERVVSKDIPKLHRDSVESPESQDWDDLDAEDWADPLMVSEYVVDIFEYLNELEIETMPSPTYMDRQKELAWKMRGILTDWLIEVHSRFRLLPETLFLAVNIIDRFLSLRVCSLNKLQLVGIAALFIASKYEEVMCPSVQNFVYMADGGYDEEEILQAERYILRVLEFNLAYPNPMNFLRRISKADFYDIQTRTVAKYLVEIGLLDHKLLPYPPSQQCAAAMYLAREMLGRGPWNRNLVHYSGYEEYQLISVVKKMINYLQKPVQHEAFFKKYASKKFMKASLFVRDWIKKNSIPLGDDADEDYTFHKQKRIQHDMKHEEW

SEQ ID NO: 7372 - protein, 279 aa, Oryza sativa
  unsure (1)..(279): unsure at all Xaa locations
LFSPLLFCFSSQVSLPHPTAASDARRDQAMDGGGGGGGGGGFGLGGLQWTAEEASTIGGIATVSLLHSFIPTHWLPFSIVARAQRWPLSRTLLVTAFGGVLHVVSTALLGITAVTMANTIAGEETVHKLASLLLIVLGGSYILLFALGKGGHGHAHNHPMEKMAVAGLVLVPALSPCATTLPVFLAVGNSSSMMILAIIVLLFSTITVMTSLVALSFYGASQIKFHWVERYDKILVGSVLCLVGVLTYVFHHHDGDEHSLHEHVHRKLVAVTKKNKNTX

SEQ ID NO: 7373 - protein, 167 aa, Glycine max
MASTFEGGSDSEKENTVESEEEECPVKQVELTVPKTDDPTMQLLTFRMWVLGVLSCVLLSFVNQFFWYRTQPLIVTSISAQIAVGPIGHFMARTLPTRVFFKDSRFEFSLNRGPFNIKEHVLITIFANSGAGTVYATHIVSAVKLMCKRRLNFLAALVVMLTTQILG

SEQ ID NO: 7374 - protein, 214 aa, Paeonia rockii
IVESVGEGVTDVKPGDHVLPIFTGECKECRHCKSEESNMCDLLRINTDRGVMLNDGKSRFSINGQPIFHFVGTSTFSEYTVLHVGCLAKINPEAPLDKVCVLSCGISTGLGATLNVAKPKKGSTVAIFGLGAVGLAAAEGARIAGASRIIGVDLNPKRFDEARKFGVTEFVNPKDYNKPVQEVIAEMTGGGVDRSVECTGSIMAMMSAFECVHD

SEQ ID NO: 7375 - protein, 515 aa, Neurospora crassa
MPNLRTRNPRSLANENDENSTATTTRMTRAKAATLHVDELSMPAKTMQTKKTTISTTTAATAARTVGKRNALGDVSNVTKVEVAGTKKAIAKPGLVSKAAQPSGIQKKTTTATSRTATTARRALSNKEPNKTVGPSAGAGTIPAKRKPPPSTSKLAPIKESAPVENEPARKKIHVEEPEKKKVSRTEAKENDAPSKAVKPMAEPPAPVVRDVVPVQSVYPPGVKDLDTEDLEDPLMVAEYATEIFEYLRDLECKSVPNPQYMSHQDDLEWKTRGILIDWLIEVHTRFHLLPETLFLAVNIIDRFLSEKVVQLDRLQLVGITAMFVASKYEEVLSPHIANFRHVADDGFTEAEILSAERFILSTLNYDLSYPNPMNFLRRISKADNYDIQSRTLGKYLMEISLLDHRFMPYRPSHVAAAAMYLARLILGRGEWDKTIAYYAGYTEEEIEPVFHLMVDYLARPVIHEAFFKKYGSKKFLKASILTRQWAKKNAVLYGVVDAEIPLDKLKDRPVDQLP

SEQ ID NO: 7376 - protein, 174 aa, Caulobacter crescentus CB15
MIRLSAAAALGLAAALAASPALAQTSATAVVKAGDGKDAGAVTVTEAPHGVLLKLELKGLTPGWHAAHFHEKGDCGTPDFKSAGAHVHTAATTVHGLLNPDANDSGDLPNIFAAADGAATAEIYSPLVSLKGAGGRPALLDADGSSIVVHANPDDHKTQPIGGAGARVACGVIK

SEQ ID NO: 7377 - protein, 261 aa, Lolium temulentum
MGRGKVQLKRIENKINRQVTFSKRRNGLLKKAHEISVLCDAEVAVVVFSPKGKLYEYATDSSMDKILERYERYSYAEKALISAESESEGNWCHEYRKLKAKIETIQKCHKHLMGEDLECLNLKELQQLEQQLESSLKHIRSRKSHLMMESISELQKKERSLQEENKALQKELVERQKAARQQQQEQWDRQTQTQQAQNQPQAQTSSSSSSFMMRDQQAHAQQNICYPLVTMGGEAVAAAPGQQGQLRIGGLPPWMLSHLNA

SEQ ID NO: 7378 - protein, 338 aa, Morganella morganii
MIMKALVLEKAGKIAIQDWQSNEVLGDDDVEIKIHTVGICGSDVHYYQHGRIGPFVVDEPMVLGHEASGVITAAGKNVKHLKVGDRVCMEPGIPDLQSPQSRAGIYNLDPAVRFWATPPIDGCLRESVIHPAAFTFKLPDNVSFAQGAMVEPLAIGMQSATKAGIKPGDIGLVIGAGTIGIITQSALAGGCSDVIICDVFDEKLKVAEKYQGLHAVNSKDQQALADKVRELTGGEGVNVLFECSGAKPVIASISDHIAPGGTAVLVGMPIDPAPLDIVAAQAKEVTFKTILRYANMYPRTIRLLSSGKLNVAPLLSATYKFKDSVEAYERAAEPVRLM

SEQ ID NO: 7379 - protein, 362 aa, Arabidopsis korshinskyi
RCKAAVAWEAGKPLVMEEVEVAPPQKHEVRIKILFTSLCHTDVYFWEAKGQTPLFPRIFGHEAGGIVESVGEGVTDLQPGDHVLPIFTGECGDCRHCHSEESNMCDLLRINTERGGMIHDGESRFSINGKPIHHFLGTSTFSEYTVVHSGQVAKINPDAPLDKVCIVSCGLSTGLGATLNVAKPKKGQSVAIFGLGAVGLAAAEGARIAGASRIIGVDLNSKRFDQAKEFGVTEFVNPKDHDKPVQQVIAEMTDGGVDRSVECTGSVQAMIQAFECVHDGWGVAVLVGVPSKDDAFKTHPMNLLNERTLKGTFFGNYKPKTDIPGVVEKYMNKELELEKFITHTVPFSEINKAFDYMLKGES

SEQ ID NO: 7380 - protein, 702 aa, Zea mays
GTRDDNASMMEAFMASADLPTFPWGAPAGGGNSSAAAASPPPQMPAAMAPGFNQDTLQQRLQAMIEGSRETWTYAIFWQSSLDSATGASLLGWGDGYYKGCDEDKRKQKPLTPSAQAEQEHRKRVLRELNSLISGAAAAPDEAVEEEVTDTEWFFLVSMTQSFLNGSGLPGQALFAGQPTWIASGLSSAPCERARQAYNFGLRTMVCFPVGTGVLELGSTDVVFKTAESMAKIRSLFGGGAGGGSWPPVQPQAPSSQQPAAGADHAETDPSMLWLADAPVMDIKDSLSHPSAEISVSKPPPHPPQIHFENGSTSTLTENPSPSVHAPPPPPAPAAPQQRQHQHQNQAHQGPFRRELNFSDFASTPSLAATPPFFKPESGEILSFGADSNARRNPSPVPPAATASLTTAPGSLFSQHTATMTAAAANDAKNNNKRSMEATSRASNTNHHPAATANEGMLSFSSAPTTRPSTGTGAPAKSESDHSDLDASVREVESSRVVAPPPEAEKRPRKRGRKPANGREEPLNHVEAERQRREKLNQRFYALRAVVPNVSKMDKASLLGDAISYINELRGKLTSLETDKETLQTQVEALKKERDARPPSHSAGLGGHDGGPRCHAVEIDAKILGLEAMIRVQCHKRNHPSARLMTALRELDLDVYHASVSVVKDLMIQQVAVKMASRVYTQDQLSAALYSRLAEPGSAMGR

SEQ ID NO: 7381 - protein, 355 aa, Zea mays
  unsure (1)..(355): unsure at all Xaa locations
HPSLAKPRSEPFEEKDGVKLPSYRGDNVNGDDFTEKSRVPDPQRMIRAYAQSVATLNLLRAFATGGYAAMQRVTQWNLDFMDHNEQGDRYRELAHRVDDALGFMTASGLTVDHPIMTTTDFWTSHECLLLPYEQALTREDSTSGLFYDCSAHMLWVGERTRQLDGAHVEFLRGVANPLGIKVSDKMNPSELVKLIDILNPSNKPGRITIITRMGAENMRVKLPHLIRAVRNAGLIVTWITDPMHGNTIKAPCGLKTRPFDSILAEVRAFFDVHDQEGSHPGGVHLEMTGQNVTEXGGSRTVTFDDLSDRYHTHCDPRLNASQSLELAFIIAERLRKRRMRSGLNSSLPLPPLASE

SEQ ID NO: 7382 - protein, 178 aa, Bacillus cereus ATCC 14579
MRLESERIYLRPLCQLDAPIILESTMDDEIRYMTGTKSTFSLEQITKHIDHINNDSSRYDFAICLQSTDKMIGELSILDIDEENKRAGFRISMLSIALTGQGYGTEAIKIVLRFVFEQLSLNRLQLEVFSHNLRGIKAYKKVGFVKEGTLRQSLFYNDTYSDEIIMAILKSDYIERPL

SEQ ID NO: 7383 - protein, 353 aa, Methanosarcina mazei Goe1
MGNHSSFFSERGFTADFESEKSRRRQRRFSIIWSSIFLALRIIAAFVAASWIVYWQNLPVSYNFIFFIAVIGAVTGSLFESIPSKIDRNIPVPLGAGMMMWIFEEFRYWVPPEKMLVALVFSLFLGALAYRAKIADVSALLSAALLGVLIIVFSGLPWFLLLLTFFILGGGFTRYKYAYKESIGIAQAKNGIRSYENVFSNSTAALVLAVAYGVFPDQSLPIIYAYMGTVATATGDTLASEIGTTAKGKPIMITTLKPSEPGSDGAVSLLGELAAIFGSAIIGVLGYALGISSDLFLSVLITTAGGFFGTNIDSLLGATLQKRGLLSNSGVNFAATFAGAGVSAAIYLLVSGF

SEQ ID NO: 7384 - protein, 336 aa, Oryza sativa
  unsure (1)..(336): unsure at all Xaa locations
MAPGSKAERKAALDAGXAWMFNIVTSVGIIMVNKALMATHGFSFATTLTGLHFATTTLMTLVMKWLGYIQPSYLPVPELIKFVFFANLSIVGMNVSLMWNSVGFYQIAKLCIIPVLCFLEILFDKVRYSRDTKFSIMVVLVGVAVCTVTDVSVNSQGLIAAIIAVWSTALQQHYVHHLQRKYSLGSFNLLGHTAPAQAASLLVLGPFVDFWLTNKRVDTFNYTAIVTFFIILSCIIAVGTNLSQFICIGRFTAVSFQVLGHMKTVLVLTLGFLFFGKEGLNFHVAIGMILAVIGMIWYGNASSKPGGKERQVYSAPSEKTQKPNILSSQSELDQKV

SEQ ID NO: 7385 - protein, 346 aa, Xanthomonas axonopodis pv. citri str. 306
MRYLAHPDRYDRIAYRRVGRSGLVLPALSLGLWHNFGDSTPIDTQRALLRTAFDLGITHFDLANNYGPPYGSAEINFGRLLREDFKPYRDELILSTKAGWDMWPGPYGQGGSSRKYLLSSLDQSLQRLGVDYVDIFYSHRFDADTPLEETAGALASAVQQGKALYVGISSYSAARTREIAALLRAWKVPLLIHQPAYNLFNRWAEHELFDATAELGAGVIAFTPLAQGLLTGKYLDGVPADARVNRPGGQSLRPEHLSDDNLQRARGLDAIARGRGQSLAQLALAWVLRDARVSSALLGASRPEQLIENVAALQAPPFSAEELAEIDRHAVEGGINLWEKPSTDWQ

SEQ ID NO: 7386 - protein, 281 aa, Saccharomyces cerevisiae
TYTTRQIGAKNTLEYKVYIEKDGKPVSAFHDIPLYADKENNIFNMVVEIPRWTNAKLEITKEETLNPIIQDTKKGKLRFVRNCFPHHGYIHNYGAFPQTWEDPNVSHPETKAVGDNDPIDVLEIGETIAYTGQVKQVKALGIMALLDEGETDWKVIAIDINDPLAPKLNDIEDVEKYFPGLLRATNEWFRIYKIPDGKPENQFAFSGEAKNKKYALDIIKETHDSWKQLIAGKSSDSKGIDLTNVTLPDTPTYSKAASDAIPPASLKADAPIDKSIDKWFF

SEQ ID NO: 7387 - protein, 522 aa, Candida tropicalis
MSIQDIVETYSTKWYVVVSVALIVYKVFDFFYARYLMYKLGAKPFLQSQTDGYLGFRVPFELMGKKSEGTLIDFTYQRTLELDNPDIPTFTFPIFSVSIISTLEPDNIKAILATQFNDFSLGTRHSHFAPLLGDGIFTLDGAGWKHSRSMLRPQFAREQVSHVKLLEPHMQVFFKHIRKHHGQTFDIQELFFRLTVDSATEFLFGESVESLRDESIGMLNDALDFDGKAGFADAFNYSQNYLASRALMQQMYWILNGKKFKECNAKVHKFADYYVEKALELTPDQLEKQDGYVFLYELVKQTRDRQVLRDQLLNILVAGRDTTAGLLSFVFFELARTPRVANKLREEIEDKFGLGQDARVEEISFESLKSCEYLKAVLNECLRLYPSVPQNFRVATRNTTLPRGGGKDGLSPVLVRKGQTVMYSVYAAHRNKQIYGEDALEFRPERWFEPETKKLGWAFLPFNGGPRICLGQQFALTEASYVTVRLLQEFSHLTMDPNTEYSPKKMSHLTMSLFDGANIQMY

SEQ ID NO: 7388 - protein, 426 aa, Escherichia coli K12
MNSNKELMQRRSQAIPRGVGQIHPIFADRAENCRVWDVEGREYLDFAGGIAVLNTGHLHPKVVAAVEAQLKKLSHTCFQVLAYEPYLELCEIMNQKVPGDFAKKTLLVTTGSEAVENAVKIARAATKRSGTIAFSGAYHGRTHYTLALTGKVNPYSAGMGLMPGHVYRALYPCPLHGISEDDAIASIHRIFKNDAAPEDIAAIVIEPVQGEGGFYASSPAFMQRLRALCDEHGIMLIADEVQSGAGRTGTLFAMEQMGVAPDLTTFAKSIAGGFPLAGVTGRAEVMDAVAPGGLGGTYAGNPIACVAALEVLKVFEQENLLQKANDLGQKLKDGLLAIAEKHPEIGDVRGLGAMIAIELFEDGDHNKPDAKLTAEIVARARDKGLILLSCGPYYNVLRILVPLTIEDAQIRQGLEIISQCFDEAKQ

SEQ ID NO: 7389 - protein, 792 aa, Streptococcus pyogenes MGAS315
MKTKKVIILVGLLLSSQLTLIACQSRGNGTYPIKTKQSRKGMTSNKIKPIKKSKKTNKTHKGVAGVDFPTDDGFILTKDSKILSKTDQGIVVDHDGHSHFIFYADLKGSPFEYLIPKGASLAKPAVAQQAASQGTSKVADPHHHYEFNPADIVAEDALGYTVRHDDHFHYILKSSLSGQTQAQAKQVATRLPQTSSPVSTATANGIPGLHFPTSDGFQFNGQGIVGVTKDNILVDHDGHLHPISFADLRQGGWAHVADQYDPAKKAEKPAETHHTPELSEREKEYQEKLAYLAEKLGIDPSTIKRVETQDGKLGLEYPHHDHAHVLMLSDIEIGKDIPDPHAIEHARELEKHKFGMDTLRALGFDEEVILDIVRTHDAPTPFPSNEKDPNMMKEWLATVIKLDLGSRKDPLQRKGLSLLPNLETLGIGFTPIKDISPVLQFKKLKQLLMTKTGVTDYRFLDNMPQLEGIDISQNNLKDISFLSKYKNLTLVAAADNGIEDIRSLGQLPNLKFLVLSNNKISDLSPLASLHQLQELHIDNNQITDLSPVSHKESLTVVDLSRNADVDLATLQAPKLETLMVNDTKVSHLDFLKNNPNLSSLSINRAQLQSLEGIEASSVIVRVEAEGNQIKSLVLKDKQGSLTFLDVTGNQLTSLEGVNNFTALDILSVSKNQLTNVNLSKPNKTVTNIDISHNNIPLADLKLNEQHIPEAIAKNFPAVYEGSMVGNGTAEEKAAMATNAKESAQEASESHDYNHNHAYEDEEGHAHEHRDKDDHDHEHEDENEAKDEQNHAH

SEQ ID NO: 7390 - protein, 407 aa, Glycine max
MDASKLNQLKHFIEQCKSNPSLLADPSLSFFRDYLQSLGAKLPESAYSESTGVERDEDIEDLTEEHEKVEEEEEEEEEDDVIIESDVELEGETCEPDDDPPQKMGDPSVEVTEENRDASQMAKIKAMDAISEGKLEEAIENLTEAISLNPTSAIMYGTRASVYIKMKKPNAAIRDANAALEINPDSAKGYKSRGIARAMLGQWEEAAKDLHVASKLDYDEEINAVLKKVEPNAHKIEEHRRKYERLHKEREDKKKERERQRRRAEAQAAYEKAKKQEQSSSSRNPGGMPGGFPGGFPGAGGMPGGFPRGRGACLGGFPRGWGHAWGIPQGLGGMPGGFPGAGGMPGNIDFSKILSDPELMASFGDPEIMAALQDVMKNPANFAKHQSNPKVAPVIAKMMTKLGGGPK

SEQ ID NO: 7391 - protein, 169 aa, Zea mays
  unsure (1)..(169): unsure at all Xaa locations
FFPFSVGGWFATLAVAGYTALAVRKLVKTQLIPAEPMSKASPFSTVETWAXAWAAVFVASFGVACFNPRALGTTARTCLPFLLAATVLGYMVGSGLPSGVKKVLHPIITCALSADLAAVAFGYLSGSGLDAVLGDYLTKAPSNPGAGDLLMGSLGSVIISFAFSMFKQR

SEQ ID NO: 7392 - protein, 49 aa, Zea mays
MLELRMVHESLLKKVLEAIQELVTDANFDCYATDFSLQAMDSSHVALVA

SEQ ID NO: 7393 - protein, 364 aa, Corynebacterium efficiens YS-314
MVAMTYVPAPTRYDDMEYRTVGHSGLKLPAISLGLWHNFGNDKPLETQRGIIHRAFDRGVTHFDLANNYGPPAGSSEVNFGRILKKDFADHRDEMIISSKAGWNMWDGPYGFGGSRKYLVSSLDQSLRRLGVDYVDIFYHHRPDPDTPLEETLYALRDIVASGKALYVGISSYGADLTAEAAEFMAEEGCPLLIHQPSYSLVNRWVEEPGDEGESLLQAAANNGLGVIAFSPLAQGLLTDRYLDGVPEGSRATQGKSLSEGMLSEENIGMVRRLNDIAQERGQSLAQMAIAWVLRKQGSFGEETVTSALIGASSVEQLDANLDALANLEFTEAELEAIDEIAHDAGVNIWAKATESKTATPREN

SEQ ID NO: 7394 - protein, 466 aa, Lactobacillus gasseri
MNENETSKLGFWSIVLLAINSIIGSGIFLTPGSVVQQAGSKALIVYFIAAIFASILAISFAAAAKYVTKSGAAYAYSKAAFGNNVGFYMGILRYFSASVAWGVMAVGVIKSTISIFGGNPNKTMSVTIGFLILMAVITIINLFGQKVVKYVMNLATIGKLAALVLIIVAGVVLLIMTGASSNLNEVDQITQNGQKIVPTLTTTGFVMAIVSAFYAFTGFESVASGSDDMKNPAKNLPRAIPLAIIVIAIVYIGVVAVAMMLDPKSLMTTKQVVAIAAIFKNEILRDVILVGALISMFGINVASSFNAPRILEAMARENQFSKSLTKRTKNNFPIRTFFISVLLAILIPMAFEYNMVNLITLSAMVRFLGFIVVPLAVIQFYRGKTAETVLNAQKNIWTDIVVPILSIVLVIFLLVEYNWKAQFGVVNASGQVTGINWYAIAMMIFGFIVLPLIMFFISRKDRKASK

SEQ ID NO: 7395 - protein, 396 aa, Halobacterium sp. NRC-1
MSYRVGLVGKPSVGKSTFFNAATNNDVPEGAYPFTTIDPAVGEAYVRVECAAPEFGEECTPATGFCEDGTRFVPTKLVDVAGLIPGAHEGAGLGNQFLTDLNEADVLIHVVDFSGTTDIEGEATEGHDPREDIDFLETELDQWYLDVLEKGIERYEGQHMADATLEVELAEQMSAFRTSPEEVKQVLLALDLAFDPDTWDDADRLELAREMRTRTKPMVVAANKMDTPEAQANWAAITDDDEYDHLEFVPVSAHAEQALTQADQGGVVDYRAGDDAFTIVGEPSDDQRAGLESIREFVTEYGGTGVQSAIEAALFDALGVKPVFPGSANGLGTADGRVLPDVFLLEPDATAEDFAYAVHSDVGDGFLHAVDCRANRQIAADQDLDSRAVIEIISTN

SEQ ID NO: 7396 - protein, 430 aa, Brassica rapa
TFSYLLVFVVMILFHPALSIYINTLSSTESLTISSNRTLVSPGSIFELGFFRTNSRWYLGMWYKELSERTYVWVANRDNPISNSIGTLKISGNNLVLLGHSNKSVWSTNLTRENERSPVVAELLANGNFVMRDSSGFLWQSFDFPTDTLLPEMKLGYDLKTRLNRFLVSWRSLNDPSSGNFSYRLETRRLPEFYLSKRDVPVHRSGPWNGIRFSGIPEDEKLSYMVYNFTENSEEAAYTFLMTNNNIYSRLTISSDGSFQRLTWTPSSGAWNVFWSSPVNPECDLYMICGPDAYCDVNTSPSCICIQGFNPKDLPQWDLRDWTSGCIRRTRLSCRGDGFTRMKNMKLPETTMAIVDRSIGIKECKKRCLSDCNCTAFANADIRNGGTGCVIWTGQLDDIRNYGTDGQDLYVRLAAADLVKRRNANGKIIS

SEQ ID NO: 7397 - protein, 98 aa, Zea mays
  unsure (1)..(98): unsure at all Xaa locations
RRKGQKQTRPTNSSTTLSDLSYHXCDALSCPFKSLYFPSTANICKCYNXYFYLISTAPFYFPILEHFFTNTLNFLPIANAPTXNLILIYLTHFFTFFT

SEQ ID NO: 7398 - protein, 231 aa, Salmonella enterica subsp. enterica serovar Typhi
MMTYIWWSLPLTLAVFFAARRLAAHFKMPLLNPLLVAMVVIIPFLLLTGIPYEHYFKGSEVLNDLLQPAVVALAYPLYEQLHQIRARWKSIISICFVGSLVAMITGTSVALLMGATPEIAASVLPKSVTTPIAMAVGGSIGGIPAISAVCVIFVGILGAVFGHTLLNAMHIRTKAARGLAMGTASHALGTARCAELDYQEGAFSSLALVICGIITSLVAPFLFPLILAVMR

SEQ ID NO: 7399 - protein, 195 aa, Zea mays
  unsure (1)..(195): unsure at all Xaa locations
GFPSHHISRILHAXLQGKPYYVDIIDLFNEVEFKTASGQMLDLITTHEGEKDLTKYNLTVHRRIVQYKTAYYSFYLPVACALLLAGENLENFVDVKNILVEMGTYFQVQDDYLDCFGDPEFIGKIGTDIEDYKCSWLVVQALERAAENQKSILFENYGKSDPACVAKVKDLYKELKLEVCSEHSMFLLFIVPSTM

SEQ ID NO: 7400 - protein, 229 aa, Oryza sativa (japonica cultivar-group)
MGRSPCCEKEHTNKGAWTKEEDERLVAYIRAHGEGCWRSLPKAAGLLRCGKSCRLRWINYLRPDLKRGNFTADEDDLIIKLHSLLGNKWSLIAARLPGRTDNEIKNYWNTHIRRKLLGRGIDPVTHRPVNAAAATISFHPQPPPTTKEEQLILSKPPKCPDLNLDLCISPPSCQEEDDDYEAKPAMIVRAPELQRRRGGLCFGCSLGLQKECKCSGGGAGAGAGNNFLG

SEQ ID NO: 7401 - protein, 436 aa, Bacillus subtilis subsp. subtilis str. 168
MSQTTASITTAQWQQKRDQFVSKGVSNGNRSLAVKGEGAELYDLDGRRFIDFAGAIGTLNVGHSHPKVVEAVKRQAEELIHPGFNVMMYPTYIELAEKLCGIAPGSHEKKAIFLNSGAEAVENAVKIARKYTKRQGVVSFTRGFHGRTNMTMSMTSKVKPYKFGFGPFAPEVYQAPFPYYYQKPAGMSDESYDDMVIQAFNDFFIASVAPETVACVVMEPVQGEGGFIIPSKRFVQHVASFCKEHGIVFVADEIQTGFARTGTYFAIEHFDVVPDLITVSKSLAAGLPLSGVIGRAEMLDAAAPGELGGTYAGSPLGCAAALAVLDIIEEEGLNERSEEIGKIIEDKAYEWKQEFPFIGDIRRLGAMAAIEIVKDPDTREPDKTKAAAIAAYANQNGLLLLTAGINGNIIRFLTPLVISDSLLNEGLSILEAGLRA

SEQ ID NO: 7402 - protein, 520 aa, Bacillus subtilis subsp. subtilis str. 168
MSKQGNFQKSMSLFDLILIGMGAIFGSAWLFAVSNVASKAGPSGAFSWILGGAIILLIGLVYAELGAALPRTGGIIRYPVYSHGHLVGYLISFVTIVAYTSLISIEVTAVRQYVAYWFPGLTIKGSDSPTISGWILQFALLCLFFLLNYWSVKTFAKANFIISIFKYIVPITIIIVLIFHFQPENLSVQGFAPFGFTGIQAAISTGGVMFAYLGLHPIVSVAGEVQNPKRNIPIALIICIIVSTIIYTVLQVTFIGAIPTETLKHGWPAIGREFSLPFKDIAVMLGLGWLATLVILDAILSPGGNGNIFMNTTSRLVYAWARNGTLFGIFSKVNKDTGTPRASLWLSFALSIFWTLPFPSWNALVNVCSVALILSYAIAPISSAALRVNAKDLNRPFYLKGMSIIGPLSFIFTAFIVYWSGWKTVSWLLGSQLVMFLIYLCFSKYTPKEDVSLAQQLKSAWWLIGFYIMMLIFSYIGSFGHGLGIISNPVDLILVAIGSLAIYYWAKYTGLPKAAIDYDK

SEQ ID NO: 7403 - protein, 330 aa, Burkholderia fungorum
MNSNAVIAIHGGAGTILRASMSASAEADYHAALHAVLSAGQRVLAEGGSALDAVSEAVRLLEDCPLFNAGRGAVFTAAGTHELDAAIMDGRTLEAGAICCVKRVRNPVLAARRVLEGSEHVLFTGEGAEAFAAAQGLELVEPEYFHTEARHRQWLLARDQQRAMLDHDGATLAAAPASNDDDPTPHEPIDPNRKFGTVGAVALDRHGHVAAATSTGGVTNKQVGRVGDAPLIGAGCYADDATCAVSTTGSGEMFMRMVAAYDVAAQMAYRNVSLQEAADDVVMNRLPKIDGRGGLIAVDARGNVALPFNTEGMYRGFARLGETPVTAIYR

SEQ ID NO: 7404 - protein, 566 aa, Thermoplasma volcanium
MRSCFMDSRVSDRKLRRELTTWDLLMLSLGGIIGSGWLFAAFGAATTAGPGSIFAWIIGGVIIIFIALVYAELGAMIPRSGAIVRYGHLSHGSFAGFVLGWAYFLSAVSVPAIEAEGVITYAASYSSKYGIVLLTNTGVMSVLGTFLAMLLMLGFFFLNYAGIKIMGKTNTGLTWWKFVIPTLTVILLLVVSFRPSNIIVGGIVPYGWAPVFSAVATSGIVFSYLGFRQGIDYGGEAKTPQRSIPLATVFSVLIGILLYTALQIVFIGGIDWGKLGLVPGSWAQIYSLATSNSNPEAVALYDAPFAHIAQAAGLVFLTYILFADAYISPSGTLNVYLGTSTRTLYGMAANGHMPKKLLEIMDKNRIPFIPLLATLLIGYIFFLPFPSWYKMVGFITSATAFTYIVGGAALMSLRRTAPELKRPFKLPYARVLSPIAFIGAGEVVYWSGWPLVLYLAIAIFLGFAVYFVLLLLGAIENSFTKENIKAGLWVPIFIIVLTVLSYIGDTSLGGIGVIKFPFDLVTVAVISFIFYMWSVRSGIRTEDITEMIESGSQYVFEESAREAVGK

SEQ ID NO: 7405 - protein, 208 aa, Populus x canescens
LIAGGTESSAVTVEWAISEILRKPEVFEKATEELDRVIGRERWVEEKDMVNLPYIYAIAKEVMRLHPVAPMLVPRAAREDININGYDIKKGSRVLVNVWTIGRDPKVWDKPDEFFPERFIGNSIDVRGHDYELLPFGAGRRMCPGYPLGLKVIQATLSNLLHGFKWRLPDGQKKEDLNMDEIFGLSTPKKYPLVAVAEPRLPAHVYPK

SEQ ID NO: 7406 - protein, 465 aa, Xanthorhiza simplicissima
SGKPFYAIVHRVTGSLIIDFEPVKPYEVPMTAAGALQSYKLAAKAIARLQSLPSGSIERLCDTVVQEVFELTGYDRAMVYKFHEDDHGEVVSEITKPGLEPYLGLHYPATDIPQAARFLFMKNKVRMICDCRAKHVKVLQDEKLPFDLTLCGSTLRAPHSCHLQYMENMNSIASLVMAVVVNEGDEEGESSSSEQSQKRKKLWGLLVCHHTTPRFVPFPLRYACEFLAQVFAIHVNKELELENQILEKNILRTQTLLCDMLMRDAPLGIVSQSPNIMDLVKCDGAVLLYKNRIWQLGSTPSEFHIHDITSWLSEYHMDSTGLSTDSLYDAGFPGALALGDGVCGMAAVRITSKDMLFWFRSHTAAEVRWGGAKHEPGEKDDGRKMHPRSSFKAFLEVVKTRSLPWKDYEMDAIHSLQLILRNAFKDVENEGLNTSTIRTQLNDLSIEGTEELEAVTNEMVRLMET

SEQ ID NO: 7407 - protein, 374 aa, Oryza sativa
MATPRTLVPILPPVAALLLLLVAASSIPILAAAQPADACGGAPDQAAADGACHDVPRALRLKLIAIPTILVSSVVGVCLPLLSRSVPALRPDGGLFAVVKAFASGVILATGYMHVLPDAFNNLTSPCLPRKPWSEFPFAAFVAMLAAVSTLMADSLMLTYYNRSKPRPSSGGDVAAVADHGESPDQGHRHGHGHGHGHGMAVAKPDDVEATQVQLRRNRVVVQVLEIGIVVHSVVIGLGMGASQNVCTIRPLVAAMCFHQMFEGMGLGGCILQAEYGRRMRSVLVFFFSTTTPFGIALGLALTRVYRDNSPTALIVVGLLNAASAGLLHYMALVELLAADFMGPKLQGNVRLQLAAFLAVLLGAGGMSVMAKWA

SEQ ID NO: 7408 - protein, 73 aa, Triticum aestivum
MDASAELQRFIEQEKEKMMVSEMIGKVTSECWDKCITGAPGSKLSSGETSCLSNCAQRFIDMSEMIAKRFGAH

SEQ ID NO: 7409 - protein, 380 aa, Zea mays
MGGEKETFDTSDLNASLPAAAAALSAEDRAGLVNALKDKLQSLAGQHADVLETLSPNVRKRVEFLREIQSQHDEIEAKFFEERAALEAKYQKLYEPLYTKRYGIVNGEVEVDGVCDEPASENTVEGKEPDAKGVPDFWLTAMKTNEVLSEEIQERDEAALKYLKDIKWSRIEDPKGFKLDFFFDTNPFFKNSVLTKTYHMVDEDDPILEKAIGTEIEWYPGKNLTQKILKKKPKKGSKNTKPITKTEDCESFFNFFNPPQVPEDDDDIDEDTADELQSQMEHDYDIGTTIRDKIIPHAVSWFTGEAVQGEDFGELGDDDEDDDDEDDDEDDEDEEEDDDEEEDDEEESKPARKSGSGRRHKAPQKVSQGNAEQPAECKQQ

SEQ ID NO: 7410 - protein, 466 aa, Corynebacterium glutamicum ATCC 13032
MNRGVSWTVDIPKEVLPDLPPLPEGMQQQFEDTISRDAKQQPTWDRAQAENVRKILESVPPIVVAPEVLELKQKLADVANGKAFLLQGGDCAETFESNTEPHIRANVKTLLQMAVVLTYGASTPVIKMARIAGQYAKPRSSDLDGNGLPNYRGDIVNGVEATPEARRHDPARMIRAYANASAAMNLVRALTSSGTADLYRLSEWNREFVANSPAGARYEALAREIDSGLRFMEACGVSDESLRAADIYCSHEALLVDYERSMLRLATDEEGNEELYDLSAHQLWIGERTRGMDDFHVNFASMISNPIGIKIGPGITPEEAVAYADKLDPNFEPGRLTIVARMGHDKVRSVLPGVIQAVEASGHKVIWQSDPMHGNTFTASNGYKTRHFDKVIDEVQGFFEVHRALGTHPGGIHIEFTGEDVTECLGGAEDITDVDLPGRYESACDPRLNTQQSLELAFLVAEMLRN

SEQ ID NO: 7411 - protein, 247 aa, Helianthus annuus
MSFPNESGEMSPQRKLGRGKIEIKRIENTTNRQVTFCKRRNGLLKKAYELSVLCDAEVALIVFSSRGRLYEYANNSVKGTIDRYKKACLDPPSSGSVAEANAQFYQQEAAKLRQQIANLQNQNRQFYRNIMGESLGNMPAKDLKNLEGKLEKGISRIRSKKNELLFAEIEYMPKRENELHNNNQFLRAKIAENERSQQQHMSLMPGSSDYDLVPPHQPFDGRNYLQVNDLQPNNSYSCQDQTPLQLV

SEQ ID NO: 7412 - protein, 545 aa, Staphylococcus aureus subsp. aureus MW2
MNKDKQLHNDKINLSQLVLLGLGSLIGSGWLFGAWEASSIAGPAAIISWVLGFLVIGTIAYNYIEIGTMFPQSGGMSNYAQYTHGSLLGFIAAWANWVSLVTIIPIEAVSAVQYMSSWPWHWAKPMRYLMENGSISTYGLLAVYLIIVIFSLLNYWSVKLLTSFTSLISVFKLGVPMLTIIMLMLSGFDTSNYGHSASTFMPYGSAPIFAATTASGIIFSFNSFQTIINMGSEIKNPEKNIARGIAISLSISAVLYIILQSTFITSMPQSMLQHSGWNGINFNSPFADLAILLGINWLAILLYIEAFVSPFGTGVSFVAVTGRVLRAMEKNGHIPKFLGKMNEKYHIPRVAIIFNAIISMIMVTLFRDWGTLAAVISTATLVAYLTGPTTVIALRKMGPTMTRPFRAKILKVMAPLSFVLASLAIYWAMWPTTAEVILIIILGLPIYFFYEYRMNWRNTKKQIGGSLWIIVYLIVLSILSFIGSKEFKGLNMIHYPFDFIVIIVVALIFYYIGTTSSFESVYFRRATRINTKMRESLNNESKSSH

SEQ ID NO: 7413 - protein, 374 aa, Oryza sativa (japonica cultivar-group)
MATPRTLVPILPPVAALLLLFVAASSIPILAAAQPADACGGAPDQAAADGACHDVPRALRLKLIAIPTILVSSVVGVCLPLLSRSVPALRPDGGLFAVVKAFASGVILATGYMHVLPDAFNNLTSPCLPRKPWSEFPFAAFVAMLAAVSTLMADSLMLTYYKRSKPRPSSGGDVAAVADHGESPDQGHRHGHGHGHGHGMAVAKPDDVEATQVQLRRNRVVVQVLEIGIVVHSVVIGLGMGASQNVCTIRPLVAAMCFHQMFEGMGLGGCIVQAEYGRRMRSVLVFFFSTTTPFGIALGLALTRVYRDNSPTALIVVGLLNAASAGLLHYMALVELLAADFMGPKLQGNVRLQLAAFLAVLLGAGGMSVMAKWA

SEQ ID NO: 7414 - protein, 476 aa, Sulfolobus solfataricus
MCHNIKPHRFRVNLKNFIIYYYCEMSEIRELKKPIREKASIHSHIKGLGLDSNGKAKFIADGLVGQAEAREAAGVVVQLIKQGKMSGKGILFVGPPGTGKTALAVAIARELGEDTPFTAINASEIYSTELKKTEILTQLIRKSIGVRIREKRLVYEGVVKDRKIKVARSRLNPYSQAPVEAQITLTTKDDERTLSVGEEIAQQLVSLGVKKGDVIMIDAQTGQVIVEGKAKGFEGAKTYDIETTKVLEMPTGPVRKEKEITTTLTLNDLDLNLAARNLAVTAIFSFFTEREINEDVRKEVDRLVKDWINQGRAELVVGVLFIDDAHTLDLEAFSFLTRALESELAPILILATNRGLTKIRGTDIESPHGIPLDLLDRLLIIPTRPYNADEIKEIIKIRADELEIELDPQALEELTKIGVENSLRYSVQLLEPSLIIAQRNNRSIIKVEDVVIASKLFSDVKRSVKFVKEYENLLLK

SEQ ID NO: 7415 - protein, 574 aa, Lotus japonicus
MEGKGYTLDGTVDLAGRPVLSSLTGKQKACTYILVYRVLERFAYYGVGANLVNFMTTQLNKDVVSSITSFNNWSGLATLTPILGAYIADTYTGRFWTITFSLLIYAIGLVLLVLTTTLKSLRPACENGICREASNLQVALFYTSLYTIAVGSGAVKPNMSTFGADQFDDFRHEEKEQKVSFFNWWAFNGACGSLMATLFVVYIQEKNGWGLAYSLSAIGFLLSSIIFFWGSPVYRHKSRQARSPSMNFIRVPLVAFRNRKLQLPCNPSELHEFQLNYYISSGARKIHHTSHFSFLDRAAIRESNTDLSNPPCTVTQVEGTKLVLGMFQIWLLMLIPTNCWALESTIFVRQGTTMDRTLGPKFRLPAASLWCFIVLTTLICLPIYDHYFIPFMRRRTGNHRGIKLLQRVGIGMAIQVIAMAVTYAVETQRMSVIKKHHIAGPEETVPMSIFWLLPQNIILGVSFAFLATGMLEFFYDQSPEEMKGLGTTLCTSCVAAGSYINTFLVTMIDKLNWIGNNLNDSQSRITIMPFFSVISALNFGVFLWVSSGYIYKKENTSTTEVHDIEMSAEKTVKY

SEQ ID NO: 7416 - protein, 295 aa, Rhizobium sp. CIAM540
RGKTQIKEFDTFPTLEQLPLWGFDGSSTMQAEGRSSDCVLKPVALYPDPARTNGALVMCEVMMPDGVTPHATNARATILDDEDAWFGFEQEYFFYQNGRPLGFPEQGYPAPQGPYYTGVGYSNVGDVAREIVEEHLDLCLEAGINHEGINAEVAKGQWEFQVFGKGSKKAADQIWMARYLLQRLTEKYGIDIEYHCKPLGDTDWNGSGMHCNFSTKYMREVGGKDYFEALMAAFDKNLMDHIAVYGPDNDKRLTGKHETAPWNKFSYGVADRGASIRVPHSFVKNDYKGYLEDRR

SEQ ID NO: 7417 - protein, 195 aa, Zea diploperennis
APLDKVCILSCGISTGLGASINVAKPPKGSTVAVFGLGAVGLAAAEGARIAGASRIIGVDLNPSRFEEARKFGCTEFVNPKDHNKPVQEVLAEMTNGGVDRSVECTGNINAMIQAFECVHDGWGVAVLVGVPHKDAEFKTHPMNFLNERTLKGTFFGNYKPRTDLPNVVELYMKKELEVEKFITHSVPFAEINKA

SEQ ID NO: 7418 - protein, 253 aa, Agrobacterium tumefaciens str. C58 (Cereon)
MVSNMSTHYDLDGRVAVVTGATGGFGVAISQRLRDCGATVIHWDLPAAVKDGALGDLPHAGVDISDAKSIETAAIDLKQRFGRLDILVNNAGIVGNVAPLWEIPIEEFRRIIDINLFGSFLVCRALVPLMIETARTSRFGRIVNVASIQAKEGMHQAAAYSASKAGLVAMTKSLGKELATADILVNAITPAASMTAMSIDAPKERLDDILSRIPMRRFLEPAEVANMVAWLSSSECSFSTGAVFDLSGGRATY

SEQ ID NO: 7419 - protein, 328 aa, Corynebacterium efficiens YS-314
MKLLVTGGAGYVGSVCAAVLVERGHDVTVIDNFTTGNREAVPASATLVEGDVRDVADEVLAAGGFDGVVHFAARSLVGESVDHPADYWQHNMVTSLTLLDAMRAHGVDNLVFSSTAATYGEPEQVPITEDMPTAPTNPYGASKLAIDYAITSYARAYGLGATSLRYFNVAGAYGNIGENREVETHLIPLVLQVALGHREKIFMFGDDWPTADGTAVRDYIHIHDLAEAHVLALESNVGGTHRIFNLGSGDGYSVRQVVEMCREVTGHPIPAEVAPRRAGDPAVLIASSEKAQRELGWNPTRTDLRTIVEDAWAFTSQLGERAHSAHRG

SEQ ID NO: 7420 - protein, 412 aa, Neurospora crassa
MATTIKASVLHGARDLSVESRPLPTLSPTDVLISIKSTGLCGSDLHYYTHFRNGDIQVHEPLTLGHESSGIITAIGSPSVSSEYGLNVGDRVALEVGQPCEACELCCPPGTGPIGNYSGGHGEESGGKGGESTTTTSRYNICRAMRFRSSAKGWPQFPHAQGTLQEVVAHPAKWCHKLPESVDYTLGALAEPLAVAMHAAGRAGIPSCVPHSSSSMTSSRGAARVKVLVFGAGAVGLLCAAVCKSITKGDAIVVIADIQADRVKFAVENGFADAAVVVPISDKRPETIEEKLEYAKSVAERVKGAELVKGLGGQATAPGGKIMIIGMGNPIQTLPISAASLKEVDLLGVFRYANAYPKVIELLARGDPHLPDLSKLVTQRYSGLESIPMAFDMAARVKDNEGNLVLKVMIDM

SEQ ID NO: 7421 - protein, 222 aa, Oryza sativa (japonica cultivar-group)
MAPRNAAEAVAVAVAEGGGAGMEPRFRGVRKRPWGRYAAEIRDPARKARVWLGTFDTAEAAARAYDSAALHFRGPKAKTNFPVAFAHAHHHAPPPPLPKAAALAVVSPTSSTVESSSRDTPAAAPVAAAAKAQVPASPSLDLSLGMSAMVAAQPFLFLDPRVAVTVAVAAPVPRRPAVVSVKKEVARLDEQSDTGSSSSVVDASPAVGVGLDLNLPPPIEEA

SEQ ID NO: 7422 - protein, 262 aa, Cucumis sativus
MSKHYQSPLTRMIKEEGKGKLQIKGMFQNQEEKMSDSPQRKMGRGKIEIKRIENTTNRQVTFCKRRNGLLKKAYELSVLCDAEVALIVFSSRGRLYEYANNSVKATIDRYKKASSDSSNTGSTSEANTQFYQQEAAKLRVQIGNLQNSNRNMLGESLSSLTAKDLKGLETKLEKGISRIRSKKNELLFAEIEYMRKREIDLHNNNQMLRAKIAESERNVNMMGGEFELMQSHPYDPRDFFQVNGLQHNHQYPRQDNMALQLV

SEQ ID NO: 7423 - protein, 390 aa, Aquilegia sp. SM-1999
PYEVPMTAAGALQSYKLAAKAIARLQSLPSGSIDRLCDTVVEEVFQLTGYDRVMAYKFHDDDHGEVVSETTKEGLPPYLGLHYPATDIPQAARFLFMKNKIRMICDCRAKHVRVLQDEKLPFELTLCGSTLRAPHSCHLQYMENMDSIASLVMAVVINDGDEEEGTVEGASQSRKRKRLWGLVVCHNTTPRFVPFPLRYACEFLIQVFAIHVNKEFELENQILEKNILRTQTLLCDMLMRNAPIGIVSQSPNIMDLVKCDGAALLYQNKIWRLGLSPSESHIRDIASWLSEYHMDSTGLSTDSLYDAGFPGALSIGDTVCGMAAVRINSKDMLFWFRSHTAGEIRWGGAKHDPGEKDDGRKMHPRSSFKAFLEVVKTRSFPWKDYEMDAI

SEQ ID NO: 7424 - protein, 241 aa, Rickettsia prowazekii
MSEIAIVTGGTRGIGKATALELKNKDLTVIANFFSNYDAAKEMESKYGIRTKCWNVADLEECKKAVNEIEEEFKKSVSILVNNAGITKDKMLHRMSNQDWTDVINVNLHSCFNMSSSVMKQMRNQNYGRIVNISSINAQAGQIGQTNYSAAKAGIIGFTKALARETASKNITVNCIAPGYIATEMVNTVPKDILTKIVNSIPKKRLGQPEEIARAVAFLVDKNAGFITGETISINGGHNMI

SEQ ID NO: 7425 - protein, 365 aa, Phaseolus vulgaris
MARYTLCALLLFAAVAAAAGGASTDADDILIRQVVPEGEVEDHLLNAEHHFSTFKSKFGKTYATKEEHDHRFGVFKSNMRRARLHAQLDPSAVHGVTKFSDLTPAEFHRKFLGLKPLRLPAHAQKAPILPTNNLPKDFDWRDKGAVTNVKDQGSCGSCWSFSTTGALEGAHFLATGELVSLSEQQLVDCDHVCDPEEYGSCDSGCNGGLMNNAFEYLIGSGGVQREKDYPYTGRDGTCKFDKSKIAASVSNYSVISLDEEQIAANLVKNGPLAVAINAVYMQTYVGGVSCPYICGKHLDHGVLLVGYGEGAYAPIRFKEKPYWIIKNSWGENWGGNGYYKICRGRNVCGVDSMVSTVGAIHASTQ

SEQ ID NO: 7426 - protein, 154 aa, Synechocystis sp. PCC 6803
MPLPTSLTTLDGTPLAPEVIADKVVLFVNVASKCGLTPQYSGLVALDKAYGEKGLVIIGVPCNQFGAQEPGSPEEIKDFTKTKYDVDFTLLEKQDVNGPNRSPLYQFLVGDGEDISWNFGKFLIGRDGQVVARFDPQTKPDDTNLKAAIEKALG

SEQ ID NO: 7427 - protein, 758 aa, Pseudomonas syringae pv. syringae B728a
MFRALARGSKGTVMSQLDKDAFEVLLANCADEPIQFPGAIQPHGLLFTLAEPELTILQVSANVQTVLGHVPEQLLGKGLDCVLGAGWAEVIRSASAHDSFIDAQRLLMSINGIEFEALLHRHQGVLVLELEIQGKDAQSVSYSERTGNMGRMLRQLHAASDLQTLYEVSVREIQKMTGYDRVLIYRFEEEGHGQVIAEASAPSMELFNGLFFPASDIPEQARELYRRNWLRIIPDADYIPVPLVPQLRPDTQQQLDLSFSTLRSVSPIHCQYMKNMGVLSSMSVSLIQSGKLWGLISCGNRTPLYVSHELRSACQAIGQVLSLQISAMEALEISRQREAKVRALEQLNLAMAGSEENVFDGLAQQPQLLMDLVGATGVAIIEDRQTHCFGICPEPSDIRALHAWMIAGGEPVYASHHLSSVYAPAEAYQPVASGVLAMSLPKPVDNGVIWFRPEVKETVQWSGDPKKPLNMESSAGGMRLRPRTSFEIWKVEMTGIATKWSYGDVFAANDLRRSALENDLARQVRREQQAVRARDELVAVVSHDLRNPMTVISMLCGMMQKSFSSDGPHTSRRISTAIDTMQQAASRMNVLLEDLLDTSKIEAGRYTITPQPLEVSQIFEEAYTLLAPLAMDKSIEISFNAEPDLKVQADPERLFQVLSNLIGNAIKFTPKMGTIGVAAMSNGTEIVFTVRDSGEGIPPEQLPHIFERYWTVKEGNPTGTGLGLYISQGIIKAHGGELAAQSQVGEGSEFRFTVPMAV

SEQ ID NO: 7428 - protein, 255 aa, Desulfitobacterium hafniense
MEAVNLALAHALANDPDVVLLGEDIGVNGGVFRSTVGLQSRFGEARVIDTPLAEGAIVGAAIGMAAMGLKPVAEIQFAGFIYPAIDNILNHAGHMRHRTRGRITCPMVVRAPSGAGIHAPEHHSESPEALFAQMPGIRVVMPSSPARAYGLLLAAIRDPDPVIFLEPTRLYRLFRQEVADDGQALPLDACFTLREGTDLTLVSWGAIVAGNAGRGRCAGRRRRFRVSDRRGHAQAAGHGDHPGVGCAERPMRDRA

SEQ ID NO: 7429 - protein, 751 aa, Geobacillus stearothermophilus
MENQNRQNAAQCPFHGSVTNQSSNRTTNKDWWPNQLNLSILHQHDRKTNPHDEEFNYAEEFQKLDYWALKEDLRKLMTESQDWWPADYGHYGPLFIRMAWHSAGTYRTGDGRGGASTGTQRFAPLNSWPNNANLDKARRLLWPIKKKYGNKISWADLFILAGNVAIESMGGKTIGFGGGRVDVWHPEEDVYWGSEKEWLASERYSGDRELENPLAAVQMGLTYVNPEGPDGKPDPKAAARDIRETFRRMGMNDEETVALIAGGHTFGKAHGAGPATHVGPEPEAAPIEAQGLGWISSYGKGKGSDTITSGIEGAWTPTPTQWDTSYFDMLFGYDWWLTKSPAGAWQWMAVDPDEKDLAPDAEDPSKKVPTMMMTTDLALRFDPEYEKIARRFHQNPEEFAEAFARAWFKLTHRDMGPKTRYLGPEVPKEDFIWQDPIPEVDYELTEAEIEEIKAKILNSGLTVSELVKTAWASASTFRNSDKRGGANGARIRLAPQKDWEVNEPERLAKVLSVYEDIQRELPKKVSIADLIVLGGSAAVEKAARDAGFDVKVPFFPGRGDATQEQTDVESFAVLEPFADGFRNYQKQEYSVPPEELLVDKAQLLGLTAPEMTVLVGGLRVLGANYRDLPHGVFTDRIGVLTNDFFVNLLDMNYEWVPTDSGIYEIRDRKTGEVRWTATRVDLIFGSNSILRSYAEFYAQDDNQEKFVRDFINAWVKVMNADRFDLVKKARESVTALQGSIYNRSIKGEALQ

SEQ ID NO: 7430 - protein, 271 aa, Sulfolobus tokodaii
MKYTKPVLVVHGGAGDWSKRDYEKGLTEIKKTLERGYEEFKKGSAIEAVVEAIAYMEDSGVFDAGIGSVKNSEGEVEMDAGIMHGNSWKVGAVASVKAKNPIKEALKVMLDGRHVLLVGERGERSITNFIGNNGGDTVGAVALDEQGNLVAGTSTGGISGKLPGRVGDSPIPGAGYYATPRVAVSSTGIGEIILRILPAKEVDMLVSMGFSIEDSVRAVINKITELFGKSNVGLIGIDYKGYATAYYNTVGMARGVKDKNIVRVFVFEGEI

SEQ ID NO: 7431 - protein, 339 aa, Zea mays
  unsure (1)..(339): unsure at all Xaa locations
MAGIGRNMVAPLLVLNLIMYIIVIGFASWNLNHFINGQTNYPGTXRKASSNHASCIYSCIDMHGAPLMRIALHCTQXVAGNGATFYFLVFAILAGVVGAASKLAGVHHVRAWRHDSLATNAASSLIAWAITALAFGLACKEIHIGGHRGWRLRVLEAFVIMYIIVIGFASWNLNHFINGQTNYPRRGAATARRSTSWCSPSWARRGGARRPSWRACNHVRAWRHDSLATKRRRRRSSPGPSRRSPSGPGLQGDPHRRTPRLAACAVLEGPSSSSSPSRELLYVLMLHTGPSSAGRRWLPGPRLPASAARPASPRGSPRVWRILIDAARTCVIISGAAGV

SEQ ID NO: 7432 - protein, 343 aa, Mycoplasma penetrans
MEYIKLGNSDLKVSRICLGCMGFGDNKSGVHKWILDYQQTKEIIKLALDKGINFFDTAPVYAEGTSEEFLGRAIQELTKRENVVIATKFFPRSREAYEKGITGQQWVQQNLEQSLKRLNTDYVDLYILHLWDYNTPIEDILEGLNNAVKSKKVRAIGISNCYAWQLQKANDIAKANGWSQFVSIQGHYNLIFREEEREMIPFCEENNVALTPYSVLASGRLVKESNETSARLESDYIAKLKYDSSKEVDEIIINRVKELAKKKGLSNTQIALGWLLNKGVHSPIIGATKIKHIEEAVSAVGIKLSEEEIAYLSDPYVPHKLVGVMGNNKKGQFFDMTLKNNKK

SEQ ID NO: 7433 - protein, 166 aa, Pyrococcus horikoshii
  unsure (1)..(166): unsure at all Xaa locations
XKVLFLTANEFEDVELIYPYHRLKEEGHEVYIASFERGTITGKHGYSVKVDLTFDKVNPEEFDALVLPGGRAPERVRLNEKAVSIARKXFSEGKPVASICHGPQILISAGVLRGRKGTSYPGIKDDXINAGVEWVDAEVVVDGNWVSSRVPADLYAWXREFVKLLK

SEQ ID NO: 7434 - protein, 251 aa, Brassica napus
MNSVSTFSELLRSENESPVNTEGGDYILAASCPKKPAGRKKFQETRHPIYRGVRLRKSGKWVCEVREPNKKSRIWLGTFKTAEIAARAHDVAALALRGRGACLNFADSAWRLRIPETTCAKDIQKAAAEAALAFEAEKSDTTTNDHGMNMASQVEVNDTTDHDLDMEETIVEAVFREEQREGFYMAEETTVVGVVPEEQMSKGFYMDEEWMFGMPTLLADMAAGMLLPLPSVQWGHNDDFEGDADMNLWNY

SEQ ID NO: 7435 - protein, 350 aa, Pisum sativum
MVASSQKILVTGSAGFIGTHTVVQLLNNGFNVSIIDNFDNSVMEAVERVREVVGSNLSQNLEFTLGDLRNKDDLEKLFSKSKFDAVIHFAGLKAVGESVENPRRYFDNNLVGTINLYEVMAKHNCKKMVFSSSATVYGQPEKIPCVEDFKLQAMNPYGRTKLFLEEIARDIQKAEPEWRIVLLRYFNPVGAHESGKLGEDPRGIPNNLMPYIQQVAVGRLPELNVYGHDYPTRDGSAIRDYIHVMDLADGHIAALRKLFTSENIGCTAYNLGTGRGSSVLEMVAAFEKASGKKIALKLCPRRPGDATEVYASTAKAEKELGWKAKYGVEEMCRDQWNWAKNNPWGYSGKP

SEQ ID NO: 7436 - protein, 202 aa, Zea mays
MRRESRGVEEDRGSGKMNRKPGDWDCRACQHLNFSRRDICQRCSEPRGVADRGSGGGGGGGGGDYASFGGRGGSSFGGGFGAAGSDVRPGDWYCSCGAHNFASRSSCFKCSAYKEEAAVNSGAGGFDGDMSRSRGYGFGSGAAGAGAGAARTTNRPGWKSGDWICTRSGCNEHNFASRMECFRCNAPRDSGSAAMTYENYLH

SEQ ID NO: 7437 - protein, 230 aa, Listeria monocytogenes
MYWKVILEQYGTNDPFLNSELGKAMVDGYQGDASKLHENLEQMAACVKHFAAYGAAEAGLEYNTVNMSTRELYQNYLPAYNAAIQAGAKLVMTAFNVVDGIPATMNKWLNRDVLRDEMGFDGVLISDWGAVAEVINHGTARNPKEAAQFSMEAGVDLEMMTTCYIHELKGLIEEGKLSESLLDEAVLRMLTLKNDLGLFEDQHVLLQHVLQMPLPYQVLCSHAPDASRWY

SEQ ID NO: 7438 - protein, 184 aa, Lupinus polyphyllus
MNLDDLFEQKGEVAKSVLEELEKVMGEYGYNIEHILMVDIIPDDSVRRAMNEINAAQRMQLASLYKGEAEKILQVKRAEAEAEAKYLGGVGVARQRQAITDGLRENILNFSHKVEGTSAKEVMDLIMITQYFDTIKDLGNSSKNTTVFIPHGPGHVRDIGEQIRNGLMESARAGINIERFCISP

SEQ ID NO: 7439 - protein, 374 aa, Kluyveromyces lactis
MLRLTSARSIVSPLRKGAFGSIRTLATSVPETQKGVIFYENGGKLEYKDIPVPKPKPNEILINVKYSGVCHTDLHAWKGDWPLPTKLPLVGGHEGAGVVVAMGENVKGWNIGDFAGIKWLNGSCMSCEYCELSNESNCPDADLSGYTHDGSFQQYRTADAVQAARIPKGTDLAEVAPTLCAGVTVYKALKSANLKAGDWVAISGAAGGLGSLAVQYAKAMGYRVVGIDGGEEKGKLVKQLGGEAFVDFTKTKDMVAEIQEITNGGPHGVINVSVSEAAMNASTQFVRPTGTVVLVGLPAGAVIKSEVFSHVVKSINIKGSYVGNRADTREAINFFANGHVHSPIKVVGLSELPKVYELMEQGKILGRYVVDTSN

SEQ ID NO: 7440 - protein, 167 aa, Triticum aestivum; identical to SEQ ID NO: 2553

SEQ ID NO: 7441 - protein, 295 aa, Nicotiana tabacum
EKPKSGGVWPTVKPFVNGGASGMLATCVIQPIDMIKVRIQLGQGSAVDVTKTMLKNEGFGAFYKGLSAGLLRQATYTTARLGSFRILTNKAIEANEGKPLPLYQKALCGLTAGAIGACFGSPADLALIRMQADATLPLAQRRHYTNAFHALSRIVADEGVLALWKGAGPTVVRAMALNMGMLASYDQSVEFCRDNLGMSEAATVVGASSVSGFFAAACSLPFDYVKTQIQKMQPDAEGKLPYSGSFDCAMKTLKAGGPFKFYTGFPVYCVRIAPHVMMTWIFLNQIQKAEKKLGL

SEQ ID NO: 7442 - protein, 132 aa, Beta vulgaris
EGVTDLQPGDHVLPVFTGECKECAHCKSEESNMCDLLRINTDRGVMLNDGKSRFSINGKPIFHFVGTSTFSEYTVVHVGCLAKINPEAPLDKVCILSCGISTGFGATVNVARPKKGQTVAIFGLGAVGLAVR

SEQ ID NO: 7443 - protein, 188 aa, Zea mays
MVNLRTQKRLASAVIGCGKRKIWLDPNEQSEISNANSRQTIRKLISDGLIIRKPVTQHSRSRARELNLARREGRHRGYGKRKGTADARMPSQVLWMRRLRVLRRLLVKYRASGKIDKHLYHELYHSSKGNAFKHKRALVEHIHRAKAEKARETALQEEMDAKRAKNKAARERKQERAVAKRNALLAEE

SEQ ID NO: 7444 - protein, 220 aa, Triticum aestivum
  unsure (1)..(220): unsure at all Xaa locations
MAETEYRCFVGGLAWATDDHNLQQAFSQYGEILDAKVTNQPTPRSVGISRPICCPCGRSVPILGLCGGSDRIWWXXVFCACVQIINDRETGRSRGFGFVTFGSEESMRQAIEEMNGKELDGRNITVNEAQSRRSGGGGGGGGYGGQRGGGGGYGGGGGGYGGQGGGGYGQGGGGGYGQGGGGYGGQRGGGGYGGGGGGYGGGGGGYGGQRGGDSGGQWRN

SEQ ID NO: 7445 - protein, 1171 aa, Oryza sativa; identical to SEQ ID NO: 2303

SEQ ID NO: 7446 - protein, 292 aa, Solanum demissum
LNSSYRVPFESFRVPFVDLQEATNNFDEKFRIGVGIFGKVYRGVSRDGTKVALKRRNRESPQGIEEFQAEIEILSFCSHPHLVSLIGYCDERNEMILVYEYMENGNLSSHLYGSDLRLPTMSWEQRLEICIGAARGLHYLHNSAVIHRDVKSTNILLDENFVAKITDFGISKTMSELDQTHLSTTVKGSIGYIDPENFIRRQLTEKSDVYSFGVVLFEVLCARPAIVQSLPRETVCLAEWAVDSHNKGQLEQIIDPNLAAKIRPESLRKFGETAVKCLALSSEDRPSMGDVL

SEQ ID NO: 7447 - protein, 330 aa, Enterococcus faecalis V583
MSILVLGGAGYIGSHAVDQLISKGYAVIVVDNLLTGYRSAVHEQATFYEGDIRDKAFLRSVFEKESIEGVLHFAANSLVGESVEKPLMYFNNNVHGTQIALEVMQEFGVKHIVFSSTAATYGEPKAMPITEETPTNPKNPYGESKLMMEKIMKWCDNAYEMKYVALRYFNVAGAKKDASIGEDHTPETHIVPIILQVALGQRAELSIFGDDYDTPDGTCIRDYVYIEDLIAAHILALEYLKNGGESDVFNLGSNNGYSVKEMLDAAREVTGQEIPATIAPRRAGDPSTLIASSEKAKRVLGWQPEVTEVKDIIATAWQWHQAHPHGYQEK

SEQ ID NO: 7448 - protein, 276 aa, Sinorhizobium fredii
WGFDGSSTNQAEGRSSDCVLKPVAVYPDPVRTNGVLVMCEVMMPDGKTPHPSNSRATILDDEGAWFGFEQEYFFYKNGRPLGFPEQGYPAPQGPYYTGVGYSNVGDVARKIVEEHLDICLAAGINHEGINAEVAKGQWEFQVFGKGSKKAADEVWMARYLLQRLTEKYGIDVEYHCKPLGDTDWNGSGMHCNFSTAYMREVGGKDYFEALMAAFDKNLQEHIDVYGPDNHLRLTGKHETAPWNKFSYGVADRGASIRVPHSFVNNGYKGYLEDRRP

SEQ ID NO: 7449 - protein, 439 aa, Neurospora crassa
MDTLQYGARDLPWSSIPTDLLRAELSKRVDATDKSRPQCGSGEKGEYNTGLHVFALVLILLLSTLSCGFPLFSRRAMKGSRLQRKIIFFSQYFGTGVLMATAFVHLLPTAFLSLTDPCLPYVFSEGYKPLAGLVSMTAALAVVALESYLTTRGATHSHSHTIFEDEEENGHMHNDTHHDFKDTPERIPLQDREVTQGLIGQQSPIASTSAHHSPSDQPRAVGDNESANSLDLDLTFDELQPIPNTDHDQLLEPSNTSPHRTGLKPAVAPDSPNPEEQKRMLLQCLLLEAGILFHSVFIGMALSVATGPPFIVFLIAIGFHQTFEGLALGTRIAAIHFPRSSPRPWLMVLAFGTTTPIGQAIGLLIHTFYDPLSQTGLLMVGFMNAISSGLLLFAGLVQLLAEDFLSEKSYATLHGRKRLHAYLAVVAGAGLMSAVGAFA

SEQ ID NO: 7450 - protein, 388 aa, Archaeoglobus fulgidus DSM 4304
MIEIGIAGKPNAGKSTFFKAATLADAEIANYPFTTIKPNVGIGHVRVKCVCQELGVKCNECVDGWRFIPVKLIDVAGLVPDAHKGRGLGNEFLDNLRQSEAVIHVVDASGSTDEEGNEIGVGERNPVEDVKFLYREIDMWLFGILKRNWDKIIRRMKAEKRDAAKFLTEQLAGLGFEEWMVREAMRSFGDVSTLSDEQLRDFAVELRKRRMQMVIAANKADKAPKNLLEELMKLDEIVVPTSAAYELILRTAAKNGYIKYLPGDSDFEIVKELNEKQMKALEKIREFLREFGSTGVQEAINRVVFDLLDYIVVYPVEDENKFTDSKGNVLPDAMLVKRGTTAKELAFKIHTDIGKHFIYALDARTKMRVADDYELKNNDVIKIVSGAK

SEQ ID NO: 7451 - protein, 248 aa, Triticum aestivum
  unsure (1)..(248): unsure at all Xaa locations
TPAATPLISLGGRAFLGPLAGLLGRPLGYREGADFVGGYPLRLREGAPTAVSHGLWLNIPDYDAPTQMGKPRERNSMYVDAVLTIPKGTLFPMCGMNLAFDRQLIGPAMDFGLMGDGQPIGRYDDMWAGWCXVKVICDHLXLGVKTGLPYLWHSKASNPFVNLKKEYKGIFWQEDIIPFFQAAKLTKECDTVQKCYISLSQQVKEKLGKIDPYFVKLADAMVTWIEAWDMLNSKDSKEADANGKLKGR

SEQ ID NO: 7452 - protein, 240 aa, Oryza sativa
  unsure (1)..(240): unsure at all Xaa locations
MAAANGSACGGGGVDKEKEEFKQIYGVLKEELLRDPAFEFTDSSRQWIDRMLDYNVPGGKCNRGLSVVDSYKLLKGTNVLSQEDIFKLTFSCLMISWMILTLDVVSLXLVSGASEENFTMLISLIYSXEDDYLDCYGDPKFIGKIGTDIEDYKCSWLVVQALERADESQKSVLFENYGKKDPACVAKVKSLYRELNLEAVFLDYENESYKKLIADIEAQPSIAVQNVLKSFLHKIYKRQK

SEQ ID NO: 7453 - protein, 250 aa, Zea mays
MAKNYPTVSAEYSEAVDKARRKLRALIAEKSCAPLMLRLAWHSAGTFDVSSRTGGPFGTMKHQSELAHGANAGLDIAVRLLEPIKEEFPILSYADFYQLAGVVAVEVTGGPEIPFHPGREDKPQPPPEGRLPDATKGSDHLRQVFGKQMGLSDQDIVALSGGHTLGRCHKERSGFEGAWTTNPLVFDNSYFKELLSGDKEGLLQLPSDKALLSDPVFRPLVEKYAADEKAFFDDYKEAHLKLSELGFADA

SEQ ID NO: 7454 - protein, 148 aa, Fagus sylvatica
MADQLTDDQISEFKEAFSLFDKDGDGCITTKELGTVMRSLARTQLRQSCRTLINEVDRDGNGTIDFPEFLNLMARKMKDTDSEEELKEAFRVSTKDQNGFISAAELRHVMTNLGEKLTDEVDEMIREADVDGDGQINYEEFVKVMMAK

SEQ ID NO: 7455 - protein, 366 aa, Ipomoea batatas
MAFRFSLLFLCTLLATTYLVFAAEDDGDDILIRQVVGDGGDLLNADHHFTVFKRRFGKVYASDEEHDYRLSEFKANMRRAKQHQELDPAAVHGVTQFSDLTPTEFRRKFLGLNRRLKFPADAKTAPILPTDELPSDFDWRDHGAVTPVKNQGTCGSCCSFSTTGALEGANFLATGKLVSLSEQQLVDCDHECDPEEAGSCDSGCNGGLMNSAFEYTLKAGGLMREEDHPYTGNDLQVCRFDKTKIAAKVANFSVVSLDEDQIAANLVKNGPLAVAINAVFMQTYIGGVSCPYICSKRLDHGVLLVGYGSAGYAPIRMKEKPYWIIKNSWGESWGENGYYKICRGRNVCGVDSMVSTVAAVSTTTSD

SEQ ID NO: 7456 - protein, 266 aa, Gossypium robinsonii
LSVEEIEVAPPQKNEVRVKIHFTSLCHTDVYFWEAKGQNPLFPRILGHEAGGVVESVGEGVMDVQPGDHVLPIFTGECKECPHCLSEASNMCDLLRINTERGGMLHDGQTRFSKDGKPIYHFLGTSTFSEYTVVHVGQIAKINPEAPLDKVCVLSCGMSTGFGATVNVAKPKKGGSVAVFGLGAVGLAAAEGARVCEASRIIGIDLNPNRFEEAKKFGCTEFVNPKDHNKPVQEVIAEMTGGGVDCSIECTGSTQAMVSAFECVHD

SEQ ID NO: 7457 - protein, 392 aa, Mascagnia bracteosa
DLEPVNPADVPVTAAGALKSYKLAAKAISRLQSLPSGNISLLCDVLVKEVRDLTRYDRVMVYKFHEDEHGEVVSECRRSDLESYHGLHYPATDIPQASRFLFMKNKVRMICDCLAPPVKVIQDKRLPQPLSLCGSTLRSPHGCHAQYMTNMGTIASLVMSVTVNEEDDMMDGDQQQMTRKLWGLVVCHHTSPRFVPFPLRYACEFLIQVFGVQINKEVELAAQVREKHILQIQTMLCDMLLRDAPVAIITQSPNVMDLVKCDGAALYFKNKTWLLGVTPTEEQIRDIAEWLLEYHSGNTGLSTDSLMEAGYPGASVLGDAVCGMAAVSITSRDFLFWFRSHTAKEIKWGGAKHDPDDKDDGRKMHPRSSFKAFLEVVKWRSMPWDDVEMDAI

SEQ ID NO: 7458 - protein, 541 aa, Neurospora crassa
MFFTKPRLHRIITHNLHHLLSPHLLLSEISGSLGDLGTLLPLLLALSLQGSIDLPSTLLFSGLFNILTGLVFGVPLPVQPMKAIAAASLQENADLETTVAAGAWVGFAVLLLGGTGGLKRVMRWVPGAVVRGVQVGAGMSLVVAAGGGMVRPLGWLWTPEENENGHGGLGEWLDSRALAVLAFGGLVVGLGQQQQQQQQSGEKPQERRKKRSKMPVQVPYALVLFLVGIMFAVVRVSLSKDSPQSPPPPPHDQPTNSAPPWTWIWNPLNHIHPKVFRSLLNPQALSMAIAQLPLTTLNSIIAASALASDLFPPDSYPQLYADDESSDSPLSPSPSASSSSLSSAPPQTPSAETPKPLSSPTSAEEGPVPLTPLSLSISAMNLLSAPFGCMPLCHGSGGLAAQHRFGARSGTSIILLGLTKFLLGLFFPGPGLLGLLGKFPKAFLGVMVLGAGVELARVGVRNVEGEEQDRMVMLMTAGTILAFKNDGVGFLAGMGCYGGFRVAAWLGGGTEKGRGGEQGLLGEEEEEEEQGRVDEESPLLR

SEQ ID NO: 7459 - protein, 742 aa, Streptomyces avermitilis MA-4680
MTHPWQDPALPAAVRAADLLARMTPQEKTAQLYGVWPGSDEAPGGDVAPLQHALSEGVDLAGLLPHGLGQLTRPFGTAPVDPAEGAARLGFLQERIRAANRFRLPALAHEECLTGFTAWQATIFPTPLAWGASFDPDLVKEMAAAIGASMRAVGVHQGLAPVLDVVRDPRWGRTEESIGEDPYLVATVGTAYVQGLQSSGVVATLKHLAGYSASRGARNHAPASLGPRELADVILPPFEMAVREGGARSVMAAYNDIDGLPAHAHHRLLTHLLRDEWQFTGTVVSDYFGVSFLESAHGLADSPAGAAALALAAGVDVELPAVRCFGAGPFDEELVDRAALRVLTQKCELGLLDPDWAPPATEAPVDLDPPHMRALARQLAQESVVLLANDRGLLPLAPGARRIAVLGPHADDPAAMLGCYTFPRHVLLDRPGVPMGVAVPTLLEALRTELPDAEFVTDPAAAEVCVVAVGDRSGLFGRGTSGEGCDAADLELPDGQGEVVDRALASGTPVVLVLLSGRPYALGRWADRCAAVVQAFFPGEEGGPAVAGVLSGRVNPSGRLPVSVPRGPAGQPWTYLAPPLGRHGEASNLDPTPLYPFGHGLSYTTYDWQAPSVDDASFPTDGETTLRLTVRNTGERPGTEVVQLYLHDPVGKVARPVVRLVGYARVPLEPGASGEVHFTVPADLAAYTGPDGERIVEPGALELRLGVSSADGDVRYTVPVTLTGPERVVGRERRLRCEVRVK

SEQ ID NO: 7460 - protein, 364 aa, Dicarpellum pancheri
VQSQKLAVRAISQLQSLPGGDIKLLCDTVVECVGDLTGYDRVMVYRFHEDEHGEVVAESKRPDLEPYLGLHYPATDIPQASRFLFKQNRVRMIVDCHASPVRVIQDDGLMQALCLVGSTLRAPHGCHAQYMENMGSIASLAMAVIINGNDEEATAGRNPTRLWGLVGCHHTSARCIPFPLRYACEFIMQAFGLQLNMELQLAAQLLEKHVLKTQTLLCDMLLRDSPTGIVTQSPSIMNLVKCDGAALYYQGNYYPLGVTPAEAQIKDIVEWLLAFHGDSTGLSTDSLADAGYPGAALLGDAVCGMAVAYITNRDFLFWFRSHTAKETKWGGAKHHPEDKDDGQRMHPRSSFKAFLEVVKSRSLP

SEQ ID NO: 7461 - protein, 683 aa, Debaryomyces hansenii
MSDAKDTEDNLSPRFENLNIRTPKAANPENMQSPQRLSHSQINGDIQARILAFQQKRTKPVNGGHGGLNSIPASSNHLSEAPDKPLPPLPPLPSLPKLPNVQAQQRSYSLGDANDLGVIPSPMETENIHTTNQTMNQTMNRGINQSIGQGMSRASSIKKQDSQQLPFELLKKPSLSQRRGMKLNLSEMSSPNSASSPDDTSPIGDDKKNPVFLNAPKGNDIESGAMNTTGDLSRMLSDRKKKPNFKLNLGNTGVPGVNGMQNSQSNSNTNSTASSLDSSGSSSTAGTNNETNQSKKPQLQGLFANYSKYVDIKSGSLNFAGKASLHSKGIDFLSGLLFRISLEELEFLEELGHGNYGVVLKVLHKPTGVLMAMKEVRLELDETKFTQILMELEILHKCDSPYIVDFYGAFFVEGAVYMCMEYMDGGSLDKIYGKDDGVKDEACLAYITECVISGLKELKDEHNIIHRDVKPTNILVNSLGKVKLCDFGVSGNLVASLAKTNIGCQSYMAPERIKSLSPTDNTYSVQSDIWSLGLSILEIAAGHYPYPAETYGNIFSQLSAIVDGDPPKLDPKIFSKDAQLFIKSCLNKNPDLRPSYATLLKHPWLVKYRNIDPHMGEFVTKKIQELEEEKNKKNLSRSNSTSSSAATAKPPKENVRSLLKGKVQAPALHRGGLMNSSRNNANR

SEQ ID NO: 7462 - protein, 96 aa, Zea diploperennis
MGRRACCEKEGVKRGAWTTKEDDALAAYVKAHGECKWREVPQKAGLRRCGKSCRLRWLNYLRPNIRRGNISYDEEDLIIRLHRLLGNRWSLIAGRL

SEQ ID NO: 7463 - protein, 172 aa, Triticum aestivum
RVAPCNWSSRLLVLPPAPASPPSPASAVISPSESGTAFPLFPNKKPAKSSKKKEAPAAPAMTAAEAAAAEGRRCLHCETDKTPQWRTGPLGPKTLCNACGVRYKSGRLVPEYRPAASPTFVPSKHSNSHRKVVELRSQKDTPAPLAAAPFPAPVAVAEVIEAGPGASGAAHR

SEQ ID NO: 7464 - protein, 311 aa, Oceanobacillus iheyensis HTE831
MAQNVTLGKSNVVINPIGLGANAVGGHNIYPNLDEEVGKSLIQTGIENGLNFIDTAYGYGNGRSEELIGQALKRTGNRSDVVLATKAAQTVIDGEAGFNNSPSFLKQAVDDSLKRLQTDYIDLFYIHFPDESTPKDEAVGALKELKDAGKIRSIGISNFSPEQVKEANKDGYVDVLQGHYNLLKRDAETNYFPYTLDNNITFIPYFPFASGILAGKYSVNSTFEDFRSNMPHYQGDQFKQILAKVDQLKQLASDKNTEVAHIVLAWYLKHDAIDAVIPGAKRPEQVINNLKALNVTLTDNEFRMISELFAK

SEQ ID NO: 7465 - protein, 325 aa, Bacillus subtilis subsp. subtilis str. 168
MKYTFNEEKAFDIVAIGRACIDLNAVEYNRPMEETMTFSKYVGGSPANIAIGSAKLGLKAGFIGKIPDDQHGRFIESYMRKTGVDTTQMIVDQDGHKAGLAFTEILSPEECSILMYRDDVADLYLEPSEVSEDYIANAKMLLVSGTALAKSPSREAVLKAVQYAKKHQVKVVFELDYRPYTWQSSDETAVYYSLVAEQSDIVIGTRDEFDVMENRTGGSNEESVNHLFGHSADLVVIKHGVEGSYAYSKSGEVFRAQAYKTKVLKTFGAGDSYASAFIYGLVSGKDIETALKYGSASASIVVSKHSSSEAMPTAEEIEQLIEAQS

SEQ ID NO: 7466 - protein, 1132 aa, Physcomitrella patens
MSTPKKTYSSTSSAKSKAHSVRVAQTTADAALQAVFEKSGDSGDSFDYSKSVSKSTAESLPSGAVTAYLQRMQRGGLTQSFGCMIAVEGTGFRVIAYSENAPEILDLVPQAVPSVGEMDTLRIGTDVRTLFTASSVASLEKAAEAQEMSLLNPITVNCRRSGKQLYAIAHRIDIGIVIDFEAVKTDDHLVSAAGALQSHKLAAKAITRLQALPGGNIGLLCDTVVEEVRELTGYDRVMAYRFHEDEHGEVVAEIRRADLEPYLGLHYPGTDIPQASRFLFMKNKVRIIADCSAPPVKVIQDPTLRQPVSLAGSTLRSPHGCHAQYMGNMGSIASLVMAVIINDNEEDSHGSVQRGRKLWGLVVCHHTSPRTVPFPLRSACGFLMQVFGLQLNMEVESAAQLREKHILRTQTLLCDMLLRDAPIGIVSQIPNIMDLVKCDGAALYYGKPFWLLGTTPTESQIKDIAEWLLEYHKDSTGLSTDSLADANYPAAHLLGDAVCGMAAAKITAKDFLFWFRSHTAKEIKWGGAKHDPGENHDGRKMHPRSSFKAFLEVVKRRSLPWEDVEMDAIHSLQLILRGSFQDIADSDTKTMIHARLNDLKLHDMDELSVVANEMVRLIETATAPILAVDSNGMINGWNAKIAQVTGLPVSEAHGRSLVKDLVTDESVAVVERLLYLALRGEEEQNVEIKLKTFGTQTEKGVVILIVDACSSIHVSENVVGVCFVGQDVTGQKMFMDKFTRIQGDYKTIVQNPHPLIPPIFGADEFGYCFEWNPAMEGLTGWKKDEVVGKLLVGEIFGMQMMCCRMKSQDAMTKFMIALNTAMDGQSTDKFTFSFFDREGKYVDVLLSTNKRTNADGVITGVFCFLQIASSELQQALKVQRATEKVAVAKLKELAYIVREIKNPLCGLTFTRQLLEDTDLSDDQQQFLDTSAVCEQQLQKSLNDMDLESIEDGYLELDTAEFEMGTVMNAVISQGMTTSREKGLQIFRETPREINTMRLLGDQIRLQQVLSDFLLNTVRFTPSPEGWVKIKVVPTRKRLGGSVHVVHLEFRVSHPGAGLPEELVLEMYDRGKGMTQEGLGLNMCRKLVRLMNGDVHYVREAMQCYFVVNVELPMAQRDDASSQCRSLYSYLLA

SEQ ID NO: 7467 - protein, 148 aa, Zea mays
MSSVVVKQAPAVGKTRMDHIGFDELRKYFYMPITRAAREMNVGLTVLKKRCRELGVARWPHRKMKSLKSLMANVQEMGNGMSPVAVQHELAALETYCALMEENPWIELTDRTKRLRQACFKESYKRRKAAAGNAIETDHIIVYNIGQH

SEQ ID NO: 7468 - protein, 518 aa, Zea mays
  unsure (1)..(518): unsure at all Xaa locations
MDPSSAGSGGNSLPSVGPDGQKRRVCYFYDPDVGNYYYGQGHPMKPHRIRMTHSLLARYGLLNQMQVYRPNPARDRDLCRFHADDYINFLRSVTPETQQDQIRLLKRFNVGEDCPVFDGLYSFCQTYAGASVGGAVKLNHGHDIAINWSGXGCTHAKKCEASGFCYVNDIVLAILELLKHHERVLYVDIDIHHGDGVEEAFYTTDRVMTVSFHKFGDYFPGTGDIRDIGHSKGKYYSLNVPLDDGIDDESYQSLFKPIMGKVMEVFRPGAVVLQCGADSLSGDRLGCFNLSIKGHAECVRYMRSFNVPLLLLGGGGYTIRNVARCWCYETGVALGQEPEDKMPVNEYYEYFGPDYTLHVAPSNMENKNTRQQLDDIRSKLLDNLSKLRHAPSVHFQERVPDTEIPEQDEDQDDPDERHDPDSDMEVDDHKAVEESSRRSILGIKIKREFGENATRVQDGGRVASEHRGLEPMAEDIGSSKQAPQADASAMAIDEPSNVKNEPESSTKLQGQAAAYHKP

SEQ ID NO: 7469 - protein, 417 aa, Shigella flexneri 2a str. 301
MADNKPELQRGLEARHIELIALGGTIGVGLFMGAASTLKWAGPSVLLAYIIAGLFVFFIMRSMGEMLFLEPVTGSFAVYAHRYMSPFFGYLTAWSYWFMWMTVGISEITAIGVYVQFWSPEMAQWIPALIAVALVALANLAAVRLYGEIEFWFAMIKVTTIIVMIVIGLGVIFFGFGNGGQSIGFSNLTEHGGFFAGGWKGFLTALCIVVASYQGVELIGITAGEAKNPQVTLRSAVGKVLWRILIFYVGAIFVIVTIFPWNEIGSNGSPFVLTFAKIGITAAAGIINFVVLTAALSGCNSGMYSCGRMLYALAKNRQLPAAMAKVSRHGVPVAGVAVSIAILLIGSCLNYIIPNPQRVFVYVYSASVLPGMVPWFVILISQLRFRRAHKAAIASHPFRSILFPWANYVTMAFLIAF

SEQ ID NO: 7470 - protein, 465 aa, Lactobacillus plantarum WCFS1
MGIFQRIFQKEDLERYLQKDSHFERTLSAVDLIALGIGAVIGTGIFILPGTVAATKAGPGIILSFVLAAIVCAVAAMCYAEFASVLPIAGSAYSYGNIVYGEMIGWIIGWALVLEYVLAVATVAVGWAAYFNSFIAGFGLKLPKAITGSFDPAHGTYINVIAILIVCLIAWIIDTGLKTSIRLNNIIVVVKLAIIVLFLLVGSFYVKPSNWTPFAPFGGTEILKGAAVVFFAYLGFDAVSSSAAEVKNAKRNMPIGIIGTLVICTIFYILVSGVLTGMVSYKQLNVDDAVAFALQLVHQNFVAGIISIGALAGMFTMMVTMIYSSSRLLYSIGRDGLLPRFLGKIDKHHAPKNAMLTVTIVNSILAGLIPLDQLANLVNIGTLIAFAFVSFGILLLRRNPKLNAIKGFRVPLYPVLPIISGLLCLFMMTQLSMETWLASLVWFLLGLIIYFGYGIRHSRMNKADE

SEQ ID NO: 7471 - protein, 326 aa, Mycoplasma genitalium
MSKIQVNNIEALNNAMDLALERDQNVVLYGQDAGFEGGVFRATKGLQQKYGSERVWDCPIAENSMAGIGVGAAIGGLKPIVEIQFSGFSFPAMFQIFVHAARIRNRSRGVYTAPLVVRMPMGGGIKALEHHSETLEAIYAQIAGLKTVMPSNPYDTKGLFLAAIESPDPVIFFEPKKLYRAFRQEIPSDYYTVPIGEANLISEGSELTIVSYGPTMFDLINLVYSGELKDKGIELIDLRTISPWDKQTVFNSVKKTGRLLVVTEAVKSFTTSAEIITSVTEELFTYLKKAPQRVTGFDIVVPLARGEKYQFEINARVIDAVNQLLK

SEQ ID NO: 7472 - protein, 373 aa, Zea mays
  unsure (1)..(373): unsure at all Xaa locations
MAKDGGPDWNGLLKWSLAHGDGTNPPRALSEEDRKWFMDAMQANTVDVVKRMKEITQVMKTPEDVLQSQGVTPENIEDMLDELQEHVESIDMANDLHSIGGLDPLLGYLKNSNAGIRAKAAEVVSTIVQNNPKSQQLVMESNGLEPLLTNFKSDPSTNARTKALGAISSLIRHNQPGVSAFRLGNGYAGLKDALGSDDARLQRKALNLIQYLLHNYKADRSXATELGLPKLMMHLVSSDDSLVREAALGGLLELARDKTSGNALPDQEKLKDMLKSRIEGISAMDTDDLHAAREERQLVDSLWKECYNEPSSLREKGLVVLPGEDAPQQPPPDVAGKMFEPPLRAXWAAARPAQEDDSDSGSGKKDPPLLLKF

SEQ ID NO: 7473 - protein, 681 aa, Leptospira interrogans serovar lai str. 56601
MAENLAQLFRESAEKYRDLPAFFSKDSKKNYYPTTYSQLYEQGIQLAEALIELGVQQKQKVGLLADNRIEWIIADYGVILTGAANVPRGTDITDSEIVYILNHSEVEVVFIENDKMLEKFNRNKSQLTNVKTLIMMDPTSNSPGVLKMQELIEKGKALRAGGSKKAEERIAAIDPEDLFTLIYTSGTTGLPKGVMLKHSNMMHQVNYVSPMLDIKAGARLLSILPIWHVFERVVEYVCIGLGAATYYTNVRDLRQDLATVKPTFMGSAPRLWENIYNGIYTRINDPAQTPALRRGLFKLAYFFSRKKNQALRFLKGIEVDYTGRNPIVSFFYGILMFFQFLLTGPFTLTVLAGALGAYFAGTELYFLTSPFYTVAGLALVLNSFTLDKVVLAKIRAATGGQLEASISGGGALPRHVDEFFGNIGINVLEGYGMTETSPVISVRTFEKLIIGSVGVIVPKTRLQIRNDNNAVLTEIDESGNITQGKMGLKGVVFIKGPQVMKGYFKNEEATSKAISDGWMNTGDMGMINFKKTLTLTGRAKDTVVLLGGENVEPVPIENKLQESAYISQCMVIGQDQKNLGAIVVPDFEKLQEWAKENGINESNNEKLIENPKIYDLYRKEIKALNNTKNGFKSFEQVTPFILISKPFEVGDELNNMMKMKRHVITEKYSDKIKKIYSTNQD

SEQ ID NO: 7474 - protein, 556 aa, Zea mays
  unsure (1)..(556): unsure at all Xaa locations
MAAQVVVAGGGGSWPQQWRLTLVLAALVPLLSLCLLLARTTRRAGSWSSSSKGGRLDVHRLPPGPPRLPLLGNLHQLGSLPHRSLRELARRHGPVMLLRLGSVPTLXGVSSXXXXXXXXXARDADCCXRPDTPGARRLSYGHKDVAFAPYTDYWRQMRKLFVVELLSARRVRAADHAREAEVDKLIARLSSAGGKPVQLEDHMFALMDGVIGTVAFGNIYGAEQFAHRNHFHDVLDEALSAKAGFSAEDYYPNAAGRLVDRLTGAAARRERVFRDLDAFFDTIIDQHLVVVDPSSSPPSSATTTPDLIDVFVDLMEESRHQPQVHGSLRFTRDHIKGLLSNVFTAGVDTSSVTMVWAMAELTRRPAMLRKAQEEVRSVVGGDRERVHPDDMPKLRYLKAVVKETLRLHPAAPLLLPRETMRHVSVCGYDVPAKTRVLVNAWAIGRDPRSWGPRAEEFDPGRFEDGGDVGFNGTHFELIPFGAGRRMCPGIAMGVATMEFTLANLLYCFDWELPEGVGVEDVSMEEAGSLTVHKKTPLLLVPTRYKANCQSRHSFQF

SEQ ID NO: 7475 - protein, 121 aa, Triticum aestivum
  unsure (1)..(121): unsure at all Xaa locations
LPAAEFXRICRDLGALSESVXIECTKEGVKFACSGDIGSGSVILKQDPSLEKESEAVLIEMNEPVSLTFSLKYLTNFCKASGLSDSVKLCLSSEVPLLVEYALQDQSYLRFYLAPKIGDEE

SEQ ID NO: 7476 - protein, 364 aa, Ajellomyces capsulatus
MTTPAVPSHPLTLDPKYDDYDFPTTAPDAQSGHPGHTTPEQDARVYQLRIMLEQLDYTERLDTLTLLRFLRARKFDVEAAKAMFVECEKWRQEFGTDDLVNTFEYPEKPQVFEYYPQYYHKTDKDGRPVYIEKLGKIDLNAMYKITTADRMLKNLVCEYEKLADPRLPACSRKAGKLLETCCSIMDLKGVGITRVPSVYGYVKQASAISQNYYPERLGKLYLINAPWGFSSVFSVVKGFLDPVTVQKIHVLGSGYEAELLAQVPKENLPKEFGGECECENGCEFSGMGPWQEKEWAKEPKWVTKAPDDTAKEEADKENKGKKGSEGQERQKEAAEAAETAVMQKETEKNEADTVKQKINGEVTA

SEQ ID NO: 7477 - protein, 337 aa, Rhodobacter sphaeroides
MKAAIFDGSPTLRLTDLPIQEPGPDEVLIRIDSATICGTDQHILEGKFWAKPPVVLGHEFAGYVERVGERVQNCRPGDLVSVEPHVYCGCCKPCRLGKPHLCLDRLAWGINLNGGFEQYATVRMDTVYQVPEGIGPEEAALGEITGCCMHGIDRVGVELGDLVVILGGGAAGLILARLAELRGAARIVISEPNAARREQIRAFGYPDVVDPLNEDLAARIGALTDGLGADVVIEAAGRAETAAQAVELVCHGGRVLFFGVAAPGTMAAIEPNRIFAREITVVGSIRNPYTHHRVMEILPRLRLKDIVTHRFPLENIAEAFDAAHRGEGLKICIKPNG

SEQ ID NO: 7478 - protein, 434 aa, Pseudomonas syringae pv. tomato str. DC3000
MNSKVDETPHLLRQRDQFVPRGIVTAHPLVIDRAQGSELWDVDGKRYLDFVGGIGVLNIGHNHPNVVKAIQAQLSKVTHACFQVASYQPYLDLAKRLSLMIAGQSGIDHKAVFFTSGAEAVENAVKIARARTNRPAIISFRGGFHGRTLLGTTLTGMSQPYKQNFGPMAPEVFHTPYPNEYRGVTTEVALAALHELLATQVAPDRVAAILIEPIQGDGGFLTAPVEFLKALRALTEQHGIVLILDEIQTGFGRTGKWFGFEHAGIQPDLVTVAKSLAGGMPLSGVVGRAEIMDAPLPGGLGGTYGGNALSCAAALAVIDTYEQDNLLARGEQLGEHLRAGLLRLKDRYACIGDVRGTGFMLAMELTKNDAARSPDADLNQKVIDQARIGGLLVIKCGVYRNVLRFLAPLVTTEQQIDEALSILDAALARVLKSS

SEQ ID NO: 7479 - protein, 754 aa, Sulfolobus solfataricus
MTAIKSLLNQMSIEEKIAQLQAIPIDALMEGKEFSEEKARKYLKLGIGQITRVAGSRLGLKPKEVVKLVNKVQKFLVENTRLKIPAIIHEECLSGLMGYSSTAFPQAIGLASTWNPELLTNVASTIRSQGRLIGVNQCLSPVLDVCRDPRWGRCEETYGEDPYLVASMGLAYITGLQGETQLVATAKHFAAHGFPEGGRNIAQVHVGNRELRETFLFPFEVAVKIGKVMSIMPAYHEIDGVPCHGNPQLLTNILRQEWGFDGIVVSDYDGIRQLEAIHKVASNKMEAAILALESGVDIEFPTIDCYGEPLVTAIKEGLVSEAIIDRAVERVLRIKERLGLLDNPFVDESAVPERLDDRKSRELALKAARESIVLLKNENNMLPLSKNINKIAVIGPNANDPRNMLGDYTYTGHLNIDSGIEIVTVLQGIAKKVGEGKVLYAKGCDIAGESKEGFSEAIEIAKQADVIIAVMGEKSGLPLSWTDIPSEEEFKKYQAVTGEGNDRASLRLLGVQEELLKELYKTGKPIILVLINGRPLVLSPIINYVKAIIEAWFPGEEGGNAIADIIFGDYNPSGRLPITFPMDTGQIPLYYSRKPSSFRPYVMLHSSPLFTFGYGLSYTQFEYSNLEVTPKEVGPLSYITILLDVKNVGNMEGDEVVQLYISKSFSSVARPVKELKGFAKVHLKPGEKRRVKFALPMEALAFYDNFMRLVVEKGEYQILIGNSSENIILKDTFRIKETKPIMERRIFLSNVQIE

SEQ ID NO: 7480 - protein, 483 aa, Glycine max
NTINKLESLPASYNMSNQPIVRSDSIFMTFESEMKHLVTVGLQAEYSYARSSACFSASLGPIAWKIASHRIQHALPAGCKFGRGWVGEYEPLSTPILMVNNRVQKENSLVMKLHSTTELPKGNQNCKNVESSIMHPVNGQMLEGKRPSMPDFKGKPFFGSAGVRLSAPVNILNQEQNAQSRKLGKSENKGLKQLELNSLTSSNQNNNGLVAKFTSNASTANAPAVESKPREMVPRNMFKQPDTNGIVSGELPNGKVTNTSLNRQVTGSSPESTSHQSSRAAPAVVHGQEQGLSDPVQLMRMFAERAQKQHTSSNHSLVDTPPVTLSGPSGQRNDSGNASAAAAHAWMSVGAGGFKQGPNNSSSPKNHISADSLYNSTRELHQHISRIRGEFPSGGMPFQPFQAGAVSQFPNRPMVFPQLASADQSRFQMQPPWGGLSPHSQSRQKQETLPPDLNIDFESPGSPVKQSPGVLVDSQQPDLALQL

SEQ ID NO: 7481 - protein, 400 aa, Mortierella alpina
MAPPNTIDAGLTQRHISTSAAPTSAKPAFERNYQLPEFTIKEIRECIPAHCFERSGLRGLCHVAIDLTWASLLFLAATQIDKFENPLIRYLAWPAYWIMQGIVCTGIWVLAHECGHQSFSTSKTLNNTVGWILHSMLLVPYHSWRISHSKHHKATGHMTKDQVFVPKTRSQVGLPPKENAAAAVQEEDMSVHLDEEAPIVTLFWMVIQFLFGWPAYLIMNASGQDYGRWTSHFHTYSPIFEPRNFFDIIISDLGVLAALGALIYASMQLSLLTVTKYYIVPYLFVNFWLVLITFLQHTDPKLPHYREGAWNFQRGALCTVDRSFGKFLDHMFHGIVHTHVAHHLFSQMPFYHAEEATYHLKKLLGEYYVYDPSPIVVAVWRSFRECRFVEDHGDVVFFKK

SEQ ID NO: 7482 - protein, 240 aa, Mycobacterium tuberculosis H37Rv
MPKPADHRNHAAVSTSVLSALFLGAGAALLSACSSPQHASTVPGTTPSIWTGSPAPSGLSGHDEESPGAQSLTSTLTAPDGTKVATAKFEFANGYATVTIATTGVGKLTPGFHGLHIHQVGKCEPNSVAPTGGAPGNFLSAGGHYHVPGHTGTPASGDLASLQVRGDGSAMLVTTTDAFTMDDLLSGAKTAIIIHAGADNFANIPPERYVQVNGTPGPDETTLTTGDAGKRVACGVIGSG

SEQ ID NO: 7483 - protein, 983 aa, Pseudomonas syringae pv. syringae B728a
MRAKCLNFRRGLNFQHTCHWLRSTDPDAGGSQARPVVRRRQDQPGPTAEFVVPARRAGEHRRRPCPGTTTMNNLNQPITSTARTLALSAFKQTLGLSLLTFSVMQANLALAAVTPATGNEVEARVSSILDNMNQSEKINFTRVNDGHMIPSLLKWGIKGTVAYDSSMGVHVNNATFGAQYPSQSALAATWSINRAKEFGLAIAYETRISGGQQMLSPGVNLYRTPYNGRSAEYVSGEDPFLGAVLAPAIVNGIQAQGIQASGKHYLANEQEANRQAIDVKVDERTLRELYLPGFESMVKNANVASIMCGFNKVNGDYACENHHLITEVLKGEWGYQGMVISDFNAIHDAFKGAWAGTDIDMPSGLQFTEANLLPYLWSGQLTQNVIDDKVKRNLRGIVSYDLQNHLNTAKTLEHPEYGMRAALNTARESIVLLRNENTAAGKPLLPLERSAKIAVIGNWAHDVPASPFGTANSPPNSYVTELSGLQQLASSSSDVTYLSEMSLNPASSVWYQPATGDNGISNAGVKAEYFSNTSFSGDPVLTRVEPGVNLNWTTGSNVTNAGSTAVSGFSPTAGAFSARFTTTIKPTISGAQAFKVRADGPYKLWVNDELIVQSDGVPYSGDVVNALTTSGKTAALSAGKTYTVKLEYQRVQGNFIPALGGLTGVQMSWASLRPPKDLSKYDAVVVATGTTSENEGEGSDHGFDLPDQQAELISFVAKANPNTIVVMHGGGVANMQPWANKVGATLQAWFPGQQGGQALAEILYGKVNPSGKLPVTIDKNIEDNPSYASYPDPAAYRGSNPLTEMTYSEGLYMGYRGYDKKHAKPLYPFGYGLSYTTFSYSDLKLSTNVLTPGSTIDVKFTVTNTGDKAGFEVAQLYVQPVKPAVDRPEKELKGFTKVYLQPGESKTVSVPIDSRSLAYYVDKTASWDVDAGKFKILVGADSENLTLNRTLITLYPEKLTTRDSNPLPLPLRKAVQVSAAQTY

SEQ ID NO: 7484 - protein, 341 aa, Mycoplana ramosa
MRVIFSEDHKLRNAKTELYGGELVPPFEAPFRAEWILAAVKEAGFDDVVAPARHGLETVLKVHDAGYLNFLETAWDRWKAAGYKGEAIATSFPVRRTSPRIPTDIEGQIGYYCNAAETAISPGTWEAALSSMASAIDGADLIAAGHKAAFSLCRPPGHHAGIDMFGGYCFINNAAVAAQRLLDKGAKKIAILDVDFHHGNGTQDIFYERGDVFFASLHGDPAEAFPHFLGYAEETGKGAGAGTTANYPMGRGTPYSVWGEALTDSLKRIAAFGAEAIVVSLGVDTFEQDPISFFKLTSPDYITMGRTIAASGVPLLVVMEGGYGVPEIGLNVANVLKGVAG

SEQ ID NO: 7485 - protein, 753 aa, Geobacillus stearothermophilus
MENQNRQNAAQCPFHGSVTNQSSNRTTNKDWWPNQLNLSILHQHDRKTNPHDEEFNYAEEFQKLDYWALKEDLRKLMTESQDWWPADYGHYGPLFIRMAWHSAGTYRIGDGRGGASTGTQRFAPLNSWPDNANLDKARRLLWPIKKKYGNKISWADLFILAGNVAIESMGGKTIGFGGGRVDVWHPEEDVYWGSEKEWLASERYSGDRELENPLAAVQMGLIYVNPEGPDGKPDPKAAARDIRETFRRMGMNDEETVALIAGGHTFGKAHGAGPATHVGPEPEAAPIEAQGLGWISSYGKGKGSDTITSGIEGAWTPTPTQWDTSYFDMLFGYDWWLTKSPAGAWQWMAVDPDEKDLAPDAEDPSKKVPTMMMTTDLALRFDPEYEKIARRFHQNPEEFAEAFARAWFKLTHRDMGPKTRYLGPEVPKEDFIWQDPIPEVDYELTEAEIEEIKAKILNSGLTVSELVKTAWASASTFRNSDKRGGANGARIRLAPQKDWEVNEPERLAKVLSVYEDIQRELPKKVSIADLIVLGGSAAVEKAARDAGFDVKVPFFPGRGDATQEQTDVESFAVLEPFADGFRNYQKQEYSVPPEELLVDKAQLLGLTAPEMTVLVGGLRVLGANYRDLPHGVFTDRIGVLTNDFFVNLLDMNYEWVPTDSGIYEIRDRKTGEVRWTATRVDLIFGSNSILRSYAEFYAQDDNQEKFVRDFINAWVKVMNADRFDLVKKARESVTALQLSDESRSINEKTAVSK

SEQ ID NO: 7486 - protein, 131 aa, Pyrus communis
MADQLTDDQISEFKEAFSLFDKDGDGCITTKELGTVMRSLGQNPTEAELQDMINEVDADGNGTIDFPEFLNLMARKMKDTDSEEELKEAFRVFDKDQNGFISAAELRHVMTNLGEKLTDEEVDEMIREADV

SEQ ID NO: 7487 - protein, 357 aa, Saccharomyces cerevisiae
MSQNSNPAVVLEKVGDIAIEQRPIPTIKDPHYVKLAIKATGICGSDIHYYRSGGIGKYILKAPMVLGHESSGQVVEVGDAVTRVKVGDRVAIEPGVPSRYSDETKEGRYNLCPHMAFAATPPIDGTLVKYYLSPEDFLVKLPEGVSYEEGACVEPLSVGVHSNKLAGVRFGTKVVVFGAGPVGLLTGAVARAFGATDVIFVDVFDNKLQRAKDFGATNTFNSSQFSTDKAQDLADGVQKLLGGNHADVVFECSGADVCIDAAVKTTKVGGTMVQVGMGKNYTNFPIAEVSGKEMKLIGCFRYSFGDYRDAVNLVATGKVNVKPLITHKFKFEDAAKAYDYNIAHGGEVVKTIIFGPE

SEQ ID NO: 7488 - protein, 1131 aa, Sorghum bicolor
MSSSRPAHSSSSSSRTRQSSQARILAQTTLDAELNAEYEESGDSFDYSKLVEAQRSTPSEQQGRSGKVIAYLQHIQRGKLIQPFGCLLALDEKSFRVIAFSENAPEMLTTVSHAVPNVDDPPKLGIGTNVRSLFTDPGATALQKALGFADVSLLNPILVQCKTSGKPFYAIVHRATGCLVVDFEPVKPTEFPATAAGALQSYKLAAKAISKIQSLPGGSMEALCNTVVKEVFELTGYDRVMAYKFHEDEHGEVFAEITKPGIEPYLGLHYPATDIPQAARFLFMKNKVRMICDCRAKSVKIIEDEALSIDISLCGSTLRAPHSCHLQYMENMNSIASLVMAVVVNENEEDDEPGPEQPPQQQKKKRLWGLIVCHHESPRYVPFPLRYACEFLAQVFAVHVNKEFELEKQIREKSILRMQTMLSDMLFKEASPLSIVSGSPNIMDLVKCDGAALLYGDKVWRLQTAPTESQIRDIAFWLSEVHGDSTGLSTDSLQDAGYPGAASLGDMICGMAVAKITSKDILFWFRSHTAAEIKWGGAKHDPSDKDDNRRMHPRLSFKAFLEVVKMKSLPWSDYEMDAIHSLQLILRGTLNDALKPVQASGLDNQIGDLKLDGLAELQAVTSEMVRLMETATVPILAVDGNGLVNGWNQKVAELSGLRVDEAIGRHILTLVEDSSVSIVQRMLYLALQGKEEKEVRFELKTHGSKRDDGPVILVVNACASRDLHDHVVGVCFVAQDMTVHKLVMDKFTRVEGDYKAIIHNPNPLIPPIFGADQFGWCSEWNVAMTKLTGWHRDEVIDKMLLGEVFDSSNASCLLKSKDDFVRLCIIINSALAGEEAENAPFGLFDRNGKYIECLLSVNRKVNADGVVTGVFCFIHVPSDDLQHALHVQQASEQTAQRRLKAFSYMRHAINKPLSGMLYSRETLKSTGLNEEQMRQVHVADSCHRQLNKILADLDQDNITDKSSCLDLDMAEFVLEDVVVSAVSQVLIGCQGKGIRVACNLPERFMKQKVYGDGIRLQQILSDFLFVSVKFSPVGGSVDISSKLTKNSIGENLHLIDFELRIKHQGAGVPAEILSQMYEEDNKEPSEEGLSLLVSRNLLRLMNGNIRHIREAGMSTFILTAELAAAPSAVGQ

SEQ ID NO: 7489 - protein, 386 aa, Xanthomonas campestris pv. campestris str. ATCC 33913
MRRPAFPASVMNSSGAVWQHKRRTLMPAFRAALVRESAMQASAATRSLLHELGDSCATQDMRTLMTGLCAQLGAGFLLGDSANAADLLRMLPMVDAISKQTRRQSLAPTWWPSSGRRRLRRLRADIDMALDRILMQSTQRPPRAASVLALLLAETARDDGDWCRDEAAAILMSALEPMSAALTWTLLLLAQHPHIAQEVAQEASALDGADVASGTSLLDRLPQSRACVKESMRLYPPAWITARIAQRDATLNGFHVPRGTQLLVSAWVVHRDGRHFPDPEIFLPARWLDDSATHSLTRYSYFPFGGGPRSCIGCMLALTQMTIVIATVLHACSLHLAPDARPSPFPALVLRPMDVRIALRPRVIRSVVPSRAHASPVRLASVTPND

SEQ ID NO: 7490 - protein, 512 aa, Vicia sativa
MELETLVAWLLFSATLLWLLLLATKTQSKSLKSPSSTTNSTIPKSYPIFGSIFSIAANFHRRVQWISDILQTTPSSTFILHRAFGSRQVFTANPLVVQHILKTNFPCYPKGLTLNRSLGDFLGNGIFNADGETWKLQRQISSHEFNAKSLRKFVETVVDVELSGRLLPILSEASKTEKILPDFQDILQRFTFDNICIIAFGFDPEYLLPSLPETAFAKAFDYGTRISSLRFNAAVPLIWKVKKILNIGTEQRLKEAVAEVRGLASRIVREKKQELLEKSALESLDILSRFLSSGHSDESFVIDIVISFILAGRDTTSAALTWFFWLLSKHSHVETEILKEVTAKSESVSYDEVKDMVYTHAALCESMRLYPPVPVDTKEVAYDDVLPDGTFVKKGWRVAYHIYAMGRSEKIWGSDWAEFRPERWLRRDEDGMWSFVGMDPYAYPVFQAGPRVCLGKEMAFLQMKRVAAGVLREFRVVPAMENGIEPEYTAHLTALMKGGFPVRIEKRSHTDE

SEQ ID NO: 7491 - protein, 109 aa, Triticum aestivum
MAGAVPLAPPMVAAARPAAGSLYEALRVGRAATQVEIRTAYRSMAKRLHPDVASCGHGGPEAFLEIRRAYETLSDPAARARYDCSLGVFRGGGAGGVMRVRRWETDQCW

SEQ ID NO: 7492 - protein, 383 aa, Xanthomonas campestris pv. campestris str. ATCC 33913
MRILVTGGTGYIGSHTCVELARRGHEICIVDNLSNSSERVLDHLAHLIGARPAFHCMDVRAPELAELMQRERIEAVIHFAALKAVGESVREPLRYFNNNVTGTLALLRAMRSAGVANLVFSSSATVYGDENSSPIEEHAPLKAINPYGRTKLMMEEMIGDLSAAWPQFNAALLRYFNPVGAHPSGYLGEDPRGVPNNLMPYIAQVAVGRRDALQVFGDDYPTPDGTGVRDYLHVMDLARAHVDAIEYLHHERQGLVVNLGTGRGHSVLEVAAAFERASGRRIPLQFAPRRDGDVAVYYASTALANRLLGWKAQYDLERMCADTWRWQSLHPEGYAQSRLVRPRATAPMGERVAPLRKLLPGSDGRRRHEPARALLPAHGHSGA

SEQ ID NO: 7493 - protein, 356 aa, Saccharomyces cerevisiae
MTDLTTQEAIVLERPGKITLTNVSIPKISDPNEVIIQIKATGICGSDIHYYTHGRIANYVVESPMVLGHESSGIVALIGENVKTLKVGDRVALEPGIPDRFSPEMKEGRYNLDPNLKFAATPPFDGTLTKYYKTMKDFVYKLPDDVSFEEGALIEPLSVAIHANKLAKIKFGARCVVFGAGPIGLLAGKVASVFGAADVVFVDLLENKLETARQFGATHIVNSGDLPHGVTVDSVIKKAIGKKGADVVFECSGAEPCVRAGIEVCKAGGTIVQVGMGQEEIQFPISIIPTKELTFQGCFRYCQGDYSDSIELVSSRKLSLKPFITHRYSFKDAVEAFEETSHHPLNNIKTIIEGPE

SEQ ID NO: 7494 - protein, 228 aa, Thermoplasma acidophilum
MMESKTFRSIWKIWKEKPRITDACSQRDPDQGSWNSNYGPDQENNFIDISVQRRMIYEFEGRIPEIDPSAYVSESATVIGKVKIGKEVWIGPGAVLRGDYGEIEVGDYSAIEDNCVIHARPGEKTTIGQHVTIGHLSVIHTGRIRDWAVIGMGSTVSDFAVVGVWAAIGEGAVVKNRQEIPDEAVAVGVPAKVIGKIDDDYKKLWTDYKHNYNTFSSRYKTNLKPINR

SEQ ID NO: 7495 - protein, 358 aa, Prunus armeniaca
MARVTLVLSAALVLVAISCGAAASSFDESNPIRLVSDGLRELEQQVVQVLGNSRRALHFARFAHRYGKKYESVEEMKLRYEIFSENKKLIRSTNKKGLPYTLAVNRFADWSWEEFRRQRLGAAQNCSATTKGSHELTDAVLPESKNWREEGIVTPVKDQGHCGSCWTFSTTGALEAAYVQAFRKQISLSEQQLVDCAGAFNNFGCHGGLPSQAFEYIKYNGGLDTEAAYPYVGTDGACKFSAENVGVQVLDSVNITLGDEQELKHAVAFVRPVSVAFQVVKSFRIYKSGVYTSDTCGSSPMDVNHAVLAVGYGEEGGVPFWLIKNSWGESWGDNGYFKMEFGKNMCGVATCASYPIVA

SEQ ID NO: 7496 - protein, 429 aa, Salmonella enterica subsp. enterica serovar Typhi
MDTLQQSPPAEPEGGLRRNLKKRHLLMMSLGGTIGTGLFIGIAEPLSSVGPAGTLLAYLFAGTIMLATMMCLGELSCAFPHSGSFQHYALMFMPSPCWSYTIGWLYWFSWVFSLAADLTAAGFIAHQFFPAVPVYMFCLAILLILTAINLTSAKSFGECEYWLSAIKVFAIVLFICAGGVMIYSLMGHSDWHPTLKTDGMWFPHGWEQIVVCMTIVIYSFQGVELVGNAAGETESPHIILPKVILGIGLRIILFYGLAIAVLALVYPHELTPNGQSPFVWVFSHAGIPGADTLMTLVIFSAAVSAANSAIYASSRMLWSMAGDRFAPACFGKTNGGGVPVYAILITALLALVSLLTRYIPAQQFYLYLIASTGQVGCLAWITIGWCQYRFRQSVRNGTYASDLLRYRSPLFPWTARFVIITNFAIMVGT

SEQ ID NO: 7497 - protein, 483 aa, Glycine max
MLDLNLNAEWTDSFSNGESPLPLEKFPDGLRNQMAESGTSNSSVVNADGSSNGGGDEDSDSTRAADDVYTTFNFDILKVEGANGFVTKELFPVMSEGAKGHATSSFSGRNGFVDLSFDREGGDSEMKMLQPQNQPQTQTQTQQPAKKSRRGPRSRSSQYRGVTFYRRTGRWESHIWDCGKQVYLGGFDTAHAAARAYDRAAIKFRGVDADINFNLSDYEDDLKQMKNFSKQEFVHILRRQSTGFSRGSSKYRGVTLHKCGRWEARMGQFLGKKYIYLGLFDSEVEAARAYDKAAIKCNGREAVTNFEPSTYEGELKSAAINEGGSQNLDLNLGIATPGPPKENWGQLQFPSFPYNTHGGRSSMMETNVSSGIGNPSLKRMVATEDRPSLWNGMSPNFFPNGERAERIGVDPSNGLPNWAWQTHGQVNATPVPTFSAAASSGFSISATFPSAAIFPTSSMNSIPQSLCFTSSSMPTRNASEYYY

SEQ ID NO: 7498 - protein, 357 aa, Lactobacillus gasseri
MSEVVAATEYLKFWWPKVNVFWSGIIIILFLVLANLASAKAYASLEFWFAMIKVVTIILMIILGFIVIFFGVGNGGKPTGFSNLWSHGGFFTGGVKGFFFSMSIIVGSYEGIELLGISAGEVANPQEAIVKSVKSVLWRILIFYVGAIFVIVTIYPWNELSSIGSPFVTTFAKVGITAAASIINFVVLTAALSGANSGIYSSSRMLFKLAHDGDAPKTFGHISKRIVPNHAILGISGGILIGFVVNMIAATINKSTQDLFVIVFSSSVLPGMIPWFVILLAELKFRHNNQELLVDHPFKLPLYPISNYFAFLMLIVIVVFMLINPETRVSVLVGAAVLIIATIVYLIRHRKDGVDGK

SEQ ID NO: 7499 - protein, 1022 aa, Neurospora crassa
MSQPIERVFPIRLSILESSAFLRNVSDADDLLSVVPVTQQLSNQHLSPPSSDGSRCEPLPSATDRQANPQDSSSAASSYNYTYPSSFNKGNGGDDSLLSETFEYALLADGSHGVIQKARRAFTTCDEEPIHIPGAIQSYGMLVALKLVDERVAGPSRYLPRICSENSAFVCHYQPSELLSLDSFYQVMPNFQRHLFDVQLRHIRQGYDSTKKEQEPVVFAFSFSDPDGRLIPCWCAAHYLGGDTDLFICEFELQDYSMHPLATPAMSDPGNPIDTLGSDHLDFATACSIQSKVQPAFPNPELISKGFDPSTSSVEVIGMATKIQTQFSEAATVPDLLETIVSIVKEVTRFHRVMVYQFDRDYNGTVVAELMDPKASNDVYRGLHFPASDIPPQARKLYMINKVRVLFDRSQRTSRLIGRDVSDMDVPLDLTHAYLRAMSPVHLKYLSNMGVRSSMSMSLESDGKLWGLIVCHSYGPAATRVPFSIRELSFFVGLAASTCLQKLLNSERLQAHRIIETLRGRGRPDESPQMTVWYFTARTRSEKYIGQGGLRWRVWREKETAINDTRLKRLLLHDASHQALEKHLDDGTKQVLTTSYTASKSLIYVIDDLLSLTGSITGSVPLLDEPFHLPNCLEEVLCPLRRLGQEKGIQLIMIPSTGPTQYVRGDPTSLQRSLSILVANAIQHTTSGQVVVKWYETAMNPENTVIHISITDTGPGFSERELDDMFQEFEQVPDEDFDEATSKPHAVRDNVLRVGVGLAFVARFVKQRNGQLKVKSTKGRGSTFTLEIPFAVSSHCSSIASRRRDASPLPVLTMPGPLTFGAGSSVPSDRSTFGTSRDSKPSPPIIRPGSSTADTSPRDFQTPSPHHYTVIVADDNMINVQILERRLTKLGHRVLVSRDGQECFNLFASNRSTVDFVLMDLNMPVVDGFASIRMIRDQEYSHPTPSRVVQCCGRTPIFAVSGMLRRGQEQQCKEAGFDGWMPKPVDMKRLVRCLAGGLDPNARRMCVYDEKRFELGGWFDAE

SEQ ID NO: 7500 - protein, 161 aa, Pseudomonas syringae pv. syringae B728a
MSENLLSIPVTTIKGEQKTLADFSGKALLVVNTASQCGFTPQYKGLEKLWQDYRDQGLVVLGFPCNQFGKQEPGDEGAISGFCELNYGVSFPLFKKIDVNGEQAHPLFVQLKQQAPGLLGTERIKWNFTKFLIGQDGRLVKRFAPLTKPEELTGEIEALLR

SEQ ID NO: 7501 - protein, 157 aa, Bacillus halodurans
MSIHEFSARLINGEEKALSDYKDQVLLIVNTASKCGLTPQYEELQILYETYKDQGFTVLGFPSNQFMNQEPGDHNEIAAFCERNYGVSFPIFEKVKVNGKEAHPLFQYLTSQQGGLFTEKIKWNFTKFLIDRSGNVVKRYAPSTSPIKIKDDIEELL

SEQ ID NO: 7502 - protein, 341 aa, Escherichia coli CFT073
MKALSKLKAEEGIWMTDVPVPELGHNDLLIKIRKTAICGTDVHIYNWDEWSQKTIPVPMVVGHEYVGEVVGIGQEVKGFKIGDRVSGEGHITCGHCRNCRGGRTHLCRNTIGVGVNRPGCFAEYLVIPAFNAFKIPDNISDDLASIFDPFGNAVHTALSFDLVGEDVLVSGAGPIGIMAAAVAKHVGARNVVITDVNEYRLELARKMGITRAVNVAKENLNDVMTELGMTEGFDVGLEMSGAPPAFRTMLDTMNHGGRIAMLGIPPSDMSIDWTKVIFKGLFIKGIYGREMFETWYKMAALIQSGLDLSPIITHRFSIDDFQKGFDAMRSGQSGKVILSWD

SEQ ID NO: 7503 - protein, 433 aa, Saccharomyces cerevisiae
MVYEATPFDPITVKPSDKRRVAYFYDADVGNYAYGAGHPMKPHRIRMAHSLIMNYGLYKKMEIYRAKPATKQEMCQFHTDEYIDFLSRVTPDNLEMFKRESVKFNVGDDCPVFDGLYEYCSISGGGSMEGAARLNRGKCDVAVNYAGGLHHAKKSEASGFCYLNDIVLGIIELLRYHPRVLYIDIDVHHGDGVEEAFYTTDRVMTCSFHKYGEFFPGTGELRDIGVGAGKNYAVNVPLRDGIDDATYRSVFEPVIKKIMEWYQPSAVVLQCGGDSLSGDRLGCFNLSMEGHANCVNYVKSFGIPMMVVGGGGYTMRNVARTWCFETGLLNNVVLDKDLPYNEYYEYYGPDYKLSVRPSNMFNVNTPEYLDKVMTNIFANLENTKYAPSVQLNHTPRDAEDLGDVEEDSAEAKDTKGGSQYARDLHVEHDNEFY

SEQ ID NO: 7504 - protein, 207 aa, Zea mays
LPSPPWPDFDDDYDIPDLSALPANAATSSGGGYGSGGSGGHRKLSHNAYERDRRKQLNDLYSSLRSLLPDADHTKKLSIPTTVSRVLKYIPELQKQVDNLERRKRELTNANCKPGVLNTSEIVTTPIVSATCLNDTEIMVQVSLHSNVAATALPLSKCIKVLEDAGLHLISSSTYSTFGNKTFYSLHLQVCMHVHSMVPAVSFNFFI

SEQ ID NO: 7505 - protein, 175 aa, Nostoc punctiforme
MSTASYWTSPDFSQAAFIAANAVVMGSVNIAAGVSIWYGAVVRADVERIEIGECTNIQDGAILHGDPGFPTILEDHVTVGHRAVVHSAYIERGSLIGIGAVILDGVRVGAGSIIGAGAVVTKNIPPLSLVVGVPGKVLRQLTEAEAAELIEHAKRYQKLALVHAGKGTDIGFSKS

SEQ ID NO: 7506 - protein, 480 aa, Zea mays
MALQTLNPYRHAAAVSPVPSPVPHRGHPPPHAVLHLPPRRRLAGGAARPLAVAAAVSGAVNEARRRGVPQEGGEDGRKDTDLATLGNLCVDVVLSVPQLPPAQQEERKAYMERLAASPPDQKFWEAGGNCNLAFAAARLGLNCSTLGHVGEEIYGKFLLDVLQAEGISVVGMLENTNAAACRQAYETLLCWVLVDPFQKHGFCSRADFSKEPAFSWIRKLPVDIRTAIHHSKILFCNGYAFDEFFPDVIASSIDCAICSGTAVFFDPGPRGKSLLHGNLDEQRALEHALRLSDVLLLTSDEAESLTNIRNPVQAGQELLKRGIRTKQVVIKMGSRGSIMITKNTISCAPAFKIDVVDTVGCGDSFTAAIAFGFLHDLPAVNTLTLANAVGAATATGCGAGRNVARLDKVLQLMREADLNEDITLWTELTEGNSLRIEVSILSGIARNGFSENIVAVPVTKVVSEVLPMFEAVPVRSAVQA

SEQ ID NO: 7507 - protein, 329 aa, Zea mays
MQYKNLGRSGLRVSQLSYGAWVTFGNQLDVKEAKVLLQACRDAGVNFFDNAEVYANGRAEEIMGQAIRDLGWRRSDVVISTKLFWGGQGPNDKGLSRKHVVEGLRGSLRRLALDYVDVVYCHRPDASTPVEETVRAMNWVIDQGWAFYWGTSEWSAQQITEAWAVANRLDLVGPIVEQPEYNLFSRHKVESEFLPLYSTYGIGLTTWSPLASGVLSGKYGKGDIPADSRFALDNYKNLANRSLVDDTLRKVNGLKPIAAELGVSLAQLSIAWCASNPNVSSVITGATKESQIVENMKALDVIPLLTPEVVDRIEAVVQSKPKRNVESYR

SEQ ID NO: 7508 - protein, 187 aa, Thermoplasma volcanium
MMTKVLIITGDAGESLEVMYPYQRLLEEGYEVDIAAPSAKYVQTVVHDFVPGFDTYTEKPGYLVKANKAFKDVNPEEYAAIVIPGGRAPEYIRNDPDVQRIVKYFFNKDAPVAELCHAPLILGSAGLLKGRKTAAYPALKSDVEIAGGTFIDEGAVVDRNIVSARAWPDHPSWMREFMKILKTKYPP

SEQ ID NO: 7509 - protein, 462 aa, Ralstonia metallidurans
MHAPDNQGTLKRGLKNRHIQLIALGGAIGTGLFLGIAQTIKLAGPSVLLGYALAGVVAFFIMRQLGEMVVDEPVAGSFSYFANKYCGHFAGFMSGWNYWVLYILVSMAELSAVGIYVQYWWPGIPTWISALAFFLIINAINLASVKSFGEMEFWFSIIKVAAIVGMIGFGGYLLATGTAGPDASIANLWQHGGFFPNGFSGLVMAMAVIMFSFGGLELVGITAAEADSPEKSIPKATNQVIYRILIFYVGALAVLLSLYPWEKVVTGGSPFVLIFHAMNSNVVATVLNIVVLTAALSVYNSGVYCNSRMLLGLAQQGNAPRSLMRVNRRGIPLTALAVSAIATGICVVINYFMPGEAFELLMGLVVSALIINWAMISIIHLMFRRAKAAAGKTTRFQSLGYPLTNYVTLAFLAGILVVMFLTPGLRISVYLIPVWLGVLGVSYRLRQKKAGSAMPAASAQIQ

SEQ ID NO: 7510 - protein, 142 aa, Triticum aestivum
MSRTGPIAQDWEPVVVRKKLPNAAAKKDEKAVNAARRAGVDIDIAKKHNAGTNKAAHSTTSLNTKRLDDDTENLAHERVPSDLKKSIMQARTDKKLTQAQLAQLINEKPQVIQEYESGKAIPNQQIIGKLERALGTKLRGKK

SEQ ID NO: 7511 - protein, 593 aa, Glycine max; identical to SEQ ID NO: 5719

SEQ ID NO: 7512 - protein, 394 aa, Neisseria meningitidis MC58
MTPQVLTILGSTGSIGESTLDVVSRHPEKFRVFALAGHKQVEKLAAQCQTFHPEYAVVADAEHAARLEALLKRDGTATQVLHGAQALVDVASADEVSGVMCAIVGAVGLPSALAAAQKGKTIYLANKETLVVSGALFMETARANGAAVLPVDSEHNAVFQVLPRDYAGRLNEHGIASIILTASGGPFLTADLNTFDRITPAQAVKHPNWRMGRKISVDSATMMNKGLELIEAHWLFNCPPDKLEVVIHPQSVIHSMVRYRDGSVLAQLGNPDMRTPIAYCLGLPERIDSGVGDLDFDALSALTFQKPDFDRFPCLRLAYEAMNAGGAAPCVLNAANEAAVAAFLDGQIKFTDIAKTVAHCLAQDFSDGIGDIGGLLAQDARTRAQARAFIGTLR

SEQ ID NO: 7513 - protein, 286 aa, Saccharomyces cerevisiae
  unsure (1)..(286): unsure at all Xaa locations
XYTTRQIGAKNTLEYKVYIEKDGKPVSAFHDIPLYADKENNIFNMVVEIPRWTNAKLEITKEETLNPIIQDTKKGALRFVRNCFPHHGYIHNYGAFPQTWEDPNVSHPETKAVGDNDPIDVLEIGETIAYTGQVKQVKALGIMALLDEGETDWKVIAIDINDPLAPKLNDIEDVEKYFPGLLRATNEWFRIYKIPDGKPENQFAFSGEAKNKKYALDIIKETHDSWKQLIAGKSSDSKGIDLTNVTLPDTPTYSKAASDAIPPASLKADAPIDKSIDKWFFISGSV

SEQ ID NO: 7514 - protein, 247 aa, Oryza sativa (japonica cultivar-group)
MGRGKIEIKRIENTTNRQVTFCKRRNGLLKKAYELSVLCDAEVALIVFSSRGRLYEYANNSVKSTVERYKKANSDTSNSGTVAEVNAQHYQQESSKLRQQISSLQNANSRTIVGDSINTMSLRDLKQVENRLEKGIAKIRARKNELLYAEVEYMQKREVELQNDNMYLRSKVVENERGQQPLNMMGAASTSEYDHMVNNPYDSRNFLQVNIMQQPQHYAHQLQPTTLQLGSRPSISFGVDTVRTHVR

SEQ ID NO: 7515 - protein, 182 aa, Triticum aestivum
EYPPTSGTEQESVSGNRMNGDQNSDVYAQEKQDFVQHFSQIVRVLTEDEMGHPEIGDAIARLKEVLEYNAIGGKYNRGLTVVISFRELVEPRKQDADSLQRAWTVGWCVELLQAFFLVADDIMDSCLTRRGQICWYQKPGVGLDAINDANLLEACIYRLLKLYCREQPYYLNLIELFLQSSY

SEQ ID NO: 7516 - protein, 871 aa, Phaeosphaeria avenaria
MALAVAFFVTQVLAQQYPTSNTSSPAANSSSPLDNAVSPPFYPSPWIEGLGDWEAAYQKAQAFVSQLTLLEKVNLTTGTGWQSDHCVGNTGGVPRLNFTGICNQDAPLGVRFADYVSAFPSGGTIAAAWDRGEWYLRGYQMGSEHRSKGVDVQLGPVVGPLGRNPKGGRNWEGFSPDPYLSGIASAESVRGIQDAGVIACTKHYIMNEQEHFRQPGNFEDQGFVDALSSNLDDKTLHELYLWPFADAVRAGTGSIMCSYNKVNNSQACQNSYLQNYILKGELGFQGFIMSDWDAQHSGVASTFAGLDMTMPGDTDFNSGKTFWGTNFTTSILNGTVPQWRLDDAVTRIMAAFYYVGRDKARIPVNFDSWSRDTYGFDHYYGKAGYSQINSHVDVRADHFRSIRRTAAMSTVLLKNEGALPLTGSEKWTAVFGDDAGEGQLGPNGFPDHGGNNGTLAMGWGSGTSDYPYLVTPLESIKATVAQNGGIVTSVTDNWAYTQIQTLAKQASVAIVFVNADSGEGYITVDGNAGDRNNLTLWQDGDTLIKNVSSLCNNTIVVIHSVGPVLVNSFYDSENVTAILWAGLPGQESGNAIADILYGRHNPGGKLPFTIGSDAAEYGPDLIYEPTNNSSSPQDNFEEGVFIDYRAFDKQNVTPIYEFGFGLSYTKFSYSNLTVKKANAGAYTPATGQSKAAPTLGNFSTDASQYQWPSDFTYIDTFIYPYLNSTDLKTASQDPEYGLNYTWPAGATDGTPQARIPAGGAPGGNPQLWDVLFSVEATITNNGTVPGDEVVQLYVSLGNPDDPKIVLRGFDRLSIQPGKTATFHADITRRDVSNWDVASQNWVITSAPKTVYVGASSRKLPLTATLDTSDFQ

SEQ ID NO: 7517 - protein, 197 aa, Brassica oleracea var. capitata
MGRKKLEIKRIENKSSRQVTFSKRRSGLVEKARQLSVLCDASIALLVVSSSGKLYSFSAGDNLVRILDRYGKQHADDLKALDLQSKALSYGSHNELLELVDSKLVESNVGGVSVDTLVQLEGVLENALSLTRARKTELMLKLVDSLKEKEKLLKEENQALASQKEKKNLAGAEADNMEMSPGQISDINLPVTLPLLN

SEQ ID NO: 7518 - protein, 249 aa, Methanosarcina barkeri
MNLNIRIKNYWEGEAQGYSEAIEDELNGFERKAWSDLVLEYAPSKDRLDILDIGTGPGFFPIVLSQGGHNVTGIDLTENMIEFARLNLAREGASAKLVTMDCQNLKFPDNCFDLLVCRNLTWTLDDPAKAYKEWHRVLKPGGRVLIFDACWYLHLFDENMKIAYEKKEKEILMKYGHPMHQHKDQVEGDALSRKLFMSDKVRPQWDLDIMLKLGFSKVFADTSVGERILNEQQQDRNSMHPPFLVGGEK

SEQ ID NO: 7519 - protein, 481 aa, Sorghum bicolor
MSMHYLAALSVTLLGAILLRWAFKWMNYGRTGGEEGMLLPPGSRGLPFLGETLEFFAASPTLELVPFFKRRLERFGPIFRTNIVGEDMIVSLDPELNARVLQQEERGFQIWYPSSFMRILGADNMVSMLGPLHRHIRNLVLRLFGPEALRLVLLRDVQRSARDELRSWLDRPEVEVRTATSRMIFGVTAKKLISHDDVASGGSLWKCFDAWTKGLMSFPICVPGTAFYRCMQGRKNVMKVLKQQLDERRNGAERKTVDFFDLVIDELDKPNSIMSESIALNLLFLLLFASHETTSMGLTVILKFLTDNPKSLQELTEEHEKIMERRVDPDSDITWEEYKSMKFTSHVIHESLRLANIAPVVFRQANQDVHIKGYTIPEGSKIMICPSAAHLNSKVYEDPLAFNPWRWKDTPEPVGGSKDFMAFGGGLRLCVGAEFAKLQMAMFLHYLVTNYRWKALSKGTMMLYPGLRFPDGFHIQLHKKT

SEQ ID NO: 7520 - protein, 788 aa, Triticum aestivum; identical to SEQ ID NO: 7244

SEQ ID NO: 7521 - protein, 7465 aa, Magnetococcus sp. MC-1
MSTLGMPALMVLPVGPVPSGKEPHLGQPRCWTVCLVGLISPGLTLAEPAVWTLPIRASGALTSMACWILAGPSLMGPSSIEKLLAGLYLKFNSLGPAATQHLNFGWADFGSLDISGLFDGSTLVGWLTGLGFAHDDSATHNFGDLFKMGSFKGVDFSDFELPDLNFDFSGIDLSFGAFFSDNDNSNSATFTLDGANLRGLDLSGIGDVDVLSAASAFFDALTTFSVADSGSLTFTANMDEAVLEDVFANLGGPEFAFTPSFDTADSEVTLGFNIAINIDRSALFEFALDASELTGDAVADIGNFTASGSALGRFVFALDLDAGIAVTTRSTDSGFAGPLPVPSDAELYFRLNRFDTGAALDVMGLNVTASLLGDLATAEIAPGSSFKAKVAASIDMADPDNSDGKARITVADLSGVTIADYVTFTPAVAFEGALLFDASVAGFNVSDWGNPTLTIRSEIVAGNLVTSYFFDVNIDSATVQSNLESIFDTAADVGKSIDELGILNASLPFVDSTLGGLLASDDGRTLGDYFSFQYTKADGTESNVLMDYYASSGTHTYAGLIEWLRAYLGATGVYEDLTALFPDTYGSTTVGPFQVSGGLDLNNRELRLDLTMNLEQLFDLPLVMDSSLDALGLGFDASGNMQLSADLAMDLSFGMAFTDLADLSSVGDNVFVQINQMDANVSAAMNNFNAGVTVGVLEGKVDNGSIIFAADATLALNPDGDSNNNGQRVTLTDLGAASSISDLIDASATVYATADLPIKVNLFGADTAALTGGQPRITVDWGSAGAPISIENVATTSPVITKSNFTDLASFSSMTPAQIINMMKKVGDFLAQFRDSEVFDVGIPFTNTELGDVFDFTYGFVQALDENLSGILAMDITAGESISPVLTDDVAFDLVLRRAGDMQPEVFSIMVLASETSGFTSIDELAELINQKVAAVAYGALLVQTDLPAWVSQSDEVTASLDAQVGASATVEESTVGGQAYATQQVLNLGIASGTLSFKLAGKTDQSFVVSGSDSDADIKDKIKTALTGLIFDNLVQANDIETAKGNFEVAGNRDEGFRISYAGGLAGKDYSGVTIGFSASAPEGVISAVQDGAAGLGEEQILSIAGAKSGRFTLTYGKETTDPIRFLLNDISHSPSQIQQALEKLPSIGEGNVRVTFLNSYVDPVTGKTINTPGTAPKYKIEFIGDLAGKNVSQLKVNSGAIKWGTTVPSGRTSGFVVETVAGTGINDVAEKQSVKVYVEPGQSASFDLSVVFNGQTYTTASIAHDATATQVRQALESASNGSSSLGAVSVDGETANIKVTGTGNGFWTITFDGALAGVDIDLMSGNWTGMDSPDVSLNTSKVGGYTSETQQVVFSSGTGSFKVQLGSSGSISDTLAAASTPQALQAALEGMTEIGKGNVQVSGYEGNWTIDFIGDLAGQNMERLSFLPVQTIAFDSSTQESFKVKFAGSSSSFATLTAVDIAGKSAQEVRLLLQSAIEGLDDGLDWSNVKVLQGDAVAGEPQAWEIIFTGDLAGKTMEALSFEFSKGSTTTSVEAEAVVSSLIQVVATEKSTSGGITSGKLQIKPTNVDDFVGMAMTPGAGVALDVVSYGSPAGDTAVQRLFVVDAGSDAGKVSQYRLQFEDNSGTSYETAAIDWDATAGEVQTALNNALGAAGSVTVVDTNPEEVNLSPSTIAFDITFGGALANRSINTLTASFDTLRANPGVMADAYTLRQGAAATDLTDAVNEVQRVWFDDVVGGAFGISVYYDGTYYNPEQAWSWGTSVADMESELESSLAEAFGGLSADEVSQLLTFTEVPDGGGAIDIEFGGLLAGKDMATVLVTDTWLTAESRSASYADPSALGFAAGGQDAYAITGPKFNTMDKFAEVFAKAVNDLLPEGESFDLAARFDAVNMDFLFDIKFTPALPTIEEAIDLGFDSDIISLNADGTFVITPGITFETTIGIDFDRPDDFNLDSAGVARAVVNGASFNGAQPPIMLLEDPSSPFDGATGGSTNLTVDGHFTLVFNDQERYNVTIAAADQEDNTSYQDLLLDIQNALDGVAVKANGLLAAGGFSNLGEAVKINWDTSAQQQRFQFESRTSLTSMGVQVASGDPAVSQLKLVTQSANSVSERGIPSNGKVYNDFSDSSSGTAGIAFDLVVDGDSSNPFTIAVSAAEIANNSSVEDLLADLQDAIDAQTSHDWLTKKGLSSLGDVVQIVQENDYLSFAVSGGQISNLELRALDSDPIINQLGFLNGTLAKTSGLSLFLQDAFLGGNMVLGVQDFAATGSIGEMLQATMGQMEAVFDAGVSVQLKNGSDAEPGSRVYISDLLQGARDQSGQLGLLGDISIDSAGGSSVGHAAPLESLGVGVMARDLGLRLEITEAAPAAGAEAITHTVDVTLRAVDTLDNNSVAALASDLNSAIQSALSDAGLSQFSGHTFISTGNPYADDGTVNSSVTALKFTAPASHLLTLAGRSLISDFITPLTFTDSSYTEGTEPVARLLISDISVEAGGLNLFPAESAPSIAITVPVMELFRGEITLSDAIDVEILGLDALSGFKNLSWSSIIDGIKMVTQLLSQMESFEFLDQKLPVIDKSVVDMLDIASQFAHAIEEIENNPAAGIDSLQTALADGFGISDDEVQLNYDVLGHAISINLPYTFQLADQDFPISISFDDLRALVGPGTIDQLIGTVQSLVDVGAAAQVRLKSSAQINLSMGIDLDSGEMFLYDYNDGGTSDDYSDDTGLYTRLTAEIEGTALEFNANLGPVVLQVNDGTANIDAQAGLYLYDDPAGAPGAGDGRHYLSSAVSVRQVAEGESQGLVWGASDALVQSVSGNLYTLNYAADDAFRFLMEVEGKTYTTSLCNRYMTADEVAVALQDAFNFEGLSGSVVTGTDLALDGDGLPTGWSFTFGGQLAGQTVTITSEKVIDIAPTDEVQWVKVASGSGGTFTLSVDYDGTTYTTAAIGWNADSSAVASALNTVLAPIAGTVSVAAHDASNSSLGWDVTFGGALAGVALENMRGHGDNLSHQGAIAVQVDELGSTAGSVTTNTKQWLNVVAGTGGSFTLSYQEGSTTYSSAAIAYSEDSATLAANIQQALQNAYNAGMSNTVSVTANSSRGGFNIEFAGDLAGKAITQLVADTTNLSAGIFGSIFRDVDADFSGTASVVLPTTLGLEGEVFDEIIDLGLIPGLTNPMDMGNVEIRITDLKSMFQALVDPNLTVTSTVITQTGVYDDAYIVNYQLPNISDLLDAFKLMENPFLRLLRDPSIIVDGIDYVLKGMQTGLDVAASLPLPFIGDQLAQGAQFIGDFRGSVVQGIRDALDSALDEYRGMENALRFFLFDVFTDDTDGDGVIDPASMVEWAAGTTSKDNPFLNYLSDYDGDGIVSVDDIVVEFLAAAQGGYAAGTRVGYTEATRKSDGDDTPGDVIPTGGASDPFDVAKSLQIRMHLGQSILSKDVDIGFDIGFPGLSLDLDGGIQLDLGWDMYFGFGVNLDDGLYVVSDAINVAGLGLKASDVLVENPWAPDAAYTTEEIKLTFDAYLVNELPSAATVTAGTEGGSGSNESQTIAITAATQGSFTLKFNDGSRNFKTLDINYSDDGNTQASNIQKALNKAFSRDLNGSDISVTNNGDGTYGVTFAGGLANTNVSLMEIDIDNLKNLDPLNPAEMNAQLFFLRGIMKDDVTGSIVGKSGETLDLGGADGSRTRFTGTLGIDIDDPNDDGRLTFKEMTRNKFSSLFVTVVEAKAQANLQLELTIDAEFSFPSLLTEFHMAWSYAGPAAGASGYDAYFTSSPSIWITDLRLDMGSFFSDFLGPIVSQIQQVTGPMQPIIDTLKKDLGIGKIVGQNFSLLSLAEWTAKNFGGTAKLKFIITMVKLVDLINSIPTDADLIIPIGDVFSFAGDAKSSSSKKGASLEGDVGDVDSAIDNGSTSGGGDATASQAKSKSFLEKLNDPNSAFKIPLLSDFSNIINLLTGKTADLVTFTPPGLEIGTGFSKSFPIYSAPTVSMGFSASFKVKINLTLGFDTYGLNSYFSSGNFLDIFDGFYVSDNWTKDGRDLPEIELEATIGVRVSFSAVIVRAGVEGGIKFKGDLDLWEDPEEADGKLRVSEIIAALECNPLNIFSIHIRVSLYIKAYVDINSIIAGWKEVWSKTFVDITLYEKQWDPVPCVPILASVNDGVLDLHMGSDGTPVTVDGYTAGEKYAKDRRHIDTEDGNEYYTLVQTGADTIEITAVLPKGNTYKKSFRGVTSIRAYTGSGDDTIDASGVDNINMLVIAGEGNNTIIGGGGDDVLIGGTELTILEGGKGDDLLIARAGETTLRGDLGADTYRFLEDWDTAYIEDNDGSAVPESNTVDFSDIALDLVVDDANHQGFDANNNRVLWDDPSELGLFLGGSGNDFMDMSGDQERLTVNLTGLNQGSVLNGTSGATPEGDRYFEFVDFENLVGGLHSDAFVIDAGAAVSGKIYGAPTSSVGENKGTERAGSRNTLDFAQWSSGVTVNQEGTSSFGGESAMEIREFHNMIGGGGDDLLIGNYMQNIIIGNAGSDTLEGRDADDLIVAYNFSSDGSQDIKSWNTLPSREWTWYEHEVKNFSEASAGVQTLKGDEGNDILMGENGNDRFYTGNGNDTVIGDRAALDFDSRGRLLEIDNSTRSEGGSDTITALNGNHLIFGGAGGDNITSGSGNSTIVGDVGKLSFDASSRRPIEVDTGFDIGGADTINVTTGSNVIIGGVAGDQITATDDQASRNVVLGDTGTISYASPDVLSSLIAAPQTDTSGAADTISLGNGDSIVAGGLGQDVITISAGLSTASNYRYILGDHGAMTFDVAGELVQLETTDSDSANGDNDTVTIAGVADSHNIGLNMMATGMGDDSVTIAGTTTSVDFILADNGTIVRNDGSTAANYALRSVTSTQLDLGGNDTIRTANGDKVIVGGFGQDSITVQATSNSNRHIGGDNVAIAYDTMGGIIQMETTDTVATTGAEDSITIGLDGDSSDLGINVVIAGMADDTVNVLGSTTSRDILLGDSGLITWNSYDITQGQALRSVTSTLRDLGGNDTIRTANGDKVIVGGFGQDSITVQATSNSNRHIGGDNVAIAYDTMGGIIRMETTDTVATTGAEDSITIGLDGDSSDLGINVVIAGMADDTVNVLGITTSRDVLLGDSGLITWNSYDITQGQALRSVTSTLRDLGGNDTIRTANGDKVIVGGFGQDSITVQATSNSNRHIGGDNVAIAYDTMGGIIRMETTDTVATTGAEDSITIGLDGDSSDLGINVVIAGMADDTVNVLGSTTSRDVLLGDNGLITWNSYDITQGQALRSVDSTLYVELFGGNDTIRTANGDKVIVGGLGQDGITVETNSDSKRQISGDNVSLTYDTYGELYILQTLNQKDDHGDNDTITVGIEDDTSTLGENIITGGMFDDIIKIWSTTTSEDMIFGDNAYILRAQNEASSSDQNWMLQAKTLVNDKGGDDTIITGSGGKVLVGGFGADSISAINGDHLVIGDNGQLDYDKDSENGILRKMQSLDNVIGGEDTITLREGFKVVMGGYGDDEITVYTETVAAASGVKDLTGIVSVASVSELEAKGRTGRYITGDNMEVDFDLHGGLYKIQSNDAVAAMGGDDTISIGNRATTNDLGYQVLIGGMAADTITVEDTSTSQDVIFGDNVYYERSTSSYFHMDINSTLTNQGGGDTIVTGQGEKWIVGGMGADTAEVVSINLTDETLFAGDSVDITFSRAKTGNLTSITSTGLYFGGNDALVVGDGDVTFIGGKDNDSLIVDSTGATTAEVLAGTAGDPPNQRFAFGDNVYLEYSLDDAGKEALITINSEDTTASTGGDDSLLIGPTGSLAGVMGEVIAVGGMGADTINVSGLTADTVAAGDNINITRSTEGYLKTMRSLLPVEGGVDNISLSAGDHVVIGGMSGDTILTGSGNTIAMGDSGSLVFDSDTAPVYWGSVDSYDDPTLTEAQEQAVKRVNRWGILQTLSSLGTTNGGHDTMTLGQKGTSFDGNKVAVGGIGNDTITLYGTRSYVETDAAGNAVENVDGSNTIVVTERAVAGDNATMSFGADGLITDFATGDSNIATAGNDTIKVDVSNDPVIDPDYVDGDIGTLDMYLTTEFNVLAGGLGNDVLEVVGSTGMREVISGDNLLYQRGTASQNYNHLYAEVKSSSSGGTDTIKTGNGEKLIFGGVGNDTLTVLTTAVDHSIVFGDAGKVAYDTNATGAVSLIASIPETDDGNDTVTVKNGDLYLFGGGGTDALTVSANDTATRVVMGDSGQVNMTLYSYTDADGVTQTIGVPNFIQVNDASTTNESTRIDTFTLPSKGDNLIIGGLGTDLLSGAQLGVDSIIPGTGSIQVSLANSADPTGAWSKVVSVVVLGQYNEMGITDGTYVLSQDGVDTRPETTATGSGEVTEDGTQSVTGYLGLDALNGGKAIFTEATTTLLYGTLTVKSDGGWTYTLNNSSSAVQALMSGNDRPETFQVNTTDGQQTTVTIRVKGADDVSTLTGSSSASLNEDDTSAVSGTLTVVDADVIDATVTAATSVGTYGTFSVGSNGVWSYQLDNSKAVVQGLTQGQQVSESFTVHTSDGGSQSLTMNITGRQDSAVVGSGTGSVTEDSTLSSSGMLSVSDADSGEAAYVASTQTGSYGSFSLDSSGAWSYQLNNSASQVQALIMGQQVSESFTVATVDGTASSVVVTVVGAQDAAQLGGVQSGGVVEDGQLSTAGQLTISDADAGQSLYQVASTDGMYGHFAMDSSGAWSYVLNNELAAIQQMIAGQTVLESFTVSSSDGTQAQVSVTITGSQDNAVITGEAAGQVSETNDDSQSMATGKLNISDLDSQQAHFVGGPQAGQYGAFTLQGDGNWTYVLDNHGVAMAGLGTGDVVTETFTVRSLDNTAETTVTITINGLDEPPTAEEIEAARLAEEQRLQQELQASNDLLQGAIGAEGGNAGGTAPPPPNGNPADGAPGDLLGAGGAAAGGATGGTTGGGTTAGTGGGGLGGGGFGSGAPNTSAGGLTGGFGGTATGGTVTGGTGGTGGAATGGTATGGTATGGTGGTGGTTTGGTATGGTATGGTGGAAGGTGGAAAGGAATGEAGGTATGGTGGTGGAATGGTATGGTGGAAGGTGGAAAGGAATGEAGGTATGGTGGTATGGTATGGTGGAAGGTGGAAAGGAATGEAGGAATGGTGGTATGGTATGGTGGAAGGTGGAAAGGAATGEAGGAATGGTGGAAAGGTGGAATGEAGGAATGGTAGDAGDTGGAATGGDANGGAAGGPGVDGGAAGGPGADGGAAGGPGADGGAAGGPGANGGAAGGPGVDGGAAGGPGVDGGAAGGPGADGGAAGGPGAVPEGGDPAGANGQGGAAQDGQTNDDNTDDEAPADGEAPAEGQPPADGEAPAEGQVPADGEAPAEGQAPADGEAPAEGQTPADGEAPAEGQPQDGGGQANNASGTGEAIAGSAALAAAMGGGMGRIQWGQPAERGHDSRATAQAKVAKRGLFQRVTRGFKA

SEQ ID NO: 7522 - protein, 91 aa, Zea mays
GDWYCSCGYHNFASRSSCFKCGTIVRDFPAGQGAAGAEGDFAGGRDSAAVRAGWKAGDWICTRPGCNVHNFASRMECYRCNAPREAAGTGR

SEQ ID NO: 7523 - protein, 379 aa, Hordeum vulgare subsp. vulgare
MATAGKVIKCKAAVAWEAGKPLTMEEVEVAPPQAMEVRVKILFTSLCHTDVYFWEAKGQTPMFPRIFGHEAGGIVESVGEGVTDVAPGDHVLPVFTGECKECPHCKSAESNMCDLLRINTDRGVMIGDGKSRFSIGGKPIYHFVGTSTFSEYTVMHVGCVAKINPEAPLDKVCVLSCGICTGLGASINVAKPPKGSTVAIFGLGAVGLAAAEGARIAGASRIIGVDLNASRFEEARKFGCTEFVNPKDHTKPVQQVLADMTNGGVDRSVECTGNVNAMIQAFECVHDGWGVAVLVGVPHKDAEFKTHPMNFLNERTLKGTFFGNFKPRTDLPNVVEMYMKKELEVEKFITHSVPFSEINKAFDLMAKGEGIRCIIRMDN

SEQ ID NO: 7524 - protein, 394 aa, Streptomyces avermitilis MA-4680
MILGSTGSIGTQAIDLVLRNPDRFRVTGLSAAGGRVGLLAEQAHRLRVSTVAVAREDVVPVLREALTAQYGPGEPLPEILAGADAATQLAASDCHTVLNGITGSIGLAPTLAALEAGRTLALANKESLIVGGPLVKALAKPGQIIPVDSEHAALFQALAAGTRADVRKLVVTASGGPFRGRTKAELANVSPEHALAHPTWAMGPVITINSATLVNKGLEVIEAHLLYDIPFERIEVVVHPQSYVHSMVEFTDGSTLAQATPPDMRGPIAIGLGWPERVPDAAPAFDWTKASSWEFFPLDNDAFPSVGLARHVGQLAGTAPAVFNAANEECVDAFLNGTLPFNGIMETVTRVVEEHGTPRTGTSLTVADVLEAETWARARARELTVQTATAEARA

SEQ ID NO: 7525 - protein, 297 aa, Rhizobium sp. CIAM2032
RGKTQVKEFAEFPTLEELPLWGFDGSSTMQAEGHSSDCVLKPVAVYPDPTRTNGVLVMCEVMMPDGVTPHASNKRATILDDEGAWFGFEQEYFFYKDGRPLGFPETGYPAPQGPYYTGVGYKNVGDVARQIVEDHLDLCLAAGINHEGINAEVAKGQWEFQIFGKGSKKAADQMWIARYLLLRLTEKYRIDIEFHCKPLGDTDWNGSGMHANFSTAYMREVGGKAYFESLMAQFDKNLMDHIAVYGPDNDKRLTGKHETAPWNKFSYGIADRGASIRVPHSFIKNDYKGYLEDRRPN

SEQ ID NO: 7526 - protein, 388 aa, Picea mariana
MGRAPCCAKVGLNKGAWSAEEDSLLGKYIQTHGEGNWRSLPKKAGLRRCGKSCRLRWLNYLRPCIKRGNITADEEELIIRMHALLGNRWSIIAGRVPGRTDNEIKNYWNTNLSKKLAVRGIDPKTHKKVTTDSINRASDRFNQRKGGKLYDCSQRSQRLERNVARAGQSTGLVIPNVHNLKADLKGQYIAGPRAIQSSNSIRSSSPINTLIQPKSNELTDDPDFMQPQPVVSSEAGKQTDDSTVYCSSDSAASCALIDHLSSADDDQYLSLEGNSNECYSHTVAEESGTLKSSNPQTHSEAICDSRERDNGGPVQKHDQFPEYDVLSFFDVRNAENEICCNDDQWVHEQEMPQLHSWDNQIDDQGKEHFGSHVNNDVTAMSWEASFWF

SEQ ID NO: 7527 - protein, 253 aa, Triticum aestivum
  unsure (1)..(253): unsure at all Xaa locations
MAKTYPVVSAEYQEAVEKARQKLRALIAEKNCSPLMLRLAWHSAGTFDVSSKTGGPFGTMKKPAEQAHAANAGLDIAVRMLEPIKEEIPTISYADLYQLXAGVVAVEVSGGPXVIPFHPGREDKPQPPPEGRLXPDATKGSDHLRQVFGKQMGLSDQDIVALSGGHTLGRCHKERSGFEGPWTRNPLKFDHSYFTELLSGDKEGLLQLPSDKTLLTDPVFRPLVEKYAADEKAFFEDYKEAHLRLSELGYAEA

SEQ ID NO: 7528 - protein, 143 aa, Glycine max
  unsure (1)..(143): unsure at all Xaa locations
MAYIQTTFLNLYYYTKXELLQNPAFELXDDAFNXIDRMLNYNEPPGKYNRILKVIDSYRLLKKGHALKDEQIYYDRALRRXIEWFXAYLLVLEDIMDNFHTLRVKACXDTLPIDEMIAPYDGVLLKNYITRIIIKHFMGKPYY

SEQ ID NO: 7529 - protein, 392 aa, Schizosaccharomyces pombe
  unsure (1)..(392): unsure at all Xaa locations
XPPKKQQEVVKVQWGRPGNNLKTGIVGXPNVGKSTFFRAITKSVLGNPANYPYATIDPEEAKVAVPDERFDWLCEAYKPKSRVPAFLTVFDIAGLTKGASTGVGLGNAFLSHVRAVDAIYQVVRAFDDAEIIHVEGDVDPIRDLSIIVDELLIKDAEFVEKHLEGLRKITSRGANTLEXKAKKEEQAIIEKVYQYLTETKQPIRKGDWSNREVEIINSLYLLTAKPVIYLVNXSERDFLRQKNKYLPKIKKWIDENSPGDTLIPXSVAFEERLTNFTEEEAIEECKKLNTKSXLPKIIVTGYNALNLINYFTCGEDEVRSWTIRKGTKAPQAAGVIHTDFEKAFVVGEIXHYQDLFDYKTENACRAAGKYLTKGKEYVXESGDIAHWKAGKR

SEQ ID NO: 7530 - protein, 238 aa, Triticum aestivum
  unsure (1)..(238): unsure at all Xaa locations
VPLVQSLLGKDQEGDDTGKKKKKKKGKGKAGNERKKPAPAYILWCKDQWAEIKKSPDADFKEVSNALGAKWKTLSNEEKQPYEERYRQEKEAYLQVVGQEKREAEAMKLLDEEQMRWTAKELLEQYXQERRAALAAEKKSVPEIGKITGEEWKGMTEAQKVPYEEVARKQKEEYQKQMEVYKQKKLEENASLEKEEEEQKKILKQEALQLLRKKEKADNIIKKTKEKRQKKKQQQNAD

SEQ ID NO: 7531 - protein, 246 aa, Antirrhinum majus
MASLSDQSTEVSPERKIGRGKIEIKRIENKTNQQVTFCKRRNGLLKKAYELSVLCDAEVALVVFSSRGRLYEYANNSVKATIDRYKKASSDSSLNGSISEANTQYYQQEASKLRAQISNLQNQNRNMLGESLGALSLRELKNLESRVERGISRIRSKKNELLFAEIEYMQKRQEIDLHHNNQYLRAKIAESERVQGQHMNLMPGGSSGYEQLVETQPFDARNYLQVNGLQPNNDYPRQDQLPLQLV

SEQ ID NO: 7532 - protein, 334 aa, Microbulbifer degradans 2-40
MLEAVDAKFKLGLKFEEDLIGGCAIDVHGVPLAQSTLDRCKAADAVLMGSVGGPKWDALDSNIRPEKGLLKIRYEMGLYANLRPAILYPQLADASSLKPEIVSGLDILIVRELTGGIYFGEPRGIRLLDNGERQGYNTYVYAEHEIERIGRTAFEMAMKRDKKVCSVDKANVLEATVLWREVIQSISKDYPEVELSHMYVDNAAMQLVRAPKQFDVVVTGNMFGDILSDTAAMLTGSIGMLPSASLNQDSKGLYEPVHGSAPDIAGQGVANPLATILSAAMMLRYSLNEAAAADAIEAAVGAVLDDGLRSADIFSEGMKKVSTQEMGDAVAAKI

SEQ ID NO: 7533 - protein, 347 aa, Oenococcus oeni MCW
MLINKGEYRNMNALVLDKMNHLELENLEKPTPKNNEVLIKVAYVGVCGTDKALYQGLPGSADAVPPIVLGHEDSGTVVEIGESVTNFEVGDRVAIDPNIYCHKCDFCRTNRPELCTNLSAVGVTRNGGLEEYVAVPEEVAYKLPDNVSFKQAALTEPLSCVVHGVDLLAIKPFQEAIVLGDGFTGQLFVKTLKAYGVSKVTISTRHLDDEKHVDFLKKVVGADEVVDARSNDFDKDYDVVVEAVGSADVQEQAVKAAAHGGQVLMFGVGKPEQKFSVSSYEIFQKQLTVQGSFINPYTFKAAIAMIAAGKIDPSELVSMELKAAKMNDYLSGKIRTNKAVLNIEAAF

SEQ ID NO: 7534 - protein, 137 aa, Brassica oleracea
FKEAFSLFDKDGDGCITTKELGTVMRSLGQNPTEAELQDMINEVDADGNGTIDFPEFLNLMARKMKDTDSEEELKEAFRVFDKDQNGFISAAELRHVMTNLGEKLTDEEVDEMIREADVDGDGQINYDEFVKVMMAK

SEQ ID NO: 7535 - protein, 53 aa, Zea mays
RYGSSATARDFEIYAPNATFEDPLMRAHGYKQIQSAFYTLPKVFGESKIPEYP

SEQ ID NO: 7536 - protein, 437 aa, Zea mays
MEVHADVDGSGVPLAVLLKRELCNQKVERPDILFGEANKSKKGEDFTLLLPRCHRTTGEGGGSGGGENAGGGDDDDTISVFAIFDGHNGSLAAIYTRENLINNVLAAIPPNLTSEEWTAALPRALVAGFVKTDKDFQTKAARSGTTVTFVIIDGWVVTVASVGDSRCILESAEGSVYFLSADHRLDANEEEVERVTASGGEVGRINIAGGAGIGPLRCWPGGLCLSRSIGDIDVGEFIVPVPHVKQVKLSNAGGRLVIASDGVWDALCFQEALNYIRGLPAEAAANRIVKEAVTSKGLRDDTTCIVVDILPPEKLSPPLKRPGKGVIKTLFRRRPSDEMSEDQMDRGCLEPDVVEEIYEEGSAMLARRLNINYPSGNMFKLHDCAVCQLEMKPGEGTSVHGNMPKHSRVDPWGGPFLCSSCQLKKEAMEGKLHSRTE

SEQ ID NO: 7537 - protein, 265 aa, Brucella melitensis 16M
MELTEITPESLRLRPSHKERNVLITGAARGIGRAIAQAFVERSATVGICDLNLADVARTCEELNGLGLGRAVPIACDVSDYDALVAAIDDTGLVFDTVVNNAGISPKHNGVAHKVWEMAPDEWRRVVDVNLTGTFNTIRALTPGMVEARRGWIVNTSSVAGKTYSPIVACHYAATKSAIIGFTKHLAAELGPYSIWVNAMAPGRIATPMVAGVAPEVNAEQVKLTPMARLGQPAEVADVALWLTSTESSFVTGQTVDVAGGLYMA

SEQ ID NO: 7538 - protein, 419 aa, Brassica amplexicaulis
HHRSYNLFFFVVLVLFHHVFSTNTLSPNETLTISSNKTLVSPGDVFELGFFTTTTHTDRWYLGLWYKTTSHKTYVWVANRDNPLHSSTGTLKISHSNLFLLDQFNTPVWSTNITETVTSPLTAELLSNGNFVLRDSKTKDTNQFLWQSFDFPVDTLLPEMKLGRNLKTGHDRVLTSWKSPTDPSSGDYSFKLETHQGSLLHEFYLLKNELKVYRTGPWFNAIPKMQNWSYIVNSFIDNKEEVSYAFKVNNHKMIHTRFRMSSTGLLQVITWTKTTPQRNMFWSFPEDQCDYYTSCGSYAYCDTNTTPTCNCIKGFMPKNDQAWALRDASSGCVRSSRLSCGEGDGFYRMSHMKLPETSGAVVDKGIGLKECKERCSRDCKCTGFANMDIRNGGSGCVMWTGELMDMRSYVAGGQDLYLK

SEQ ID NO: 7539 - protein, 174 aa, Methanosarcina acetivorans C2A
MILLMIISTVLMFATVGSAQDNSTDSAAAVMKDANGSTVGFATFTKDDFGMVRIQVFASNLTPGLHGIHIHEKANCTGPSFTSAGGHYNPLGKEHGFNNLKGPHAGDLPNLVVGQDGTGYMDVTTNLVTLSPGNTTLFPANGTSLVIHADPDDQITNPSGNSGARIACGAIEKR

SEQ ID NO: 7540 - protein, 166 aa, Zea mays; identical to SEQ ID NO: 3060

SEQ ID NO: 7541 - protein, 186 aa, Neisseria meningitidis MC58
MNMKTLLALAVSAVCSVGVAQAHEHNTIPKGASIEVKVQQLDPVNGNKDVGTVTITESNYGLVFTPDLQGLSEGLHGFHIHENPSCEPKEKEGKLTAGLGAGGHWDPKGAKQHGYPWQDDAHLGDLPALTVLHDGTATNPVLAPRLKHLDDVRGHSIMIHTGGDNHSDHPAPLGGGGPRMACGVIK

SEQ ID NO: 7542 - protein, 375 aa, Aquifex aeolicus
MKKVKLIGTLDYGKYRYPKNHPLKIPRVSLLLRFKDAMNLIDEKELIKSRPATKEELLLFHTEDYINTLMEAERSQSVPKGAREKYNIGGYENPVSYAMFTGSSLATGSTVQAIEEFLKGNVAFNPAGGMHHAFKSRANGFCYINNPAVGIEYLRKKGFKRILYIDLDAHHCDGVQEAFYDTDQVFVLSLHQSPEYAFPFEKGFLEEIGEGKGKGYNLNIPLPKGLNDNEFLFALEKSLEIVKEVFEPEVYLLQLGTDPLLEDYLSKFNLSNVAFLKAFNIVREVFGEGVYLGGGGYHPYALARAWTLIWCELSGREVPEKLNNKAKELLKSIDFEEFDDEVDRSYMLETLKDPWRGGEVRKEVKDTLEKAKASS

SEQ ID NO: 7543 - protein, 374 aa, Gyminda tonduzii
ALSIAGAVQSQKLAIRAISQLQSLPGGDIKLLCDTVVESVRELTGYDRVMVYKFHEDEHGEVAAESKRTDLEPYFGLHYPATDIPQASRFLFRQNRVRMIVDCHASPVRVIQDDGLMQPLCLVGSTLRAPHGCHAQYMENMGSKASLAMAVIINGNDEEVIGGRNATRLWGLVVCHHTSARCIPFPLRYACEFPMQAFGLQLNMELQLAAQLSEKHVLKTQALLCDMLLRDSPTGIVTQSPSIMDLVKCDGAALYYQGKYFPIGVTPTEAQIKDIVEWLLVFHGDSTGLSTDSLADAGYPGAALLGDAVCGMAVAYITKKDFLFWFRSHTTKEIKWGGAKHHPEDKDDGQRMHPRSSFKAFLEVVKSRSLPWES

SEQ ID NO: 7544 - protein, 158 aa, Triticum aestivum
  unsure (1)..(158): unsure at all Xaa locations
MSILWEKSAGWRWLVRRTRDSKPFFFTFAALCGVVPGVIGYGVMQLTGSRNEQLEAHLRSTARPETTMMGQVNRERLAEFLGELQRKEDTNDRYVAALRGETLTKEXYERIQPLPAANAQANQETAGASAEEERPRQMSHQQTASINFYCWTYASSDM

SEQ ID NO: 7545 - protein, 165 aa, Antirrhinum majus
SSSDNASKKITLRSSDGEVFEVDEAIALLSQTIKHMIEDDCADNVIPLPNVTGKILSKVIEYCKRHVDADAAKSEEKVAAAAAGDDDLKAFDADFVKVDQATLFDLILAANYLNIKTLLDLTCQTVADMIKGKTPEEIRKTFNIKNDFTPEEEEEVRRENQWAFE

SEQ ID NO: 7546 - protein, 373 aa, Hordeum vulgare
MGLLSKKLLVASMVAAVLAVAAVELCSAIPMEDKDLESEEALWDLYERWQSAHRVRRHHAEKHRRFGTFKSNAHFIHSHNKRGDHPYRLHLNRFGDMDQAEFRATFVGDLRRDTPSKPPSVPGFMYAALNVSDLPPSVDWRQKGAVTGVKDQGKCGSCWAFSTVVSVEGINAIRTGSLVSLSEQELIDCDTADNDGCQGGLMDNAFEYIKNNGGLITEAAYPYRAARGTCNVARAAQNSPVVVHIDGHQDVPANSEEDLARAVANQPVSVAVEASGKAFMFYSEGVFTGECGTELDHGVAVVGYGVAEDGKAYWTVKNSWGPSWGEQGYIRVEKDSGASGGLCGIAMEASYPVKTYSKPKPTPRRALGARESL

SEQ ID NO: 7547 - protein, 80 aa, Antirrhinum majus subsp. cirrhigerum
GSISEANTQYYQQEASKLRAQISNLQNQNRNMLGESLGALSLRELKNLESRVERGISRIRSKKNELLFAEIEYMQKRQEI

SEQ ID NO: 7548 - protein, 392 aa, Janusia californica
DLEPVNPADVPVTAAGALKSYKLASKAISRLQSLPSGNISLLCDVLVKEVRDLTGYDRVMVYKFHEDEHGEVVSECRRSDLESYLGLHYPATDIPQASRFLFMKNKVRMICDCLAPPVKVIQDERLPQPLSLCGSTLRSPHGCHAQYMTNMGTIASLVMSVTVNEDDDTMDGDQQQMTRKLWGLVVCHHTSPQFVPFPLRYACEFLIQVFGVQINKEVELAAQVREKHILQIQTMLCDMLLRDAPVAIITQSPNVMDLVKCDGAALYFKNKTWLLGVTPTEEQIRGIAEWLLKYHSGNTGLSTDSLMEAGYPGASGLGDAVCGMAAVSITSRDFLFWFRSHTAKEIKWGGAKHDPDDKDDLRKMHPRSSFKAFLEVVKWRSMPWEDVEMDAI

SEQ ID NO: 7549 - protein, 374 aa, Perrottetia ovata
ALSIAGAVQSQKLAVRAISQLQSLPGGDIKLLCDAVVENVRNLTGYDRVMVYKFHEDEHGEVVAESKRPDLEPYIGLHYPATDIPQASRFLFKQNRVRMIVDCHSTPVSVIQDDGLMQPLCLVGSTLRAPHGCHAQYMANMGSIASLAMAVIINGNDEDGIGGRNTTRLWGLVVCHHTSARCIPFPLRYACEFLMQAFGLQLNMELQLASQLLEKHVLKTQTLLCDMLLRDSPTGIVTQSPSIMDLVKCDGAALYHQGKYYPLGVTPTEAQIKDIVEWLLAFHGESTGLSTDSLADAGYPGAALLGDAVCGMAVAYITDRDFLFWFRSNTAKEIKWGGAKHHPEDKDDGQRMHPRSSFKAFLEVVKSRSLPWEN

SEQ ID NO: 7550 - protein, 355 aa, Burkholderia multivorans
MKIAVLPGDGIGPEIVTEAVKVLNALDEKFELEQAPVGGAGYEARGHPLPDATLKLAKEADAILFGAVGDWKYDSLERALRPEQAILGLRKHLELFANFRPAICYPQLVDASPLKPELVAGLDILIVRELNGDIYFGQPRGVRAAPDGPFAGEREGFDTMRYSEPEVRRIAHVAFQAAQKRAKKLLSVDKSNVLETSQFWRDIMIDVSKEYADVELSHMYVDNAAMQLAKAPKQFDVIVTGNMFGDILSDEASMLTGSIGMLPSASLDKNNKGLYEPSHGSAPDIAGKGIANPLATILSAAMLLRYSLNRAEQADRIERAVKTVLEQGYRTGDIATPGCKQVGTAAMGDAVVAAL

SEQ ID NO: 7551 - protein, 245 aa, Rhizobium leguminosarum
MLDLSGRKALVTGASGGIGEEIARLLHRQGAIVGLHGTRVEKLEALAADLGERVKIFPANLSDRDEVKALGQKAEADLEGVDILVNNAGITRDGLFVRMSDEDWDSVIEVNLTATFRLTRELTHPMMRRRYGRIINITSVVGVTGNPGQANYCASKAGMIGFTKSLAQEIATRNVTVNCVAPGFIESAMTGKLNDKQKEAIMGAIPMKRMGTGGEVASAVAYLASSEAAYMTGQTLHVNGGMAMI

SEQ ID NO: 7552 - protein, 392 aa, uncultured bacterium pCosFS1
MSVTDSDLEFDQRHIWHPYTSMSHPLPCYPVEAASGVELQLADGRRLIDGMSSWWAAIHGYNHPQLNLAATQQLEKMSHVMFGGITHPAANELCRKVVAMTPEALQCVFLADSGSVAVEVSLKMALQYWQARGERRQRILTLRHGYHGDTFGAMSVCDPDNSMHSLYQGYLAPHLFATAPQCGFDQAWDENDIAPFAALLEQHAGEVAAVILEPVVQGAGGMRIYHPTYLERVRELCDRYQVLLIADEIATGFGRTGKLFACEHAEVVPDILCLGKALTGGYMTLSATLTTRHVAETISNGAAGCFMHGPTFMGNPLACAVANASLSLLAENRWQQQVAAIETQLKQQLLPLKMQPKVADVRVLGAIGVVEMREPVDMAQLQRGFVERGVWI

SEQ ID NO: 7553 - protein, 328 aa, Streptomyces avermitilis MA-4680
MTWLITGGAGFIGAHVVRTMLEAGERVAVYDDLSTGDPGRTPEGVPFVKGSTLDGGLLRRTLADLHITGVVHLAAKKQVAESVERPLYYYRENVHGLETLLDAAAETGVRNFLFSSSAAVYGMPDVKVVTEDTPCAPINPYGETKLAGEWLVRAAGRAHGMTTASLRYFNVAGAADERLADTGVFNLIPMVFEKLTQGTAPVIFGDDYDTEDGTCVRDFIHVEDIASAHLAAARALTGREPGSDLTVNIGRGEGVSVREMIELIGEVTGYGADAAPVSAARRPGDPARVVAAADRIQAELGWSARYDARAMVASAWAGWCARHPQARR

SEQ ID NO: 7554 - protein, 125 aa, Oryza sativa
  unsure (1)..(125): unsure at all Xaa locations
XCPGAPQRVLKTTFYDQWKNLPEQETEENQPIIGHTIIHGVHRDIRRFAGTVPNATTTGDIDSMVMYAGQGVGLITEIIPASEVVKRLVSEAQHVIREKLLXISCTVQGAVNTIWFLLARTNENK

SEQ ID NO: 7555 - protein, 323 aa, Micromonospora megalomicea subsp. nigra
MSTDATHVRLGRCALLTSRLWLGTAALAGQDDADAVRLLDHARSRGVNCLDTADDDSASTSAQVAEESVGRWLAGDTGRREETVLSVTVGVPPGGQVGGGGLSARQIIASCEGSLRRLGVDHVDVLHLPRVDRVEPWDEVWQAVDALVAAGKVCYVGSSGFPGWHIVAAQEHAVRRHRLGLVSHQCRYDLTSRHPELEVLPAAQAYGLGVFARPTRLGGLLGGDGPGAAAARASGQPTALRSAVEAYEVFCRDLGEHPAEVALAWVLSRPGVAGAVVGARTPGRLDSALRACGVALGATELTALDGIFPGVAAAGAAPEAWLR

SEQ ID NO: 7556 - protein, 148 aa, Oryza sativa
WRASVLGLELERCSAALRWRRCFSVPTSKARPRPLTCHGRQLRRRHLLLPLPTPPPPRRRTTRRRRRPPPRRRSSRLYGVTPGSLRPQECGGRCAYRCSATAYRKPCMFFCQKCCASCLCVLPGTYGNKQSCPCYNDWKTKRGGPKCP

SEQ ID NO: 7557 - protein, 94 aa, Zea mays
SGKISLTSHHLPSASPHLWSGSVSGSGGGNLNPWECSPKCGSRCSKTQYRKACLTLCNKCCAKCLCVPPGFYGNKGACPCYNNWKTKEGGPKCP

SEQ ID NO: 7558 - protein, 350 aa, Pseudomonas sp. TW3
MNEFFKKISGLFVPPPESTVSVRGQGFQFKVPRGQTILESALHQGIAFPHDCKVGSCGACKYKLISGRVNELTSSAMGLSGDLYQSGYRLGCQCIPKEDLEIELDTVLGQALVPIETSALISKQKRLAHDIIEMEVVPDKQIAFYPGQYADVECAECSAVRSYSFSAPPQPDGSLSFHVRLVPGGVFSGWLFGGDRTGATLTLRAPYGQFGLHESNATMVCVAGGTGLAPIKCVLQSMTQAQRERDVLLFFGARQQRDLYCLDEIEALQLDWGGRFELIPVLSEESSTSSWKGKRGMVTEYFKEYLTGQPYEGYLCGPPPMVDAAETELVRLGVARELVFADRFYNRPPC

SEQ ID NO: 7559 - protein, 304 aa, Triticum aestivum
DHDHAHEQSHAHSLKDLSVGLSILFGIVLFFIVEKIVRYVEDNSQRGGHSHGHHHHHHKRQDISDKAKSDHIKSDDEGKDTDQAQQNSLHDGATGKIIDAENEQESNATKEAVLGSQRSALDVVPGATDREPINSETDPAPGKALSSEDSSVSNSNLVFGYLNLFSDGVHNFTDGMALGSAFLLHGSVGGWSRTLFLLAHELPQEIGDFGILVRSGFTVTKALFFNFLSALVALGGTALALSLGTDPGHSSLIEGFTAGGFIYIAVAGVLPQMHDQKTTLSNSMCQLIFLTMGMLVALGISLVE

SEQ ID NO: 7560 - protein, 199 aa, Pseudomonas putida
MPCYRLDGLTPVVHPTAYVHPSAVLIGDVIVGPRCYIGPLASLRGDFGRIVLEEGANLQDTCVMHGFPGGDTVVERNGHVGHGAVLHGCKVGEDALIGMNAVVMDGAHVAPRCIVAATAFVKAGFACEAQSLVMGSPAQVKRPLSEQELAWKQRGTAEYQHLAQRCMNSMVECPPLAEAEPGRPRMEDTGVRPKGQASA

SEQ ID NO: 7561 - protein, 228 aa, Gossypium rotundifolium
  unsure (1)..(228): unsure at all Xaa locations
FTSLCHTDVYFWEAKGQTPLFPRIFGHEAGGIVESVGEGVTHLKPGDHVLPVFTGECGNCRHCKSKESNMCDLLRINTDRGVMLSDGKTRFSINGKPIYHFVGTSTFSEYTVAHVGSVAKINPAAPLDKVCILSCGISTGLGATLNVAKPAKGSTVAIFGLGAVGLAAAEGARIAGASRIXGVDLNPNRFEEAKKFGCTEFVNPKDHNKPVQEVLAEMTNGGVDRSVE

SEQ ID NO: 7562 - protein, 195 aa, Zea mays
RPADDCCCRHRWTGRFEAHLWDKNSWNPTQRKKGKQVYLGAYDEEEAAARAYDLAALKYWGPTTYTNFPVMDYEKELKVMENLTKEEYLASLRRKSSGFSRGVSKYRGVARHHQNGRWEARIGRVFGNKYLYLGTYSTQEEAARAYDIAAIEYKGVNAVTNFDLRSYITWLKPSAPPAASPGCARGAGSAGRAAA

SEQ ID NO: 7563 - protein, 157 aa, Oryza sativa
MEARRISASPRPCSGRRVVARKRPRHEAAVNSVRKLQRREISSCRDRAFSMSAAQERFRNIQLQEEFDTHDPKENSLLLPYLRKRSKIIEIVAARDIVFALSQSGVCAAFSRETNRRICFLNGSPDEVIRSLFYNKNNESLITVSVYGSENFSALRC

SEQ ID NO: 7564 - protein, 214 aa, Paeonia humilis
IVESVGEGVTDVKPGDHVLPIFTGECKECRHYKSEESNLCDLLRINTDRGVMLNDGKSRFFINGQPIFHFVGTSTFSEYTVLHVGCLAKINPEAPLDKVCVLSCGISTGLGATLNVAKPKKGSTVAIFGLGAVGLAAAEGARIAGASRIIGVDLNPKRFDEARKFGVTEFVNPKDYNKPVQEVIAEMTGGGVDRSVECTGSIMAMMSAFECVHD

SEQ ID NO: 7565 - protein, 408 aa, Triticum aestivum
GHRHGRGLLRAATGRLRKDNPPGEATKKIPQVDHRLVAALLVLLGLLLSPAPAAAAAGDEEPLIRQVVGAADPLDNDLELDSQFLGFVQRFGKTYRDAEEHAHRLSVFKANLRRARRHQMLDPSAEHGVTKFSDLTPAEFRRTFLGLKTTRRSFLREMAGSAHDAPVLPTDGLPEDFDWRDHGAVGPVKNQGSCGSCWSFSASGALEGANYLATGKMEVLSEQQLVDCDHECDPAEPDSCDAGCNGGLMTSAFSYLLKSGGLEREKDYPYTGKDGTCKFEKSKIAASVQNFSVVAVDEEQIAANLVKYGPLAIGINAAYMQTYIGGVSCPYICGRHLDHGVLLVGYGASGFAPSRFKEKPYWIIKNSWGENWGDKGYYKICRGSNVRNKCGVDSMVSTVSATHASKDE

SEQ ID NO: 7566 - protein, 368 aa, Prochlorococcus marinus subsp. marinus str. CCMP1375
MSDIPTMPSIAKVIPRQCFTRQTSKSLAYLFRSILIQVIVVAIGLTIPYTPSMSLVWIIYALVSGTTAMGFWVIAHECGHGAFSNNRRLETVIGYFLHTILLVPYFSWQRSHSVHHRFTNHITEGETHVPLVIGGNGISEQAGGEEEIAFSRSIGKVAFGAMQLLMHLIIGWPAYLLAGKTGGPKYGMSNHFWPREPFSKKLWPSTWSKKVWKSDCGIAVVLIILFNWAWSFGIASVLTMYVGPLLVVNCWLVVYTWLHHTDSDVPHLGEEDFSFMRGAFLSIDRPYGKILDFLHHHIGSTHVIHHIAPTIPHYHAIEATRAIKKAFPKVYLFNPTPIHKALWSVASNCVAVKADGQSSRYLWEKNLN

SEQ ID NO: 7567 - protein, 511 aa, Lycianthes rantonnei
MVLLLISELCASAIIFIIVHIIISKLIATGWGRRQRLPPGPMGWPVIGALPLLGTMPHVALAKMAKKYGPIMYLKVGTCGMVVASTPNAAKAFLKTLDINFSNRPPNAGATHLAYDAQDMVFAHYGPRWKLLRKLSNLHMLGGKALEDWANVRANELGHMLKSMFDASRVGGRVVVADMLTFAMANMIGQVILSKRVFVEKGAEVNKFKDMVVELMTVAGYFNIGDFIPQLAWMDLQGIEKGMKCLHKKFDDLLTKMFDEHKATTNERKGKPDFLDVVMANRDNSEGERLSTNNIKALLLNLFTAGTDTSSSAIEWALAEMMKNPQILKKVQQEMDQIIGKNRRLIESDIPNLPYLRAVCKETFRKHPSTPLNLPRISNEPCMVDGYYIPKNIRLSVNIWAIGRDPDVWENPLEFNPERFLSGKNVKIDPRGNDFELIPFGAGRRICAGTRMGIVMVEYILGTLVHSFDWKFSNDVKEINMEESFGLALQKAVPLEAMVTPRLPFDVYYTN

SEQ ID NO: 7568 - protein, 111 aa, Oryza sativa
  unsure (1)..(111): unsure at all Xaa locations
XMSQQGIWYGDVFPVTRSLAAKPIAPRDAATCSRRAENLVLGKTVKGGPAAAMESAASRNEEMGVIGHDQSTDATAEHGVNVSNTLVLGGSRIVTEFVAGQLRGPALHRFX

SEQ ID NO: 7569 - protein, 250 aa, Pseudomonas aeruginosa PAO1
MSVSSASLAGKVAFVQGGSRGIGAAIVRRLAAEGASVAFTYVSSADKSRALAAELEGAGASILALHADSADAAALVAAVDEAAARFGRIDILVNNAAVLALGSVEELPLADFERTLAINVRSVFVATQAAVKHMGDGGRVISIGSTNAERMPFAGGATYAMSKSALVGLTKGLARDLGPRGITVNNVQPGPVDTDMNPDDGDFAEALKGLMALPRYARSEEIASFVAYLAGPEAAYITGASLTIDGGFSA

SEQ ID NO: 7570 - protein, 288 aa, Bacillus anthracis str. A2012
MKDLIIIGAGQAGLTMGYYLKQEGYNFLLLEAGNRVGDSWRNRYDSLQLFTPRSYSSLPGMALIGEKNEFPYKDEIATYLEEYARHFQLPVQLQTEVLKIRKEKGIFELHTSTEILQTKKVIIATGGFQQPFIPSVSANLSSHVFQIHSSQYKSPSQIPQGKVLVVGGGNSGMQIAVEFAKTHEVTMSISHPLTFLPLHLFRKSIFNWLDKLGLLYAEVNTKRGKWFRKERIPFLDLKVRNSFVMEQYNYRKKWLVHQKIILCFRTVKHIVQKVLYGQQVLFRIITGF

SEQ ID NO: 7571 - protein, 475 aa, Pseudomonas putida KT2440
MSDSSGKLKLGALVALVVGSMIGGGIFSLPQNMAASAGVGAVLIGWAITAVGMLTLAFVFQTLANRKPDLDGGVYAYAKAGFGDYMGFSSAWGYWISAWLGNVGYFVLLFSTLGYFFPIFGEGNTPAAIIGASILLWAVHFLVLRGIKEAAFINLVTTVAKVVPLVLFALICLFAFRLDIFTADIWAMGTPELGSVMNQVRNMMLVTVWVFIGIEGASIFSARAEKRTDVGKATVIGFVTVLLFLVLVNVLSLGIMTQPELAKLQNPSMAAVLEHVVGHWGAVLISVGLVISLLGALLSWVLLCAEIMFAAAKDHTMPEFLRRENAKQVPANALWLTNAMVQIFLVITLFSSSTYLSLIYLATSMILVPYLWSAAYAFLLALRSETYEQALAERKKDLIIGGIALLYAIWLLYAGGVKYLLLSALLYAPGAILFAKAKREVGKPVFTNVEKLIFAAVVIGALVAAYGLYDGFLTL

SEQ ID NO: 7572 - protein, 429 aa, Bradyrhizobium sp. WM9
MVGVHGPRRMKAIETLESNVRSYSRSFPAVFGRARGSIMFAEGDRKVIDFLSGAGALNYGHNNREIKAAISEYLESDGVVHGLDMATPAKVEFMEHFSSVILRERNLSYRFQFTGPTGANAVEAALKLSRKITGRHNVISFTNGYHGQSLGAIAASGNRFYRKASSIPLSGTTFMPYDGYLGSADSPADYVRKVLMDESSGIDLPAAILVETVQGEGGINVAGKEWLQSIQALAKEVGAIFIVDDIQMGCGRTGEFFSFEFAALSPDIVVMSKSLSGYGLPLSMLLIKEAIDAWEPGEHTGTFRGNNLALVSGKAALTLYWRNQTFSQQVQRLGAFMRGRLDAIAHQHGNKFAVRGRGMVCGFDCKTTEIAEVTAHKAFEKGLIIERCGPTDQVVKFLPALTIDQETLGRGLDIFEESLTETLNSARGS

SEQ ID NO: 7573 - protein, 353 aa, Bacteroides thetaiotaomicron VPI-5482
MDFKIAVLAGDGIGPEISVQGVDVMSAVCEKFGHKVSYEYAICGADAIDKVGDPFPEETYEVCKNADAVLFSAVGDPKFDNDPTAKVRPEQGLLAMRKKLGLFANIRPVQTFKCLIHKSPLRAELVENADFICIRELTGGMYFGEKYQDNDKAYDTNYYTRPEIERILKVAFEYAMKRRKHLTVVDKANVLASSRLWRQIAQEMAPNYPEVTTDYMFVDNAAMKMIQEPAFFDVMVTENTFGDILTDEGSVISGSMGLLPSASTGESTPVFEPIHGSWPQAKGLNIANPLAQILSVAMLFEYFDCKEEGALIRKAVDASLDENVRTPEIQVADGAKYGTKEVGQWIVDYIKKA

SEQ ID NO: 7574 - protein, 115 aa, Acetabularia acetabulum
AFDLFDTDGSGSIDAKELKVAMRALGFEPKKEEIKKMIADIDKDGSGTIDFEEFLSMMTAKMGERDSREEIMKAFRLFDDDETGKISFKNLKRVAKELGQNMTDEELQEMIDEAD

SEQ ID NO: 7575 - protein, 341 aa, Oryza sativa (japonica cultivar-group)
MGVMSKQQQEAMAEEMMELRRGPWTLEEDNLLMNYIACHGEGRWNLLARCSGLKRTGKSCRLRWLNYLKPDIKRGNLTPEEQLLILELHSRWGNRWSRIAQHLPGRTDNEIKNYWRTRVQKQARQLKVDANSTVFRDAVRCYWMPRLLEKMAGAATDPTPPPPPPLHHHAAMATASSSPFDFDTHLQQAEAATACVVPNNVYHHHIDPSPSTSTSAGSTAAAAAFQPLPCFSELRWDQQMQSSGELDDGAAGVFVDSASALGSLSLDGLDLGPAEYYSDSTLLDYLNSSCTGSAMMTMMTASGNAGSYNYCGGAMDGGDTWRSDEVCQAAARKLGEWGGGI

SEQ ID NO: 7576 - protein, 258 aa, Zea mays
  unsure (1)..(258): unsure at all Xaa locations
MDPSKLGELRSFVEACKKDPALLADPALAFFRDYLTSLGATLPASAAAAGKPAPKARSMDDIDDDDDEEEEEDDQDMRDPTPEPDELDEEIVESDLELDNDGVVHPDHDDAPQKMGDSSVEVTEESRDASQEAKGQAMEAMSEGKLEEAVEHLTKAILLNPTSAIMYGTRASVFIKMKKPAAAIRDANAALEINPDSAKGYKTRGMANAMLGKXEEAARDLHAASNIDYDDEINAVXQKVEPNAXQIVEHRRKYDRAE

SEQ ID NO: 7577 - protein, 196 aa, Dunaliella salina
YWVPYHGWRISHRNHHANHGHVENDESWHPTRKSVYDKMDDLGRIGRLTLPWSMFAYPFYLWKRSPGKTGSHYDPNCDLFVTKTEKEQCITSNVFLVAWLGVLAACKTQLGIPAMINLYVMPYWFFVVWLDVVTYLQHHGSHDPEEKLPWFRGEEWSYLRGGLTTLDRDYGIFSRIHHSIGIHVVHQFFPQIPHYQ

SEQ ID NO: 7578 - protein, 480 aa, Glycine max
MEGGGRRITVSPRPCCGRRVVAKKRPRLVDGFVNSVKKLQRREISSNRDRAFSMTDAQERFRNIRLQEEYDTHDPKGPSSVVLSFLRKRSKIIEIVAARDIVFALAQSGVCAAFSRETNERICFLNVSPDEVIRSLFYNKNNDSLITVSVYASDSYSSLKCRSTRIEYIRRGTPDAGFALFESESLKWPGFVEFDDVNGKVLTYSAQDSIYKVFDLKNYTMLYSISDKNVQEIKISPGIMLLIYAKASSHVPLKILSIEDGTVLKSFSHLLHRNKKVDFIEQFNEKLLVKQENENLQILDVRTFEHRAARRRGVRRPSAFIFLYENQLFLTFRNRTVAVWNFRGELVTSFEDHLLWHPDCNTNNIYITSDQDLIISYCKADSDDSLSEGNAGSINVSNILTGKCLAKIRASNSFPVDNNCSCSDKPSRSYCCNSKKRKHGSKMRSTVAEALEDITALFYDEERNEIYTGNRLGLVHVWSN

SEQ ID NO: 7579 - protein, 370 aa, Rhodococcus ruber
MKTKAAVLLETGKPFEIMELDLDGPGPGEVLIKYTAAGLCHSDLHLTDGDLPPRFPIVGGHEGSGIIEEVGPGVTKVKPGDHVVCSFIPNCGTCRYCSTGRQNLCDMGATILEGCMPDGSFRFHSGSTDFGAMCMLGTFAERATISQHSVVKVDDWLPLETAVLVGCGVPSGWGTAVYAGDVRAGDIVVIYGIGGLGINAVQGAVHAGAKYVVVVDPVEFKRDTALKFGATHAFATAAEAAEKVNELSWGQGADAALILVGTVDEEVVSAATSIVGKGGTVVITGLANPEKLTVHVSGTELTLFQKTIKGSLFGSANPQYDIVRLLRLYDAGQLKLDELVTHRYSLEEVNQGYQDLRDGKNIRGVILHDA

SEQ ID NO: 7580 - protein, 364 aa, Chlamydophila caviae GPIC
MGHTECGIVGLPNVGKSGLFNALTGAQVASCNYPFCTIDPNVGIVPVIDNRLDVLAKMSQSQKVIYADMKFVDIAGLVKGAADGAGLGNRFLSHIRETHAIAHVVRCFDNDDVTHVSGKIDPADDISVINLELIFADFSSATSIHSKLEKQAKGKKDLGVVLPLLDRVIKHLESGQPVRTLDLSPEEQIQLKPYPFLTAKPMLYIANIGEDSIATMHNDYVAIVQEVAKKENAQVVPICVQLEEEVISLPVEERQDFLNSLGLQESGLNRLVRAAYHTLGLISYFTTGPQETRAWTIPIGSTAAEAAGQIHTDIQKGFIRAEVVTLEDMIAYEGRSGVREAGRLRAEGRDYIVQDGDIMLFLHN

SEQ ID NO: 7581 - protein, 334 aa, Glycine max
  unsure (1)..(334): unsure at all Xaa locations
PAPGALQSYKLAAKAITRLQSLPSGSMERLCDTMVQEXXELTGYDRVMAYKFHEDDHGEVIAEITKPGLEPYLGLHYPATDIPQASRXXFMKNKVRMIVDCHAKHVRVLQDEKLPFDLTLCGSTLRAPHSCHAQYMANMDSIASLVMAVVVNDNEEDGDTDAIQPQKRKRLWGLVVCHNTTPRFVPFPLRYACEFLAQVFAIHVNKEIELEYQIIEKNILRTQTLLCDLVMRDAPLGIVSESPNIMDLVKCDGAALIYKNKVWRLGVTPSESQIREIALWLSEYHMDSTGFSTDSLFDAGFPSALSLGDVVCGMASVRVTAKDVVFWFRSHTAA

SEQ ID NO: 7582 - protein, 228 aa, Pseudomonas syringae pv. syringae B728a
MQRKGDTPATLDLFADQTAQPRSDERIGPGSWLFRGFALPAMPQLLPALEETLGLSPFRHMQTPSGLSMSAALSSCGQLGWITDRHGYRYSATDPQTGQAWPTMPDVFMQLAQDAALAAGYAGFVPDACLINRYIPGAKMSLHQDRDEYDHRWPVVSVSLGIPAIFQFGGLLRGDKTQRISLFHGDVVVWGGEDRLRFHGILPIKQAEHPQLGEQRINLTFRKAGRDS

SEQ ID NO: 7583 - protein, 317 aa, Solanum tuberosum
SGPVDDPSKLPKWNYDGSSTGQAPGEDSEVILYPQAIFKDPFRRGNNILVICDCYTPAGEPIPTNKMCHNAAKIFSNPDVVVEEPWYGLEAEYTLLQRRNYWPLGWPIGGFPGLQGPYYCGIGSGKAFGRDIVDAHYKAYIYAGINISGINGEVMPGQWEFQVGLQVGIASGDEVWAARYILERITEIAGVVVSFDPKPIPGDWNGAGAHTNYSTKSMRNEGGYEVIKKAIEKLGLRHKEHIAAYGEGNERRLTGKHETADINTFKWGVANRGASIRVGRDTEKEGKGYFEDRRPASNMDPYIVTSMYAETTLLWNP

SEQ ID NO: 7584 - protein, 214 aa, Paeonia peregrina
  unsure (1)..(214): unsure at all Xaa locations
IVESVGEGVTDVKPGDHVLPIFTGECKECRHCKSEESNLCDLLRINTDRGVMLNDGKSRFSINGQPIFHFVGTSTFSEYTVLHVGCLAKINTEAPLDKVCVLSCGISTGLGATLNVAKPKKGSTVAIFGLGAVGLAAAEGARIAXASRIIXVDLNPKRFDEARKFGVTEFVNPKDYNKPVQEVIAEMTGGGVDRSVKCTGSIMAMMSTFECVHD

SEQ ID NO: 7585 - protein, 474 aa, Oryza sativa; identical to SEQ ID NO: 7037

SEQ ID NO: 7586 - protein, 303 aa, Rhodococcus sp. DS7
MKTKAAVLLEPGKPFEIMELDLDGPGVGEVLIKYTAAGLCHSDLHLTDGDLPPRYPIVGGHEGSGIIEEVGPGVTKVKPGDHVVCSFIPNCGTCRYCSTGRQNLCDMGATILEGSMPDGSFRFHGNGMDFGGMCMLGTFSERATISQHSVVKIDDWLPLETAVVVGCGVPSGWGTAVNAGNLRAGDTAVIYGIGGLGINAVQGAVSAGCKYVVVVDPVALKRETALKFGATHAFADAESAAAKVNELTWGQGADAALILVGTVDEDVVSAATAVIGKGGTVVITGLADPAKLTVHVSGTDLTL

SEQ ID NO: 7587 - protein, 308 aa, Oryza sativa
  unsure (1)..(308): unsure at all Xaa locations
HPSPHLASVYEAMERRDRGGGSSSRNPHGAPVEEEEELEDDFDEFRLPMSHRPTENLETEGLEQASVDTQLTSSNVGFRLLQKMGWKGKGLGKNEQGITEPIKAGIRDAKLGVGKQEQDDFFTSEDNVQRRKLNIQLEETDEPHKKREVIAEREQKIRSEVKEIQKVFFCSLCNKQYKLAHEFESHLSSYDHNHRKRFKEMKEMHSSSSRDDRQKREQQREEKELAKFAQLYPSHVLQQQQKQEPSESSSERITMKNLPNPSNQDQRKTLKFGFSKMAPSKVPHIXTTYFVKLIXPFMEVKXLCACME

SEQ ID NO: 7588 - protein, 606 aa, Oryza sativa
  unsure (1)..(606): unsure at all Xaa locations
XHASARPLLRSPSSPPPPRPMRPPXTDAAPLPPKPSTGSPFYGENWRNPAAAANPSSSSLLPAXXVGGGAHARAAAYSASPGAAELKETFAEWMAEQRWEEMKQLFEFWVRSLDPASGKPNRPDVDLFNHYLRAQLMSGALPIEMLDLAEQMREFEITPNTASHNLILKSMVQAQEADGAEKLIERMLQTGTQPDDESYNLVVNLLIKLNRVDSTLKYLDLMLKSGYTISSSVFVEYVRACVRSGRLDTLASVIEKCKATDQNKVLCPPWSWCVEIAEAAFEANNSKLGLFALEYLARWIARSERVIPPLHLSVDEGLVLSALSAAARTCSTDLLNAAWSILRKSLHQKRAPTPEAYLAKIYAHSSIGHLQRAFGTLREFENTYGNFEDIDSELFSPFTSLRPLVVACCKDGYTTLDSVYVQLENLSSADSPYKSVAALNCVILGCANIWDLERAYETFEAIKEKFGLTPDIHSYNALLHAFGKRKKTEEACNVFQHLVSLGVKPNATTYGLLVDTHLVNRDAKAALAVIAEMVDAGFTPSKETLKKVRRRCSRESDFDSDEKVQSLAKQFNYRMGGENRREMLFNIEYSAEFTSTPSPRYWANLF

SEQ ID NO: 7589 - protein, 356 aa, Nicotiana tabacum
MAHLSDLVNLNLSDSTQKIIAEYIWIGGSGMDVRSKARTLSGPVDDPSKLPKWNYDGSSTGQAPGEDSEEILYPQAIFKDPFRRGNNILVICDCYTPAGEPIPTNKRHSAAKIFSHPDVVVEEPWYGLEQEYTLLQKDINWPLGWPLGGFPGPQGPYYCGIGAGKVFGRDIVDSHYKACLYAGINISGINGEVMPGQWEFQVGPSVGISAADELWAARYILERITEIAGVVVSFDPKPIPGDWNGAGAHTNYSTKSMRNEGGYEVIKKAIENLGLRHKEHIAAYGEGNERRLTGRHETADINTFKWGVANRGASIRVGRDTEREGKGYFEDRRPASNMDPFVVTSMIAETTILSEP

SEQ ID NO: 7590 - protein, 336 aa, Vibrio vulnificus CMCP6
MNILVTGGSGYIGSHTCIQMIEAGMTPIILDNLYNSKLLVLDRIEQVTGVRPTFYQGDIRDSEILQHVFAQHDIQGVIHFAGLKAVGESVEKPLMYYDNNVSGTLNLVREMDKAGVKSLIFSSSATVYGDPASVPIRENFPTSATNPYGRSKLMVEECLTDFHKANPDWSITLLRYFNPVGAHESGLLGEDPQGIPNNLLPFVAQVAVGRREKLGVFGDDYPTPDGTGVRDYIHVIDLADGHLAALNKVGQQAGLHIFNLGTGQGNSVLEMVAAFEKAAQRPIPYEIKPRRAGDIAECWADPAYAEQVLGWKATRSLETMVVDTWRWQSNNPNGYE

SEQ ID NO: 7591 - protein, 505 aa, Cicer arietinum
MGSRNIVQQQNRAEAAVPGAMKQKNIAGEKKNRRALGDIGNLVTVRGVDGKAKAIPQVSRPVTRSFCAQLLANAQTAAADNNKINAKGAIVVDGVLPDRRVAAARVPAQKKAAVVKPRPEEIIVISPDSVAEKKEKPIEKEKAAEKSAKKKASTLTSTLTARSKVASGVKTKTKEQIVDIDAADVTNDLAVVEYVEDMYKFYKSVENESRPHDYMGSQPEINEKMRAILIDWLVQVHHKFELSPETLYLTINIVDRYLASETTIRRELQLVGIGAMLIASKYEEIWAPEVHELVCISDNTYSDKQILVMEKKILGALEWYLTVPTPYVFLVRFIKASMTDSDVENMVYFLAELGMMNYATLIYCPSMIAAASHQVYAARCTLNKAPFWNETLQLHTGFSEPQLMDCAKLLVAFHKMAGDQKLKSIYRKYSNLERGAVALLSPAKSLFVFLIELLMNAIEKMQCSLFFTSEIWCRFLTCFGRNISPGCSLVLLQRNFLIPLILYAL

SEQ ID NO: 7592 - protein, 269 aa, Escherichia coli
MGFKCGIVGLPNVGKSTLFNALTKAGIEAANFPFCTIEPNTGVVPMPDPRLDQLAEIVKPQRTLPTTMEFVDIAGLVKGASKGEGLGNQFLTNIRETEAIGHVVRCFENDNIIHVSGKVNPADDIEVINTELALADLDTCERAIHRVQKKAKGGDKDAKAELAVLEKCLPQLENAGMLRALDLSAEEKAAIRYLSFLTLKPTMYIANVNEDGFENNPYLDQVREIAAKEGSVVVPVCAAVEADIAELDDEERDEFMQELGLEEPGLNRV

SEQ ID NO: 7593 - protein, 583 aa, Saccharomyces cerevisiae
MDEFESTKLSKVQFSTSVLSTPSNEGNNLIHRFKNSFKRNDSPAIQEGLLYSELSEEEKIQWDLANQPYKKVLDQRHLTMIAIGGTLGTGLFIGLGESLASGPASLLIGFLLVGASMLCVVQCGAELSCQYPVSGSYALHASRFIDPSVGFSIGINYLLMWLISYPSELVGCSLTISYWAPSVNPAAWVAIAFVLSMLLNLFGARGFAESEFYMSIFKIVALFIFIIIGIVLIAGGGPDSTGYIGTKYWHDPGSFAVPVFKNLCNTFVSAAYSFSGTEMVVLTSTEARSVSSVSRAAKGTFWRIIIFYIVTVIIIGCLVPYNDPRLISGSSSEDITASPFVIALSNTGAMGTRVSHFMNAVILIAVFSVCNSCVYASSRLIQGLATAGQLPKICAYMDRNGRPLVGMAICGAFGLLGFLVVSKNQGTVFTWLFALCSISFFTTWFCICFCQVRFRMAMKAQGRSKDDIIYRSTLGIYGGIFGCILNVLLVIGEIYVSAAPVGSPSSAANFFEYCMSIPIMIAVYIGHRIYRRDWRHWYIKRMDIDLDSGHSLEDFEATKLERDEDKKYVSSKPLYYRIYRFFC

SEQ ID NO: 7594 - protein, 316 aa, Glycine max
MYSLAQHKYTPNFHHQVCKNHPPRHPSRVHCSTTTTTTTTTSRSKSNAKSLVIETRLVPVPPMPTVVTTEIHRPMNNDPSLQSTWSHRAWVAAGCSTLVISLGESIKGAIDLNMWVEPIVAGWVGYILADLGSGVYHWAIDNYGDGSTPIVGAQIEAFQGHHKWPWTITRRQCANNLHAMARAVTLAVLPVVLLCHDPIVEGFVVVCSGCIMFSQQFHAWSHGTKSRLPPLVVALQEAGVLVSRWQHAAHHRAPYNNNYCIVSGVWNEFLDKHKVFEAMEMVLYFKTGVRPRSWSEPAPEWVEEIETPSQIQIQTQ

SEQ ID NO: 7595 - protein, 376 aa, Thermotoga maritima
MEERTLVILGATGSIGTQTLDVLKKVKGIRLIGISFHSNLELAFKIVKEFNVKNVAITGDVEFEDSSINVWKGSHSIEEMLEALKPDITMVAVSGFSGLRAVLASLEHSKRVCLANKESLVCGGFLVKKKLKEKGTELIPVDSEHSAIFQVMEPEVEKVVLTASGGALRDWKISKIDRARPEDVLKHPVWNMGARITVDSATMVNKAFEVLEAMELFELPFEKIEVKIHREGLVHGAVVLPDGNVKMVVSPPDMRIPISYALFYPRRVALEPFFLRTISLSFEDPDPEKYPAFFLLKEIKDSYALRTAFNAADEVAVEAFLKGRIRFGGIHRVIEKTLEEFQGYPQPRTLDDVERIHFEAIKKAERVTEWLSSTSY

SEQ ID NO: 7596 - protein, 290 aa, Nostoc punctiforme
MIPTIIVHGGAKTITDDKVTANNAGCTAAAEAGWAVLISGGTAAEAVEAATRVLEADPTFNAGLGATLNSDGEVELDAAIMEGSLSWGAIAAVQGVRHPISVARKIMDDKPRLLVARGGERFAIDCGAEMCKKEDLIAEEQWQQWKEDREVIDRPNTIGCVALDASGVLAAGTSTGGTTKQQQGRVGDTALVGCGLYADNKFGACSTTGDGESIIPVVLAKTAIDFLSGDRHPDEAAQMAIDALVSKVKGEAGCILIDRQGRVGWAYNSSHMACAYMTAGQDKVAAFTKK

SEQ ID NO: 7597 - protein, 573 aa, Trichoderma harzianum
MSKEESGHVTPEKGDNVVDYQASTTVLPSEGPERDANWFTRNGLNVDSFKKKHYGPGMVELERPMKARHLHMIAIGGSIGAGFFVGSGGALAKGGPGSLFVDFLIIGIMMFNVVYALGELAIMYPVSGSFYTYSARFIDPAWGFAMGWNYVLQWAAVLPLELTVCGITISYWNSEITTAAWISLFLGVIIIINLFGALGYAEEEFWASCFKLAATVIFMIIAFVLVLGGGPKDGRYHEYWGARYWYDPGAFKNGFKGFCSVFVTAAFSFSGTELVGLAAAESTNPTKNMPGAIKQVFWRITIFYILGLFFVGLLINSDDPALLSSAAYADSKASPFVLVGKYAGLKGFDHFMNLVILASVLSIGVSGVYGGSRTLTALAQQGYAPKLFTYIDKSGRPLPSVIFLILFGFIAYVSLDATGPVVFDWLLAISGLAALFTWGSVCLAHIRFRKAWKYHGHTLDEIPFKAAGGVYGSYLGLFICVIVLMAQFYTAIAAPPGSPGVGTAEDFFKQYLAAPVVLGFWIVGWLWKRQPFLRTKNIDVDTGLREFDWDEINAERTRIAPLPAWRRIIHHTF

SEQ ID NO: 7598 - protein, 361 aa, Pseudomonas putida KT2440
MSHWPDRRILNLLGIELPILQAPMAGATGSAMAIAVGQAGGLGALPCAMLSGEQVRAEIAAFRAGCPGRPLNLNFFCHQPPAPDAERDARWKQALEPYYSEVGADFTAPTPVSNRAPFDEQSCLLVEALRPEVVSFHFGLPQAELLQRVKASGAKVLSSATTVEEAAWLERNGCDAIIAMGYEAGGHRGMFLSDDITSQIGTFALVPQVADAVGVPVIAAGGIGDHRGLLAALALGASAVQIGTAYLFCPEAKVSPAHRQALDSAPASDTALTNLFTGRPARGINNRLMRELGPMSELAPRFPLAGGALMPLRAITDPQGKSDFSNLWSGQALRLGRHMPAGELTREIAGKALAVIGHQAF

SEQ ID NO: 7599 - protein, 228 aa, Lilium longiflorum
MGRGKIEIKKIENSTNRQVTYSKRRTGIIKKATELTVLCDAEVSLLMFSSTGKLSEFCSPSTDTKKIFDRYQQLSGINLWSAQYEKMQNTLNHLSEINRNLRKEISQRMGEELDGLDIKDLRGLEQNLDEALKLVRHRKYHVINTQTETYKKKVKNSEEAHKNLLRDLVNREMKDENPVYGYVDEDPSNYDGGLGLANGASHLYEFRVQPSQPNLHGMGYGSHDLRLA

SEQ ID NO: 7600 - protein, 286 aa, Brassica napus
MSELQLPPGFRFHPTDEELVMHYLCRKCASQSIAVPIIAEIDLYKYNPWELPGLALYGEKEWYFFSPRDRKYPNGSRPNRSAGSGYWKATGADKPIGLPKPVGIKKALVFYAGKAPKGEKTNWIMHEYRLADVDRSAARKKKNSLRLDDWVLCRIYNKKGAIEKRGPPPTPVVYGDEVVEEKPRLSEMGMPPPPVMPNDFVYFDTSDSVPKLHTTESSCSEQVVSPEFTSEVQSEPKWKDWSGAANDKNSLDFGFNYIDATAFGGVGSNQLFPLQDMFMYNMPKPY

SEQ ID NO: 7601 - protein, 423 aa, Zea mays
MAQAVVPAMQCRVGVKAAAGRVWSAGRTRTGRGGASPGFKVMAVSTGSTGVVPRLEQLLNMDTTPYTDKVIAEYIWVGGSGIDIRSKSRTISKPVEDPSELPKWNYDGSSTGQAPGEDSEVILYPQAIFKDPFRGGNNVLVICDTYTPQGEPLPTNKRHRAAQIFSDPKVGEQVPWFGIEQEYTLLQKDVNWPLGWPVGGFPGPQGPYYCAVGADKSFGRDISDAHYKACLYAGINISGTNGEVMPGQWEYQVGPSVGIEAGDHIWISRYILERITEQAGVVLTLDPKPIQGDWNGAGCHTNYSTKTMREDGGFEEIKRAILNLSLRHDLHISAYGEGNERRLTGKHETASIGTFSWGVANRGCSIRVGRDTEAKGKGYLEDRRPASNMDPYIVTGLLAETTILWQPSLEAEALAAKKLALKV

SEQ ID NO: 7602 - protein, 472 aa, Oryza sativa
  unsure (1)..(472): unsure at all Xaa locations
AAAMAFDAFTDKNAVFRRLKAKPENKMCFDCSAKNPTWASVTYGIFLCLDCSAVHRSLGVHITFVRSTNLDSWTPDQLKMMAFGGNNRAHAFFKQHGWTDGGKVDAKYTSRAAELYRQILQKEVAKSSAXXNVLPSSPVAASQPQNPSDDFPEFKLPEQEPDVTNSQKAPTQTPKAPTHPTFATSVKKSIGAKKIGGKTGGLGVKKLTTKPSESLYDQKPEEPKPAAPVMTTSTTKSGPSLHSRFEYVENEPAVDSRNGGTQMTGHVAPPKSSNFFQEYGMDNGFQKKTSTAATKTQIQETDEARKKFSNAKAISSSQFFGNQSREEKDAQMSLQKFAGSSSISSADLFGRRDNDSNLDLSAADLINRISFQASQDLSSLKNMAGETGKKLTSIASNFISDLDSRDMPPPKRAKRAEPSSDEERYSSDDESYSSDSDDSDDASEEVSAYLYLGSSLSGVPTHRLMRVALRIV

SEQ ID NO: 7603 - protein, 470 aa, Escherichia coli
MPLNKKDTQGKGVKNASTVSEDTASNQEPTLHRGLHNRHIQLIALGGAIGTGLFLGIGPAIQMAGPAVLLGYGVAGIIAFLIMRQLGEMVVEEPVSGSFAHFAYKYWGPFAGFLSGWNYWVMFVLVGMAELTAAGIYMQYWFPDVPTWIWAAAFFIIINAVNLVNVRLYGETEFWFALIKVLAIIGMIGFGLWLLFSGHGGEKASIDNLWRYGGFFATGWNGLILSLAVIMFSFGGLELIGITAAEARDPEKSIPKAVNQVVYRILLFYIGSLVVLLALYPWVEVKSNSSPFVMIFHNLDSNVVASALNFVILVASLSVYNSGVYSNSRMLFGLSVQGNAPKFLTRVSRRGVPINSLMLSGAITSLVVLINYLLPQKAFGLLMALVVATLLLNWIMICLAHLRFRAAMRRQGRETQFKALLYPFGNYLCIAFLGMILLLMCTMDDMRLSAILLPVWIVFLFMAFKTLRRK

SEQ ID NO: 7604 - protein, 299 aa, Bifidobacterium longum NCC2705
MAVFFAGPLIIIVLLIVLLSAALFVVPQQQAYIIERFGKFLKVQFAGIHIRIPFVDRIAMKTNMRVNQLNVQLETKTLDNVFVTVVASTQFRVNPNDVATAYYELRDPAGQLRSYMEDALRSAIPALSLDDAFARKDDVAFDVQKTVGAEMSRFGFTVVKTLITAIDPSPQVKNAMDSINAAQREKEATRQRAEAQRIQIETQAAADAEKTRLQGEGQANYRREIANGIVDQIKSLQAVGMNINDVNNVVLFNQYLDVMRSLSESNNTKTVVLPASTPGGYQDLYEQVTKAMLTASETK

SEQ ID NO: 7605 - protein, 362 aa, Zea mays
  unsure (1)..(362): unsure at all Xaa locations
MASASHAPTPLLKDELDIVIPTIRNLDFLEMWRPFFQPYHLIIVQDGDPSKTIRVPEGFDYELYNRNDINRMLGPKASCISFKDSACRCFGYMVSKKKYIYTIDDDCFVAKDPSGKDINALEQHIKNLLSPSTPFFFNTLYDPYRVGADFVRGYPFSXLREGVPTAVSHGLWLNIPDYDAPTQLVKPLERNTRYVDAILTIPKGTLFPMCGMNLAFDRELIGPAMYFGLMGDGQPIGRYDDMWAGWCTKVITDHLGLGVKTGLPYIWHSKASNPFVNLKKEYNGIFWQEELIPFFQSVSLPKEATTVQKCYLELXKQVRAKLGKVDGYFNKLADSMVTWIEAWDELNPPKGGVPTANGPPKK

SEQ ID NO: 7606 - protein, 444 aa, Betula pendula
MASWVVSECGLKPLPRILNPRLRDGVASSTTFPSKIRPPPICKSHCVGSSLRLSSGLRGNRWWALNVSAPFRVPSVGEEGENRERVNGVEDDGEFDPGSPPPFRLTDIRAAIPKHCWVKDPWKSMSYVVRDVVVVFGLAAIAAYFNNWIVWPLYWIAQGTMFWALFVLGHDCGHGSFSSNLNLNSVVGHLLHSSILVPYHGWRISHRTHHQNHGHVENDESWHPLSEKMYKKLDYVTRSLRFTLPFPMLAYPFYLWVRSPGKKGSHYHPNSDLFVPNERKDVITSTACWTAMAALLVYLSFAMGPVQLLKLYGIPYWIFVVWLDVVTYLHHHGHEDKLPWYRGKEWSYLRGGLTTLDRDYGVINNIHHDIGTHVIHHLFPQIPHYHLVEATEAARPVFGKYYREPKKSGPLPFHLLGTLIRSMKQDRYVSDAGDVVYYQSDKTI

SEQ ID NO: 7607 - protein, 360 aa, Sandersonia aurantiaca
RRLSLLLLLSSSALLLLLAAASEDPVIRQVVSDDQQQLLSAEAHFSSFLSRYGKSYADEAEHAYRFSVFKSNLRRARRHQRLDPTAVHGVTRFADLTPSEFRRTYLGLRRRPRTAGSTHDAPILPTNELPADFDWRDHGAVTPVKNQGSCGSCWSFSAAGALEGANYLSTGNLVSLSEQQLVDCDHECDSSEPDSCDQGCNGGLMTTAFEYILKSGGLEREADYPYTGTDRGTCKFNKAKISAVASNFSVVSIDEDQIAANLVKHGPLAVGINAVFMQTYVGGVSCPYICGKHLDHGVLLVGYGSAGFAPIRFKEKPYWIIKNSWGENWGENGYYKICRGRNVCGVDSMVSSVSAFHTSH

SEQ ID NO: 7608 - protein, 305 aa, Miscanthus condensatus
IESVGEGVTDVAPGDHVLPVFTGECKECAHCRSAESNMCDLLRINTDRGVMIGDGKSRFSINGKPIYHFVGTSTFSEYTVMHVGCVAKINPEAPLDKVCVLSCGISTGLGASINVAKPPKGSTVAIFGLGAVGLAAAEGARIAGASRIIGVDLNPSRFEEARKFGCTEFLNPKDHKKPVQEVLAEMTNGGVDRSVECTGNINAMIQAFECVHDGWGVAVLVGVPHKDAEFKTHPMSFLNERTLKGTFFGNFKPRTDLPNVVELYMKKELEVEKFITHSVPFAEINKAFDLMAKGEGIRCIIRMEN

SEQ ID NO: 7609 - protein, 198 aa, Gossypium barbadense
GQNPLFPRILGHEAEGVVESVGEGVIDVQPGDHVLPIFTGECKECPHCLSEASNMCDLLRINTERGGMLHDGHTRFSKDGKPIYHFLGTSTFSEYTVVHVGQVAKINPEAPLDKVCVLSCGMSTGFGATVNVAKPKKGGSVAIFGLGAVGLAAAEGARVCEASRIIGIDLNPNRFEEAKKFGCTEFVNPKDHNKPVQE

SEQ ID NO: 7610 - protein, 231 aa, Hordeum vulgare subsp. vulgare
TVESVGEGVTDVAPGDHVLAVFTGECKECPHCKSAESNMCDLLRINTDRGVMNRDGKSRFFIGGKPIYHFVGTSTFSEYTVMHVGCVAKINPEAPLDKVCVLSCGISTGLGASINVAKPPKGSTVAIFGLGSVGLATAEGARIAGASRIIGIDLNAFRFEEARKFGCTEFVNPKAHTKPVQQVLADMTNGGVDRSVECTGNVNAMIQAFECVHDGWGVAVLVGVPHKDAEF

SEQ ID NO: 7611 - protein, 311 aa, Caulobacter crescentus CB15
MTNRVLAHTGAKYPIIQAPMGWIARYQLASAVSRAGGLGIIETSSGETENCKAEITKMAQSGLPFGVNLPIMFLRDDAMLRFVCDSGVKFVTTSAGSPAKFIGPLKDAGIVVYHAVPTVDAAVKCVEAGVDGLVVEGAEGGGFKNPEEVSTLVLLQAIREKVDVPLVAAGGICDGRGMAAAFALGAEAVQMGTRFVSSAESPVHDNYKAAITGAKETGTWVLNKKASPCIRAIKSELTKEIHDAGVMPPDVLKNILGVYFGGDMEAAPALAGQTVGLINEVKSAHDIIDETVAQFHQITGRLGALAAARGF

SEQ ID NO: 7612 - protein, 138 aa, Zea mays
FTNIFTLCSCTLNDLINTEKTATICRSTNLDSWTPEQLKMMVYGGNNRAQAFFKQHGWTDGGKIEAKYTSRAADLYRQLLAKDVAKSSTEDGNNSWPSSPVAASQAPNQAAAFPDLKLTEVSKENVSEKKDSEIVRSP

SEQ ID NO: 7613 - protein, 581 aa, Zea mays subsp. mays
MKREYQDAGGSGGDMGSSKDKMMAAAAGAGEQEEEDVDELLAALGYKVRSSDMADVAQKLEQLEMAMGMGGVGGAGATADDGFVSHLATDTVHYNPSDLSSWVESMLSELNAPPAPLPPATPAPRLASTSSTVTSGAAAGAGYFDLPPAVDSSSSTYALKPIPSPVAAPSADPSTDSAREPKRMRTGGGSTSSSSSSSSSMDGGRTRSSVVEAAPPATQASAAANGPAVPVVVVDTQEAGIRLVHALLACAEAVQQENFSAAEALVKQIPMLASSQGGAMRKVAAYFGEALARRVYRFRPPPDRSLLDAAFADLLHAHFYESCPYLKFAHFTANQAILEAFAGCRRVHVVDFGIKQGMQWPALLQALALRPGGPPSFRLTGVGPPQPDETDALQQVGWKLAQFAHTIRVDFQYRGLVAATLADLEPFMLQPEGDDTDDEPEVIAVNSVFELHRLLAQPGALEKVLGTVRAVRPRIVTVVEQEANHNSGTFLDRFTESLHYYSTMFDSLEGAGAGSGQSTDASPAAAGGTDQVMSEVYLGRQICNVVACEGAERTERHETLGQWRSRLGGSGFAPVHLGSNA

SEQ ID NO: 7614 - protein, 333 aa, Streptococcus thermophilus
MAILVLGGAGYIGSHMVDRLVEKGQEKVVVVDSLVTGHRAAVHPDAIFYQGDLSDQDFMRKVFKENPDVDAVIHFAAYSLVGESMEKPLKYFDNNTAGMVKLLEVMNECGVKYIVFSSTAATYGIPEEIPILETTPQNPINPYGESKLMMETIMKWSDQAYGIKYVPLRYFNVAGAKPDGSIGEDHGPETHLLPIILQVAQGVREKIMIFGDDYNTPDGTNVRDYVHPFDLADAHLLAVEYLRKGNESTAFNLGSSTGFSNLQILEAARKVTGKEIPAEKADRRPGDPDILIASSEKARTVLGWKPQFDNIEKIIASAWAWHSSHPKGYDDRG

SEQ ID NO: 7615 - protein, 778 aa, Thermotoga neapolitana
MELYRDPSQPVEVRVKDLLSRMTLEEKIAQLGSVWGYELIDERGKFKREKAKDLLKNGIGQITRPGGSTNLEPQEAAELVNEIQRFLVEETRLGIPAMIHEECLTGYMGLGGTNFPQAIAMASTWDPDLIEKMTAAIREDMRKLGAHQGLAPVLDVARDPRWGRTEETFGESPYLVARMGVSYVKGLQGENIKEGVVATVKHFAGYSASEGGKNWAPTNIPEREFREVFLFPFEAAVKEARVLSVMNSYSEIDGVPCAANRRLLTDILRKDWGFEGIVVSDYFAVNMLGEYHRIAKDKSESARLALEAGIDVELPKTDCYQHLKDLVEKGIVPESLIDEAVSRVLKLKFMLGLFENPYVDVEKAKIESHRDLALEIARKSIILLKNDGTLPLQKNKKVALIGPNAGEVRNLLGDYMYLAHIRALLDNIDDVFGNPQIPRENYERLKKSIEEHMKSIPSVLDAFKEEGIDFEYAKGCEVTGEDRSGFKEAIEVAKRSDVAIVVVGDRSGLTLDCTTGESRDMANLKLPGVQEELVLEIAKTGKPVVLVLITGRPYSLKNLVDRVNAILQVWLPGEAGGRAIVDVIYGKVNPSGKLPISFPRSAGQIPVFHYVKPSGGRSHWHGDYVDESTKPLFPFGHGLSYTRFEYSNLRIEPKEVPSAGEVVIKVDVENVGDMDGDEVVQLYIGREFASVTRPVKELKGFKRVSLKAKEKKTVVFRLHTDVLAYYDRDMKLVVEPGEFRVMVGSSSEDIRLTGSFSVTGSKREVVGKRKFFTEVYEE

SEQ ID NO: 7616 - protein, 203 aa, Gossypium anomalum
  unsure (1)..(203): unsure at all Xaa locations
GYTPLFPRILGHEASGIVESVGEGVNDLKPGDHVLPIFTGECKECRHCLSEESNNMCELLRINCDRXVMLADGKTRFSINGKPIYHFVGTSTFSQYTVVHVGQVAKISPTAPLDKVCPISCGICTGFGATVNVAKPKKGQTVAVFGLGAVGLAAAEGARVCGASRIIAVDVNPRRFEEAKRFGITEFVNPKDYDKPVQEVIVE

SEQ ID NO: 7617 - protein, 173 aa, Triticum aestivum
  unsure (1)..(173): unsure at all Xaa locations
NNATSSGGSGSHRKMSHNAYERDRRKQLNEQYSSLRSLLPDDDHNKKMSIPTTVSRVIKYIPELQKEVDGLEKKKEELRXPATSKRHEAEHGPIVSATCLDDXEXMXKSASDTMAGXCHFKCIKVLESSSAXNPRFRFQNRFTSIFEPTNMTRRQTFLQRRTNKRGNRTYGCT

SEQ ID NO: 7618 - protein, 330 aa, Glycine max
MEAVESIAVPEPDEDDPSSTLLDLSSYQLHDLDSVELPPSLTELDLTANRLSTLDPRIGNLSHLKKLSLRQNLITDAAVLPLSSWNAISSLEELVLRDNQLKNIPDVTVFKKLLVFDVAFNEISSLHGLSRVSDTLKELYVSNNEVAKIEEIEHFHQLQILELGSNKLRVMENLQSLENLQELWLGQNRIKVVNLCGLKCIKKISFQSNRLTSMTGFEGCVALEELYLSHNGIAKMEGLSSLVNLRVLDVSSNKITSVDDIVNLTKLEDLWLNDNQIASLEGIAEAVSGSKEKLTTIYLKNNPCAKTPNYTGILREIFPNIQQIDSDIFS

SEQ ID NO: 7619 - protein, 589 aa, Candida albicans
MTRTTRIDTQEATKHKDLPPVPSPLSLSSNPNPECLMESKSLGRKNFKKLSLDASPVKSTSGSLRSSDMMSIKEPTSLRQKRQRPPPILHLPTASSSATSTPTSNITGSSSASSIQFAQKSPGSGVIVSQTLSRPSSAGGIPSSGYSSLNVNQSNRNVDPDNVVSTDMILNQISNLDLTSMNHHRQHYQNSHHHLPTTNRKRQTVISSISPTKSSAASSPLEPQIQSLPASSQSPIATTSALKLNNKDLLTLKQLGSGNSGSVSKILHIPTQKTMAKKIIHIDSKSVIQTQIIRELRILHECHSPYIIEFYGACLNNNNTIVICMEYCNCGSLDKILPLCENKQFPTFVLKKLSFAILSGLTYLYTTHKIIHRDIKPNNVLMTHKGEFKLCDFGVSRELTNSLAMADTFVGTSMYMSPERIQGLDYGVKSDVWSTGLMLIELASGVPVWSEDDNNNDDDEDDEDDAYVRQGSIAAERNGQNSPSRSRKNKQKGNGYNSYNGPEGILDLLQRIVNEDAPTLTNKINPVTKLPYDKYLCQFIDLCLIKDDSVRKTPWQLLEDKEHFFKGVEEGVYDKEHKSWAKKIRKCKV

SEQ ID NO: 7620 - protein, 495 aa, Phaeodactylum tricornutum
MVRFSTAALLSLSTLTTSCIGAFQLSSPAQLPTSRLRRHTNTAPLSAVAVDSGSSDPALVGNLPLPNNNDNEDKNRRMPMMDLKGIALSGLKGQALSVRAEDFPQAKDLRAVIPKDCFEPDTAKSLGYLSVSTMGTILCSVVGANLLSVLDPSNPLTWPLWAAYGAVTGTVAMGLWVLAHECGHGAFSKNRSLQDAVGYIIHSIMLVPYFSWQRSHAVHHQYTNHMELGETHVPDRADKEGEKSLALRQFMLDSFGKDKGMKAYGGLQSFLHLIVGWPAYLLIGATGGPDRGMTNHFYPNPLSTPTQPKKELFPGNWKEKVYQSDIGIAAVVGALIAWTATSGLAPVMALYGGPLIVINAWLVLYTWLQHTDTDVPHFSSDNHNFVKGALHTIDRPYDKLDPWGIIDFLHHKIGTTHVAHHFDSTIPHYKAQIATDAIKAKFPEVYLYDPTPIPQAMWRVAKGCTAVEQRGDAWVWKNEGIEDLVEHRQSKLSSE

SEQ ID NO: 7621 - protein, 129 aa, Griffithsia japonica
ARGKILQALPPLVRAVQREGRHVVWMSDSMHGNTFKADSGFKTRAWSRIMTEVRGFFAVHEAEGTHAGGLHFEMTGKEVTECVGGMRRIRSQDLAKRYESLCDPRLNHSQALEMAFEAADILRARRMQA

SEQ ID NO: 7622 - protein, 184 aa, Oryza sativa
  unsure (1)..(184): unsure at all Xaa locations
MAPANKAERKAVLDAGAWMFNVVTSVGIIMVNKALMATHGFSFATTLTGLHFATTTLMTLVMKWLGHIQPSYLPLPELVKFVFFANLSIVGMNVSLMWNSVGFYQIAKLCIIPVLCILEILFDKVRYSRNTKLSIVLVLVGVAVCTVTDVSVNSKGLLAAVIAVWSTALQQHXXVFDCAHFDVF

SEQ ID NO: 7623 - protein, 259 aa, Neurospora crassa
MLEARLEQASILKKVVDAIKDLVQDCNFDCNDSGIALQAMDNSHVALVSMMLKTETFSPFRCDRNIALGVNLTSLTKVLRAAQNEDILTLKAEDAPDVLNLVFESSENDRISEYDLKLMDIDQEHLGIPDTEYAATISMPSSEFKRITTDLMAMSESVNIEASKDGVKFSCQGDIGNGSITLRQHTNVDKPSENIEIELSEPVSLTFSLKYLVNFCKASALSSTVKICLSNEVPLLVEYNISASSYLRFYLAPKIGDEE

SEQ ID NO: 7624 - protein, 357 aa, Oryza sativa (japonica cultivar-group)
MPRQSLSLPPLSLSLFSSHPTPRGGQRRDGSRQHGGGEAHALGDAATAKEEEVRRKPGGGGGGHVVHAELGALVIGVVGVVELAMGCAGGGGGGEAMYSSRRSDGFGGLVVAERRHRWASTAAERRRQRVRAVAERRQLRAAAISWSRGTGGSAGERRLRAAAISERRAPPLPAAGPPPTPAAGAHRRGARPRLHLRAHLMSRVVERDTSSAWFLGSLFRVDEARRYIVDKVLPHPWYRAICVAGADRPVGSISVNPADDLREPDESETGGLRSRCCRASVGYRVAHVHWGRGVVTRAVRATAEVVSAEWPWLERLAAVADVENPAGRRAAAKRYFVSHYRLNGWKSRTLEDWSNGR

SEQ ID NO: 7625 - protein, 80 aa, Zea mays; identical to SEQ ID NO: 5636
  unsure (1)..(80): unsure at all Xaa locations

SEQ ID NO: 7626 - protein, 165 aa, Oryza sativa (japonica cultivar-group)
MSSEQQASAGQPVLCASGCGFYGNPATLDMCSVCYRQHCLLNGATMATGPSSSVAAASAATVATGAVTSDSCSVPSAEVNGAAFSSKNNPEPATVVEKKAPANRCASCKKKVGLLGFACRCGATYCGTHRYPEKHACGFDFKGASRDAIARANPLIKGEKLTNKI

SEQ ID NO: 7627 - protein, 155 aa, Picea glauca
MASADVEFRCFVGGLAWSTDDRSLQEAFSPYGEVVESKIISDRETGRSRGFGFVTFNDEQSMRDAIDAMNGKMLDGRSITVNPAQSRGNGGGGGGGGSRGYRGGGGGGGYGGSRDRGDRGYGGGGGGYGGGGGGYGGGGGSRYGGGGSEGGSWRR

SEQ ID NO: 7628 - protein, 402 aa, Triticum aestivum
  unsure (1)..(402): unsure at all Xaa locations
MTQLQATPLRTLALSRRRGAGAAARPMAGSVRCSAAARSYSITLLPGDGIGPEVVAVAKDVLSVAGSKEGVELRFQEMLMGGAALDAAGVPLPDETLAAARAADPSIPASLGGYKGYNNDNNQKLWRHVTGRSINGHGKHWNXRPLPVLGNRDRVFLNRFTALLLTLLARTRQTRXATILSAAMLLKYGLGVESAAKRIEAAVTETLDNGFRTGDIXFSWDDIGWGKLCSVDKANVLEASMLWRKRVTAIASEFPDVELSHMYVDNAAMQLVRNPKQFDTIVTNNIFGDILSDEASMITGSIGMLPSASVGESGPGLFEPIHGSAPDIAGQDKANPLATILSAAMLLKYGLGVESAAKRIEAAVTETLDNGFRTGDIYSAGTTLVGCKRMGEEVLKALESQK

SEQ ID NO: 7629 - protein, 374 aa, Psammomoya choretroides
ALSIAGAVQSQKLAVRAISQLQSLPGGDIKLLCDTVVESVADLTGYDRVMVYRFHEDEHGEVVAESKRPDLEPYIGLHYPATDIPQASRFLFKQNRVRMIVDCHASPVHVIQDDGLMQPLCLVGSTLRAPHGCHAQYMENMGSIASLAMAVIINGNDEEVIGGRNPTRLWGLVVCHHTSARCVPFPLRYACEFLMQAFGLQLNMELQLAAQLLEKHVLKTQTLLCDMLLRDSPTGIVTQSPSIMDLVKCDGAALYYRGNYYPLGVTPTEAQIKDIVEWLLAFHGDSTGLSTDSLADAGYPGAALLGDAVCGMAVAYITNRDFLFWFRSHTAKETKWGGAKHHPEDKDDGQRMHPRSSFKAFLEVVKSRSLPWEN

SEQ ID NO: 7630 - protein, 182 aa, Campylobacter jejuni subsp. jejuni NCTC 11168
MLIKFKNHSPKLGQNVFVAEGAKIIGEIEIGDESSIWFNCVLRADVNFIKIGKRTNIQDLSTVHVWHREFDEKGKLKDAGFPTIIGDDVTIGHNCVIHACVIKNRVLIGMNAVIMDNALIEEDSIVGAGSVVTKGKKFPPRSLILGNPAKFVRELNDEEVSFLKQSALNYVDFKNEFLKDLQ

SEQ ID NO: 7631 - protein, 513 aa, Hordeum vulgare
MDGNNRGGGHSEVLKNYNLGKTLGLGTFGDVKVAEHKLTGQRVAIKILNRRKMETMEMEEKANREIKIMRLFIDFIHPHIIRVYQVIETPKDIFIVMEYCNNGELLDYIIENGRLQEDEARRIFQQILAGVEYCHRIMVVHRDLKPENLLLDSKYNVKLADFGLSNVMRDGHFLKTSCGSLNYAAPEIISSKLYAGPEVDVWSCGVILYALLCGSVPFDDDNIPSLFRKIKGGTYILPSYLSDSARDLIPKLLNIDPMKRITIHEIRVHPWFKNHLPCYLAVPPPYKAPKAKMIDEDILRDVVNLGYDKDHVCESLWNRLQNEETVAYYLLLDNRFRSTSGYLGADHQHLMDRSFNEFTLSESASPSTRNYLPGINDSQGGGLRPYYPVQRKWAIGLQSGAHPRDIMIEVLKALKELNVCWKKNGLYNMKCRWCPGFPQVSAMLLDSNHNFVDDSTIMDNGNADGRLPAVVKFEIQLYKTKDNKYLLDIQRVTGPQLLFLEFCGAFFTNLRVL

SEQ ID NO: 7632 - protein, 172 aa, Oryza sativa (japonica cultivar-group)
MAAAAAEATTDGGGKMIILISADGKRFEVTEAVASQSQLISNMIEDDCTENGVRLPNVDGDILTMVVDYCNMHAGDAAAAGDTMKASSTEEELKKFDAELVQALENPVLFKLILAANFLNIKSLLDMTCQRVADMMSGKTPEQMRETFSIENDFTPEEEAAIRQENAWAFDD

SEQ ID NO: 7633 - protein, 423 aa, Smilax rotundifolia
SGKPFYAIVHRVTGCLIIDFEPVTPTEVPMPAAGALQSYKLAAKAIAKLQSLPGGSMEGLCSTVVQEVFELTGYDRVMAYKFHEDDHGEVFAEITKPGLEPYRGLHYPATDIPQAARFLFMKNKVRMISDCRAKPVKVYQDEKLPFDITFCGSTLRAPHSCHLQYMENMNSIASLVMVVVINEGEEDEEQGQQQHNRKRLWGLVVCHHESPRFVPFPLRYACEFLMQVFAIHVNKEFELENQIREKNILRTQTLLCDMLLRDSDPLGIVTQSPNIMDLVKCDGAALLYENEIWQIGLTPTESQIREIAFWFAEFHADSTGLSTDSLYDAGYPGAVALGDTVSGMAAARITSTDILFWFRAHTAAEIRWGGAKHDPSDKDDGKRMHPRSSFNAFLEVVKGRSLPWNNYEIDAIHSLQLILRGTL

SEQ ID NO: 7634 - protein, 503 aa, Streptomyces coelicolor A3(2)
MSNTLFRTKKIEQSIRDTEEPEHALKKSLSALDLTVFGIGVVIGTGIFVLTGTVAKDNAGPATALAFVVAGVVCALAALCYAEFASSVPVAGSAYTFSYASLGELPAWIIGWDLVLEFALGTAVVAVGWSGYIRSLMDNAGWHMPAELGGRDGAEGFGFDILAAALVLVLTAVLVLGMKLSARITSLVVAIKVAVVLIVIIAGAFFVKSANYDPFIPKSQPVEAGGGLHSPLIQLMFGWAPSNFGVMGIFTAASVVFFAFIGFDIVATAAEETRNPQRDMPRGILGSLIICTLLYVGVSIVVTGMQHYTKLSVDAPLADAFKATGHPFFSGVISFGAAVGLTTVCMILLLGQSRVFFAMSRDGLLPRFFSHVHPKFRTPYRPTILLGVIIAIVAGFTSLSELAELVNIGTLFAFVVVAISVIILRRTRPDLPRAFRTPLVPLLPIVSVAASLWLMLNLPAETWVRFAIWMAIGFVVYFLYGRTHSRLARGEEAPADPAEPSGT

SEQ ID NO: 7635 - protein, 158 aa, Staphylococcus epidermidis ATCC 12228
MESIYDFVVQKNNGESYKLEQYKGDVMLIVNTASECGFTPQFEGLQKLYDEYKDQRFIILGFPCNQFGGQEPGSGEEAAQNCKINYGVTFPIHEKVDVKGDNQHPLFHFLTNAAKGMINEKIKWNFTKFLIDREGNVIKRFSPQKKPEQIKTEIEKLL

SEQ ID NO: 7636 - protein, 246 aa, Pinus armandii
YTYSLRKKGPEDVIVKVIYCGICHSDLVQMRNEMGMSNYPMVPGHEVVGMVTELGSEVKKFKVGDHVGVGCIVGSCRSCGNCNQSMEQYCSKRIWTYNDVNHDGTPTQGGFASSMVVDQMFVVRIPENLPLEQAAPLLCAGVTVFSPMKHFGMTEPGKRCGILGLGGVGHMGVKIAKAFGLHVTVISSSDKKKEEAMEVLGADAYLVSKDAEKMMEAAESLDYIMDTIPVAHPLEPYLALLKTNGK

SEQ ID NO: 7637 - protein, 324 aa, Saccharomyces cerevisiae
MSSDNSKQDKQIEKTAAQKISKFGSFVAGGLAACIAVTVTNPIELIKIRMQLQGEMSASAAKVYKNPIQGMAVIFKNEGIKGLQKGLNAAYIYQIGLNGSRLGFYEPIRSSLNQLFFPDQEPHKVQSVGVNVFSGAASGIIGAVIGSPLFLVKTRLQSYSEFIKIGEQTHYTGVWNGLVTIFKTEGVKGLFRGIDAAILRTGAGSSVQLPIYNTAKNILVKNDLMKDGPALHLTASTISGLGVAVVMNPWDVILTRIYNQKGDLYKGPIDCLVKTVRIEGVTALYKGFAAQVFRIAPHTIMCLTFMEQTMKLVYSIESRVLGHN

SEQ ID NO: 7638 - protein, 751 aa, Geobacillus stearothermophilus
MENQNRQNAAQCPFHGSVTNQSSNRTTNKDWWPNQLNLSILHQHDRKTNPHDEEFNYAEEFQKLDYWALKEDLRKLMTESQDWWPADYGHYGPLFIRMAWHSAGTYRTGDGRGGASTGTQRFAPLNSWPNNANLDKARRLLWPIKKKYGNKISWADLFILAGNVAIESMGGKTIGFGGGRVDVWHPEEDVYWGSEKEWLASERYSGDRELENPLAAVQMGLTYVNPEGPDGKPDPKAAARDIRETFRRMGMNDEETVALIAGGHTFGKAHGAGPATHVGPEPEAAPIEAQGLGWISSYGKGKGSDTITSGIEGAWTPTPTQWDTSYFDMLFGYDWWLTKSPAGAWQWMAVDPDEKDLAPDAEDPSKKVPTMMMTTDLALRFDPEYEKIARRFHQNPEEFAEAFARAWFKLTHRDMGPKTRYLGPEVPKEDFIWQDPIPEVDYELTEAEIEEIKAKILNSGLTVSELVKTAWASASTFRNSDKRGGANGARIRLAPQKDWEVNEPERLAKVLSVYEDIQRELPKKVSIADLIVLGGSAAVEKAARDAGFDVKVPFFPGRGDATQEQTDVESFAVLEPFADGFRNYQKQEYSVPPEELLVDKAQLLGLTAPEMTVLVGGLRVLGANYRDLPHGVFTDRIGVLTNDFFVNLLDMNYEWVPTDSGIYEIRDRKTGEVRWTATRVDLIFGSNSILRSYAEFYAQDDNQEKFVRDFINAWVKVMNADRFDLVKKARESVTALQYRSLDRSGDVENLQ

SEQ ID NO: 7639 - protein, 353 aa, Sinorhizobium meliloti
MVEYRYLGRSALKVSPLTLGSMMFGNQTPDDVAFRIIDKAREQGINFIDTADVYHDGKSEEVVGRGIKAHRDHWVVATKFVNSRQKGPNVGGYSRKWVYQTVENSLRNLGTDYIDILYFHRAVFDAPLEEPVRAIADLIKAGKLRYFGVSNFRGWRIAEVAHLAYQLGIDRPIASQPLYNIVNRTAEAEQLPAAAAYGLGAVSYSPLARGVLTGKYNPGEAPAADTRAGRGDKRMHDVEFREESISIAKQIAVHAQAKGIAAADFALAWVLNNRLITSTIAGPRTEEHWDGYIRALDVKLDAEDEALVDRLVAPGHPSTPGFTDPGHPLEGREPRSGATEAEIIPLARSQRVA

SEQ ID NO: 7640 - protein, 656 aa, Treponema pallidum
MSVCCTSSEERIERSKNLVHLVAQVAGAYAQLPAQYAKSSSGVFEITSFSSFYEHVCLFAAGLASIGCGRGDCIGLISDNRVEWLHASFGIQALGAADVPRGSDATERDLVQILGAVEARTVIVENDAQLKKLARCFDALPSVSQIVLLDAGGAYQAMKDEFVQNEDGSARKCSFFTYQDILAHGTQFRVHHPGRIEDEIGRTTRADVATIIFTSGTTGTPKGVVLSHENFLCQLIDISRRLTVCPGDIALSVLPVWHVFERISEYVVLSHAGGVAYSKPVGSVMLADLAKLNPHFLPSVPRIWEAIHDGIFKNVRKKGGVAAALFHFFLAAGKAYAYFYRSVFGLRTHTTRRAQFCAPLFACVPWLLLVPLHFLGNVLVFRKVRKKFGTSFKTAISGGGALPPNVDEFLYAIGVRVLEGYGLTETAPVIAMRSERRPVFGSVGTPCAYNEVKIVDDTGAQLPVGYKGIVLVRGKNIMQGYYKNPELTAQVLDADGWFNTGDIGYRCVGGQIVLRGRKKDTVVLRGGENVEPVPLEMSMQESRFIARAVVVGQDERYLAALIVPDEAELRLWAEAQELRTECMEELLVNPAVVKFFEQEIAKRISLENGFKIFERINRFVLLPKVFEVGVELSAKQEVMRHRVADLYAKEIAQLFS

SEQ ID NO: 7641 - protein, 253 aa, Methanopyrus kandleri AV19
MVEFRAYQEEARYFKYAFNAAGKVVEEAPLIVTENGIVSRAMDASHIAMAVLEMPWEMFDEYEPPSDELMYGLDMEEVTRIVRRARVTDEITLEGEDEEEVIIKLGSSGYEREFRLRSIDIDDIPDEPELDFAVEVTVVPDFIQDAVRDADLVSDTVKVGAKGNTFYFKAEGERGRVIPKVQEGAEALLTFEVEEDVETAYPLDYLKDMIQAAQGAESVRIRLGQDMPLELTFRIGPAGEGKLTFYLAPRVEE

SEQ ID NO: 7642 - protein, 118 aa, Zea mays
MAGIGPITQDWEPVVIRKRAPNAAAKRDEKTVNAARRSGADIETVRKFNAGSNKAASSGTSLNTKKLDDDTENLSHDRVPTELKKAIMQARGEKKLTQSQLAHLINEKPQVIQEYESG

SEQ ID NO: 7643 - protein, 224 aa, Triticum aestivum
MKKIFGAKKSQDPPPSIQDATDRIYKRGDTVDDKIKKLDAELARYKEQIKKTRPGPAQEAVKARAMRILKQRKMYEGQRDMLYNQTYNLDQVAFASEGIKDAQQTMTAMKAANKELKGMMKTVRIEDIDSMQDEMMDLMDVSNEIQETLGRSYNVPDDIDEEELMGELDALEADMDFESNSVPSYLQPDKETDLDSELNLPAAPSGHAAVPANRQQEDELGLAT

SEQ ID NO: 7644 - protein, 165 aa, Zea mays
  unsure (1)..(165): unsure at all Xaa locations
KRSEAMSMSKTGQAAEKDEQQQSRGIALMQGICAVVYRKADNTPCPIKQGLYLGSVGAAFNKDALKSLNITHILIVAKSLDPVFPAEFNYKKIEDEAISSGGNVLVHCFAGRSRXKHQMSLESALSLVRSKRPQVAPNGGFISQLEKFQKSLQVEQERRMQPVQH

SEQ ID NO: 7645 - protein, 434 aa, Chloroflexus aurantiacus
MLPSMTGVRTLSSIIHACPYRFITIFECVARFTVQAVIAVLPGDGIGPEVVAEGVKVLQAIARRFGHQFTFHEALIGGCAIDATGEPLPAATITLCQSADAVLLGAVGGPKWDDPQARVRPEQGLLGIRKALGLFANLRPVRIYPQLINASPIRPERLQGVDLIVVRELTGGIYFGEKRRERTADGEWASDLCIYTEEEIVRVVRVAARLARQRRGKVTLVDKANVLETSRLWRSITTRLMQTEFPDLQFETMLVDACAMHLIRRPADFDVIVTENMFGDILTDEASMLAGSMGMLPSASLADGRLGLYEPIHGSAPDIAGQGKANPLATILSVAMLLRYSLDLTAKRLCRSGSGSGSTANVTAFAFRTAGSAEPRIRILDALMADATRPSHHLTEGPRNCCGPPENWQSATFSKNSAPQFGKRPICDHKNGGD

SEQ ID NO: 7646 - protein, 152 aa, Raphanus sativus
MGKGVAVLNSSEGVKGTIFFTQEGNGSTTVTGTVSGLKPGLHGFHVHALGDTTNGCMSTGPHFNPDGKTHGAPEDANRHAGDLGNITVGDDGTASFTITDSQIPLDGPNSIVGRAVVVHADPDDLGKGGHELSLATGNAGGRVACGIIGLQG

SEQ ID NO: 7647 - protein, 551 aa, Zea mays
MAAETGAALREAASALASSMQPQVAAVFFVSAACTVALAALLAVLRMRPPWWCACPVCEAYLTASWAGDFDNLCDWYAHLLRTSPAQTVHVHVLRNVLTANPATVDHMLRARFDNYPKGAPFSAILADFLGRGIFNVDGDAWLFQRKLAAAELASPALRAFAVRVVASELRGRLIPLLRSAACASGREGGGGGGGGRVLDLQDVFRRFAFDCICKISFGLDPGCLQLSMPVSSFEDAFDTASTLSARRATAPMHVVWKLKRLLNLGDERRLRDAVHLVDALAAEVIRQRRKLGGAASSGSDLLSRFMGSIDDDKYLRDIVVSFMLAGRDTVASALTAFFLLLSDHPEVAAAIRDEAARVAGDDDDGDGDDGRLTDSAFGKLKGMHYVHAALYESMRLFPPVQFDSKFAAGDDTLPDGTAVAKGTRVTYHAYAMGRMESVWGPDCGEFRPERWLRDGRFVPESPYRYPVFQAGARVCVGKELALMEMKAVIVAVVRGFDIEAVGRSSRRPRFAPGLTATFAGGLPVRGGDGRKEPLVPAPPAPHRKRSVEHQ

SEQ ID NO: 7648 - protein, 388 aa, Salmonella enterica subsp. salamae
QNGKLNVPENPIIPFIEGDGIGVDVTPAMLKVVDAAVEKAYKGERKISWMEIYTGEKSTQVYGQDVWLPAETLDLIRDYRVAIKGPLTTPVGGGIRSLNVALRQELDLYVCLRPVRYYQGTPSPVKHPELTDMVIFRENSEDIYAGIEWKADSADAEKVIKFLREEMGVKKIRFPEHCGIGIKPCSEEGTKRLVRAAIEYAITNARDSVTLVHKGNIMKFTEGAFKDWGYQLARDEFGGELIDGGPWLKIKNPNTGKEIVVKDVIADAFLQQILLRPAEYDVIACMNLNGDYISDALAAQVGGIGIAPGANIGDECALFEATHGTAPKYAGQDKVNPGSIILSAEMMLRHMQWFEAADLIVKGMEGAIAAKTVTYDFERLMEGAKLLK

SEQ ID NO: 7649 - protein, 487 aa, Eschscholzia californica
GTSTVALIAVIISSILYLLFGGSGHKNLPPGPKPWPIVGNLLQLGEKPHAQFAELAQTYGDIFTLKMGTETVVVASTSSAASEILKTHDRILSARYVFQSFRVKGHVENSIVWSDCTETWKNLRKVCRTELFTQKMIESQAHVREKKCEEMVEYLMKKQGEEVKIVEVIFGTLVNIFGNLIFSQNIFELGDPNSGSSEFKEYLWRMLELGNSTNPADYFPMLGKFDLFGQRKEVAECLKGIYAIWGAMLQERKLAKKVDGYKSKNDFVDVCLDSGLNDYQINALLMELFGAGTETSASTIEWAMTELTKNPKITAKIRSEIQTVVGERSVKESDFPNLPYLEATVKETLRLHPPTPLLLPRRALETCTILNYTIPKDCQIMVNAWGIGRDPKTWTDPLTFSPERFLNSSVDFRGNDFSLIPFGAGRRICPGLPIANQFIALLVATFVQNLDWCLPNGMSVDHLIVEEKFGLTLQKEPPLFIVPKSRV

SEQ ID NO: 7650 - protein, 473 aa, Stevia rebaudiana
MSLSYLSPTQTNLITFSDTCKSQTHLLKLQGGFCFKRKDVKLAGKGIRCSAQPPPPPAWPGTALVDPGTKNWDGPKPISIVGSTGSIGTQTLDIVAENPDKFRVVALAAGSNVTLLAEQIKAFKPQLVSIQNESLVGELKEALADADYMPEIIPGDQGIIEVARHPDCVTVVTGIVGCAGLKPTVAAIEAGKNIALANKETLIAGGPFVLPLARKHNVKILPADSEHSAIFQCIQGFPEGALRRIILTASGGAFRDLPVEKLKDVKVADALKHPNWSMGKKITVDSATLFNKGLEVIEAHYLYGSDYDNIEIVIHPQSIIHSMVETQDSSVLAQLGWPDMRLPILYTLSWPDRISCSEITWPRLDLCKLGSLTFKAPDNVKYPSMDLAYAAGRAGGTMTGVLSAANEKAVEMFIDEKIQYLDIFKVVELTCAKHQSELVTAPSLEEIVHYDLWARDYAASLKSSPGLTAVALV

SEQ ID NO: 7651 - protein, 228 aa, Glycine max
MGGLTAEDLSTIGGIATVSLLHSFIPTHWLPFSIVGRAQKWTLSTTLIVTALGAILHVISTSLLGITAITMANTIAGEETVHKVASLLLVFLGGSYIILFLMGKGGHSHSHNQPMEKMAVAGLILVPALSPCATTLPVFLAVGNSSSMMVLAIIVLLFSTITVMTSLVALSFYGASQLKFHWVERYDKLLVGSVLCLVGVLTLLFHDHDHEVVSIGHHSHSHRKIISL

SEQ ID NO: 7652 - protein, 313 aa, Glycine max
  unsure (1)..(313): unsure at all Xaa locations
MYSLAQHKYTPNFHHQVCKNHPPRHPSRVHCSTTTTTTTTSRSKSNAKSLVIETRLVPVPPMPTVVTTEIHRPMNNDPSLQSTWSHRAWVAPPCSTLVISLGESIKGAIEPWMWPVPTTVVTADNPRPMNNDPSLQSTWSHRAWVAAGCTTLLISLGESIKGAMDLNMWPEPIXNFHAFARAVILAVLPIVLLCHDPIVEGFVVLXSSCIMFRQQFHAWSQGTKSRLPPLVVAFQEAGVLVSRXQHAAHHRTPYNNNYCIVSGVWNEFLDKHKVFEALEMVLYFKTGVRPRSWSETASEWIEEIETPSQIQAQ

SEQ ID NO: 7653 - protein, 1089 aa, Streptomyces coelicolor A3(2)
MTRAEQPTAPHPAPDDALVADSRERAVRALLRRPQLRRLWSAQLVGGVGDILALLVLVLLTVQAAIGAGSFGGGYRGVAFAVATVFGVRILATLLFGAVLLGPLTSLTSQDGPLDRRWTMVGADGLRAALLIVAPLWIDWTPDDALAYLLVTAFVTGVAERFWTVCRESAAPALLPAPPLEGATVRPLPDHMDALRRLSLRTSFVAIPLAAAVLVVAGLLNNLLGAGVDWFAEHQAALGSYVAAGLFAASLSVVSILELPAMRTPRPWSPLEGLRRPRSGGGVDKGRTGALPLLVCACAAVAAVVAATVAVAVLHAKDLGGGPVLYGLTAGALTGGGVVGIRTAPALLPSLSRRRLLALAIAFVGVTLLAAGLVPDDTTVLLLLALSGVGAGVAANTGHALLDQETEDHRRARTTEHLHAVVRVCVALGAVVGPVLAAAIGPHRLENGRFVFAHGGAAFVLMLLGALLLPLAALVLAKVDDRSGVPLRHDLRDALLGGDDPVPTSAATGFFIALEGGDGAGKSTQAEALAEWIRGKGHEVVLTREPGATPVGKRLRSILLDVSSAGLSHRAEALLYAADRAEHVDTVVRPALERGAVVVSDRYIDSSVAYQGAGRDLSPTEIARINRWATNGLVPHLTVLLDVAPEAARERFTEAPDRLESEPAEFHARVRSGFLTLAAADPGRYLVVDAGQEPEAVTTVVRHRLDQVLPLSEAEIKAREEARRKAEEEARRKAEEEAARKAEEERLERERLEEEARVRAEEEERKRRELEEAQRREAERQAEEARQRAEEARRKAEEERARLLAEEKARAEEEARLRAEQERRRKQAEEEERLRAEADARRLEKQRKAEEALLRAEEARRAAEQAAAAAAAAAGPKSAAPAAADAPRPKPAASAPTDAATVPTPIVTPTNASGGPVEDTAVLRPVRDTPDDDRTDDAEGGTDARGARGDGGRASGESESEVTTELPKPPVPSGAADETAVLPAVQPRDADETAVLPPVRGDDPADRVPPGYFREESPAEEAQDRTRELPQIDPDQAPPSRRRRSDWAEETPLDDLPTLADELLGPHDEDEGGRDDEGRGGRGRGRGRR

SEQ ID NO: 7654 - protein, 157 aa, Zea mays
  unsure (1)..(157): unsure at all Xaa locations
YEEQRNMLYNQTYNLDQVGFAADGXKDAQQTMNAMKXAXQGAQGNDEKLSKIDEIDNMQDEMTXXXDVSNEIQETLGRSYNIPDDVDEEELMGELDALESDMEFDSAAVPSYLQPDXDFDADLNLPAAPSRPAMVPAGGLQEDELGLPAVPRASLRS

SEQ ID NO: 7655 - protein, 319 aa, Bacillus anthracis str. Ames
MWQLINTVVPFIILWYLAYKSLSVSYLLAVVPSLLAAGFMTRIFIIFHDCTHYSFFKSRRANRIVGTCMGVLTLFPFDQWGHDHAIHHATSGNLDKRGTGDIWTLTVDEYVAAPLRLRLAYRLYRNPFVMFGLGPIYVFLLKNRFNRKGARQKERMNTYLTNIIIVAVVAILCWAIGWQSFLLVHGTIFLIAGSVGIWLFYVQHTFEDSYFEEDKDWEYVKAAVEGSSFYKLPKILQFLTGNIGFHHVHHLSPRVPNYKLEEAHNNTLPLKNVPTITLATSLRSLRFRLWDEKSNNFVSFKEVKNIIKNNVSVRVKSEL

SEQ ID NO: 7656 - protein, 267 aa, Euphorbia esula
MILNGCTRPPGGGCAFPSNSTCNPRSGSLVSAVTTKPAFSNIRCSSIPIEALTSRFWPSRGLSSGSTRFLTGEEGRIWHTLPSFPTHKNSKLSPRAAKDVPSSFRFPPMTRKPRWWWRMLACLPYLMPLHETWMYAETAYHLHPFLEDFEFLTYPFLGAIGRLPSWFLMAYFLVAYIGVVRRKEWPHFFRFHMVMGMLLEIALQVIGTVSRWLPLALYWGKFGMQVWTAIAFAYLFTVLECIRCALAGMYADVPFACDAAYIQIPYD

SEQ ID NO: 7657 - protein, 330 aa, Streptomyces coelicolor A3(2)
MKYTQLGRTGLKVSRLVLGTMNFGPQTDESTSHDIMDAALDAGLNFVDTANVYGWGENKGRTEEIIGTWFAQGGGRRDRTVLATKVYGNMAGDGDVWPNHDKLSAVNIRRAVDASLKRLQTDYIDVYQFHHIDRSTPFEEIWQAIDVLVQQGKILYAGSSNFPGYKIAQANEIAARRGGTIGLVSEQCLYNLAERRAEMEVIPAARDYGLGVIPWSPLHGGLLGGVIKKEATQGRRASGRAADALKDTKTREQIQAYEDLLDKHGLQPGEAALAWLLTRPGVTGPIVGPRTQEQLDSALRALELELSEELLTSLDEIFPGPGPSPEAFAW

SEQ ID NO: 7658 - protein, 376 aa, Shigella flexneri 2a str. 2457T
MLQRGCDGCKQNQSREPATIDGFMPKAQESIMGQQKQRNRRWVLASRPHGAPVPENFRLEEDDVATPGEGQVLLRTVYLSLDPYMRGRMSDEPSYSPPVDIGGVMVGGTVSRVVESNHPDYQPGDWVLGYSGWQDYDISSGDDLVKLGDHPQNPSWSLGVLGMPGFTAYMGLLDIGQPKEGETLVVAAATEPVGATVGQIGKLKGCRVVGVAGGAEKCRHATEVLGFDVCLDHHADDFAEQLAKACPKGIDIYYENVGGKVFDAVLPLLNTSARIPVCGLVSSYNATELPPGPDRLPLLMATVLKKRIRLQGFIIAQDYGHRIHEFQKEMGQWVKEDKIHYREDITDGLENAPQTFIGLLKGKNFGKVVIRVAGDD

SEQ ID NO: 7659 - protein, 342 aa, Novosphingobium aromaticivorans
MTTATLQTATPRTSALMRRGAEFLGTSHAILCGAMSWVSERHLVSAISNAGGFGVIACGAMTPELLDREIAATKAMTDKPFGVNLITMHPALFDLIAVCANHKVGHVVLAGGIPPKGSVEAIKAFGAKVLVFAPTLALAKKLLRSGADALVIEGSEAGGHIGPVSTSVLAQEFLPALAEEHVVFVAGGIGRGEMIASYLEMGASGVQLGTRFACATESIAHPAFKQAFFRGNARDAVASVQVDPRLPVIPVRALKNKGTEEFTAKQVEVAKMLDEGKVDMAAAQLEIEHFWAGALRRAVIDGDVERGSVMAGQSVGMVTREEPVADIIAQLMAESETALTRR

SEQ ID NO: 7660 - protein, 568 aa, Rhizobium sp.
MIRLRYPPIPRGRARGAKRRMDDRQVQPGRVIVVTGAAGGIGRALVDIFAANGDVVVAVDLPDSGVIELGQNLGEPHLGLEVDVSREDDVVALRALLEKRFSRIEVLVNNAGIGPTMAATADTALEDFQRALAINLVGAYSVACETAKLMKPGAAIVNVASLAGLLGNPKRSAYAASKAGLISITKSLACRWASRGIRVTAVAPGHVRTPMVAELERAGKLDVSAIRRRVPLGRIARPDEIARAVRFLASAQASYITGSTLVVDGGWMSVNQPGGAHQAQDRTPGAEFMRPVEDTDARTVIVMGGATGVGAAIARRFAENGDTVVIADGDGEEAVKLAGLLGDKHLSRRVDRTVETEVVSLFEELRERFGHLDVFVNGMNEILVPNTEESPEVLKRILDVNLTGAFTCVREAAISMRSGSVILNLGASLSLSPLAPSHAYGAYNAGIDMLTRCTAAELGPLGIRTATVAPGYIRTCAANRLAAVAGMDSASLRQRIPLGRVGDAEEVAEAAYFLASFDASYINGSILHVDGGLISSREAGWGSEVDGAISAEMRPQRRPAARWRLLSP

SEQ ID NO: 7661 - protein, 255 aa, Thermoplasma acidophilum
MFSDLRDKVVIVTGASMGIGRAIAERFVDEGSKVIDLSIHDPGEAKYDHIECDVTNPDQVKASIDHIFKEYGSISVLVNNAGIESYGKIESMSMGEWRRIIDVNLFGYYYASKFAIPYMIRSRDPSIVNISSVQASIITKNASAYVTSKHAVIGLTKSIALDYAPLLRCNAVCPATIDTPLVRKAAELEVGSDPMRIEKKISEWGHEHPMQRIGKPQEVASAVAFLASREASFITGTCLYVDGGLSIRAPISTPE

SEQ ID NO: 7662 - protein, 325 aa, Zea mays
  unsure (1)..(325): unsure at all Xaa locations
MAAAAFDAYTDKNAIFRRLKAKPENKMCFDCNAKNPTWASVTYGIFLCLDCSAVHRSLGVHITFVRSTNLDSWTPDQLKMMAFGGNNRAHAFFKQHGWTDGGKVEAKYTSRAAELYRQMLNKEVAKSAITDNALPSSPVTVSEASKPSDDFPEFKLSDAPAPPAENLNGKHEPKSPKSAPRSPKAATHPTFATSVKKPIGAKKVGGKTGGLGVRKLTTKPNESLYEQKPEEPKPAIPALTAPTAKGGPSLHSRFEYVDNEQSSDSRTGGSGSRVTGHVAPPKSSDFFQEYGMGNGFQKKSSNASKAQIEETDEARKKFXNAKAIS

SEQ ID NO: 7663 - protein, 171 aa, Oryza sativa (japonica cultivar-group)
MAAAPSATSVHDFTVKGVQDASGKDVNLSTYKGKVLLIVNVASQCGLTNSNYTELSQLYEKYKVQGFEILAFPCNQFGGQEPGSNEEIVQFACTRFKAEYPIFDKVDVNGNNAAPLYKYLKSNKGGLFGDSIKWNFSKFLVDKEGRVVDRYAPTTSPLSIEKDIKKLLGSS

SEQ ID NO: 7664 - protein, 368 aa, Ralstonia metallidurans
MAYKAVDLRRSSQNNPFRLTSLSDTWRQPAHPPCRIIAGRGYCNPPIRDKSNMRMLSTLALAAGLACAPLIAPTSVSSAYAADIQATGKSDKQALIADLIGRMTLDEKIGQLRLISIGPEMPQPQLIKEIAAGRVGGTFNSITQAENRPLQDAAVMQSRLKIPMFFAYDVVHGHRTVFPISLGLASSWDMGLVEKTARISAVEAAADGIDATFAPMVDISRDPRWGRTSEGFGEDPYLVSQCARASVKGFQGASPANADSLMAFVKHFALYGAVEGGRDYNTVDMSLQRMYQDYLPPYRAGLDAGAGGVMIALNSINGQPATSNRWLLHDLLRKEWGFKGVTVSDHGAIDELLRPAWPATAAGGKLAS

SEQ ID NO: 7665 - protein, 428 aa, Raphanus sativus
DNSYTLSFSLVFFVFILFRPAFSINTLSSTESLTISSNRTLVSPGDVFELGFFTPGSSSRWYLGIWYKKLSDRTYVWVANRDNPLPNSIGTLKISNMNFVLLGDSNKSVWSTNLIRGNERSPVVAELLANGNFVMRDTNNNDASGFLWQSFDFPTDTLLPEMKLGYDLKTGLNRFLTSWRSSDDPSSGEFSYKLELLKIPEFYLSSGYFPVHRVGPWNGIRFSGIPEDQKLSYMVYNFTENSEEVAYTFLMTNNSIYSRLTISSSGYFERLTWTPSSGMWNVFWSSPVDLQCDVYKICGPYSYCDVNTSPVCNCIQGFDPWNVQQWDLRAWSGGCIRRTRLSCSRDGFTRIKNMKLPETTMATVNRSIGVKECEKRCLSDCNCTAFANADIRNGGTGCVIWTGRLNDMRNYAADGQDLYVRLAAADLV

SEQ ID NO: 7666 - protein, 226 aa, Triticum aestivum
  unsure (1)..(226): unsure at all Xaa locations
MSPPGPITTPLTSLLGIKHPIVLAGMARVSGGRLAAAVSNAGGLGIIGGFQYTPKQLREILAEMKANFSRPDLPFGVDLALPQIGGNARKTNHDYTGGKLDELADIIIDSGAKLFVSAVGAPPPEVIKRFHDKGILVMNMVGHPKHATKALELGVDMICAQGGEGGGHTGDVANSILIPAVADIASKYXAPLLKGLPALVLAARGISXGRSLASSLMQDASGVWVG

SEQ ID NO: 7667 - protein, 254 aa, Triticum aestivum
GREGPVLYLDLTSYQLHDLSEVEIPPTLEEVDLTANRLSSVDPRIGQLPRLRKLSFRQNLLEDDAVAPLSSWETIAGLQELVLRDNKLTRIPDAGIFKGLLGFDVSFNEISSLTGMSKVSSKLKELYGSQNELAKMEELEHLHALEILELGSNRLRVMENLETLTNLQELWLGRNRIRAVNLCGLKLIKKISLQSNRLTSMDGFQECTALEELYLSHNGIQKMEGLSTLQNLRILDVSSNKLTTIENIETLTRL

SEQ ID NO: 7668 - protein, 176 aa, Oryza sativa
  unsure (1)..(176): unsure at all Xaa locations
XXRSKPXTRGTPSSRRRRARSGRLXMERLAASPPDQAESLTNIRNPIQAGQELLKRGIRTKWVVIKMGSKGSIMVTKSAVSSAPSFKIDVVDTVGCGDSFTAAIAFGFLHNLPAVSTLTLANAVGAATATGCGAVLSKTAVNSFSDRLVHVPTCNVVSNLLSMLEAVSERSTVQAX

SEQ ID NO: 7669 - protein, 181 aa, Magnetospirillum magnetotacticum
GLLAGPALAQEAGKDPGKEPAAPPAKTDTASAPQTYESTIANSKGETIGKIMIRDGANSLVMRLAIQAGGLPPGWHGIHFHAVGDCSDTEKFEKSKAHVNHDQSKHGLLNPDGPDEGDLPNVYANADGSVNAEVSSETPLTGEGGLRDGDGSALIIHANEDDHTSQPIGGAGSRIACAVIK

SEQ ID NO: 7670 - protein, 290 aa, Rhodobacter sphaeroides
MCSTPAPSSSRAPGPSSTGTKPSATAIWRLPDTSLGGDIMTRFEGRTALVTGGANGIGRASAIAFAEQGARVGILDIEEGPLAETAEAIRAKGGRVVTVVTDMRDRAAVKAAIGQVEAELGPIDLLLNNVGQTARKNASEFLDSVPETWDFVVDLNLMVTFYVTWTVAKGMKERGFGRIVNISSDSTLVGERSIVDYVAAKSGVSGFTRGLARELAPFGITVNAVAPGVTNTRGPKQLPKEVYDAALAEIPLGHLAEPEDIANAITFLASQEARCITGQMLTVNGGRIFY

SEQ ID NO: 7671 - protein, 175 aa, Lactobacillus delbrueckii subsp. lactis
MLYGDRSIENTDGTIRSLSNRHVQMIAIGGTIGTGLFLGAGTTISATGPSVIFIYAIMGLFFFFLLRALGEMFYFDSNSHTFVSFITRYLGEAAGRFAGWTYWIGILFACMAELTAVSTYVQYWLPGLPAWLIEVSVLGLLTLLNLTAAKLFGETEFWFAMIKIIAIISLVVTGI

SEQ ID NO: 7672 - protein, 214 aa, SYNECHOCOCCUS SP. WH 8102
MSIFVGNLPFRAEQEDVIELFAQFGEVANCALPLERDTGRKRGFAFVEMADEAVEDAAIEGLQGAELMGRPLRINKAEPRGSAPRGGGGGYRGGGGGYGGGGGYGGGGGRDGGGGYGGGGGGYRGGGGGYGGGGGGGRDGGGGYGGGGGGYRGGGDAGDRPSGARGWEDRSYGARDSGGEGGGGHDDGRSRRRRGSSGGGGGGDDYSGYGGAEG

SEQ ID NO: 7673 - protein, 169 aa, Brassica napus
MSEVEYRCFVGGLAWATGDAELERTFSQFGEVIDSKIINDRETGRSRGFGFVTFKDEKSMKDAIDEMNGKELDGRTITVNEAQSRGGGGGGGRGGGGYGGRGGGGYGGGGGGYGDRRGGGGYGSGGGGRGGGGYGSGGGGYGGGGGRRDGGGYGGGDGGYGGGSGGGGW

SEQ ID NO: 7674 - protein, 422 aa, Oryza sativa
  unsure (1)..(422): unsure at all Xaa locations
MRHQQQDRRHQIEYEFFGPYGPAVLLLALPCVVLGLVYACNSEGCPWHCCQVSHXNQPLYSHEAMAAVVAWFVLVLLLHVLLPGAEAQGVLLPTGRRLAYKLNAFKVFAVTYGTAALLSFGLGVLDLTWLASHFLPLTSAAIIFSSLLAVAVYAASFAPGRLLAHGGTSGVVPYDFWMGRELNPRLWGVDIKEFCELYPGMIGWGLLNLSFAYQQWVTLGRLTNSMLLVNAFELWYIVDGLVNERSILTTMDITTDGFGFMLAFGDLAWVPFTFCTQARYLADHPQQELSGLGLVGVIGVQLLGYRLFRGANGQKDAFRRDPGHPSVAHLQSMPTVRGTRLLISGYWGMARHINYLGDWLMGLAWCLPCGFGSVVPYFYSAYFASLLVHRERRDEAACRLKYGADWDKYCSLVPWRIVPYVY

SEQ ID NO: 7675 - protein, 444 aa, Bacillus cereus ATCC 14579
MNQTLGAIDLTLLGIGAIIGTGIFVLTGIVAAKHAGPAIVLSFVLAAIICACVAFCYAEFASTVPVSGSVYSYTYMTLGEIFAFIVGWCVMLEYLLVTSAVAAGWSAYFQSLLLGFNIHIPTIFASAPGMGKGGIIDLPAVLIILVVTFLLSRGAKESARINNIMVIIKLAVIVGFIVVGTQYVRPENWQPFLPFGFHGVVGGAATVFFAFLGFDAVATAAEEVKRPQRNVPIGLLVSLFICTVLYVGVSFVLTGMVPFTELNVADPVAYALRTVGEDRIAGLLSVGAIAGLTTVLLVAMFAFVRVSYSMSRDGLLPKRLSSVHKRLQTPFFNTWVTGILAALLAGLVDLNLLANLVNMGTITAFVFVSIAVIVLRKTHPNMKRPFRAPLVPFLPIVSIVSCIYLALNLSKLTLISFVAWIIVGVFIYFVYAKKHSNVRNRNKV

SEQ ID NO: 7676 - protein, 293 aa, Zea mays subsp. mays
IIESVGEGVTDVAPGDHVLPVFTGECKECAHCKSAESNMCDLLRINTDRGVMIADGKSRFSINGKPIYHFVGTSTFSEYTVMHVGCVAKINPQAPLDKVCVLSCGISTGLGASINVAKPPKGSTVAVFGLGAVGLAAAEGARIAGASRIIGVDLNPSRFEEARKFGCTEFVNPKDHNKPVQEVLAEMTNGGVDRSVECTGNINAMIQAFECVHDGWGVAVLVGVPHKDAEFKTHPMNFLNERTLKGTFFGNYKPRTDLPNVVELYMKKELEVEKFITHSVPFAEINKAFDLMA

SEQ ID NO: 7677 - protein, 363 aa, Schizosaccharomyces pombe
MSKKPVLNLDTSNGFSEEYISHPERNDNQGIVEITDLVFSSESKLTQRKESRDSKTFVPSFLEELDDDHLHELVTNGGILYMNSLGEGVSGSVRKCRIRGTQMIFAMKTVKAAPNTALQKQLLRELKINRSCTSPYIVKYYGACYNNAECQLNIAMEYCGAGSLDAIYKRVRSQGGRTGERPLGKIAFGVLSGLSYLHDRKIIHRDIKPSNILLTSKGQVKLCDFGVSGELVNSLAGTFTGTSYYMAPERISGGSYTISSDIWSLGLTLMEVALNRFPFPPEGSPPPMPIELLSYIINMPPPLLPQEPGIKWSKSFQHFLCVCLDKDKTRRPGPQKMLTHPWVKAFERIHVDMEEFLRQVWSD

SEQ ID NO: 7678 - protein, 352 aa, Oryza sativa
  unsure (1)..(352): unsure at all Xaa locations
MYGWEMLSFNIHDGFLEAIVRGNRSGLLTAADYNNLCQCENLDDVKMHLTATEYGPYLQNEPSPLHTTTIVEKCTLKLVDEYKHMMCQATEPLSTFLQYITYGHMIDNVVLIVTGTLHERDVNELLEKCHPLGMFDSIASLXAVAQNMRELYRLVLVDTPLAPYFSECITSEDLDDMNIEIMRNTLYKAYLEDFYKFCEKLGGATAEIMCDLLSFEADRRAVNITINSIGTELTRDDRRKLYSNFGLLYPYGHEELAVCEDVDQVRGVMEKYPPYQAIFAKISYGESQMLDKAFYEEEVRRLCLSFEQQFHYAVFFAYIRLREQEIRNLMWISECVAQNQKNRVHDSVVFIF

SEQ ID NO: 7679 - protein, 751 aa, Geobacillus stearothermophilus
MENQNRQNAAQCPFHGSVTNQSSNRTTNKDWWPNQLNLSILHQHDRKTNPHDEEFNYAEEFQKLDYWALKEDLRKLMTESQDWWPADYGHYGPLFIRMAWHSAGTYRTGDGRGGASTGTQRFAPLNSWPNNANLDKARRLLWPIKKKYGNKISWADLFILAGNVAIESMGGKTIGFGGGRVDVWHPEEDVYWGSEKEWLASERYSGDRELENPLAAVQMGLTYVNPEGPDGKPDPKAAARDIRETFRRMGMNDEETVALIAGGHTFGKAHGAGPATHVGPEPEAAPIEAQGLGWISSYGKGKGSDTITSGIEGAWTPTPTQWDTSYFDMLFGYDWWLTKSPAGAWQWMAVDPDEKDLAPDAEDPSKKVPTMMMTTDLALRFDPEYEKIARRFHQNPEEFAEAFARAWFKLTHRDMGPKTRYLGPEVPKEDFIWQDPIPEVDYELTEAEIEEIKAKILNSGLTVSELVKTAWASASTFRNSDKRGGANGARIRLAPQKDWEVNEPERLAKVLSVYEDIQRELPKKVSIADLIVLGGSAAVEKAARDAGFDVKVPFFPGRGDATQEQTDVESFAVLEPFADGFRNYQKQEYSVPPEELLVDKAQLLGLTAPEMTVLVGGLRVLGANYRDLPHGVFTDRIGVLTNDFFVNLLDMNYEWVPTDSGIYEIRDRKTGEVRWTATRVDLIFGSNSILRSYAEFYAQDDNQEKFVRDFINAWVKVMNADRFDLVKKARESVTALQILTGLRSVGAVVLQ

SEQ ID NO: 7680 - protein, 117 aa, Zea mays
  unsure (1)..(117): unsure at all Xaa locations
AIDEDXAEELQGQMEHDYDIGTTXIRDKIIPHAVSWFTGEAVQGEDFANLGDDDDDDEDEDDDDEEEDEDEEXDEEEESKPARNXGSGHKQKEPQEVXAALQGNAEQPAECKQRSAR

SEQ ID NO: 7681 - protein, 149 aa, Zea mays
FVRNIWDINRAYETFVAIKEKFDLTPDIHSYNALLCAFGKLKQTGEACNVFQHVLTLGVKPNATTYSLLVDAHLANKDPKAALAIIDEMVDAGFTPSKDTLRKVRRRCSRESDFDSDEKVQSLAKQFNYRMGGENRREMLYSIEYNPVY

SEQ ID NO: 7682 - protein, 97 aa, Glycine max
  unsure (1)..(97): unsure at all Xaa locations
YLTNDIHVSQRIGSNVTKGDNLDDNTVDSATYNVKSSNVKEPVRSPTSLVFGYLNLFSDGVHNFTDGMALGSAFLLYGSVGGWSRTMXXLAHELPQE

SEQ ID NO: 7683 - protein, 443 aa, Petroselinum crispum
MASIPVVQQNRVEAAGGGAVKQKNMAAVEGRNRRALGDIGNLVTGHGIEGKQQQIPQVSRPVTRGFCAQLLANAQAGVVENNKKQRAIVGDGVVAVRQKKVSVKPKPEDIIVISPDTEEADRVNKHLNRKKATEGSLKKKGQTFTSTLTARSKAAAFGLTRKPKEQIVDIDAADANNELAAVEYVEDMYKFYKLAEHESRVFDYIDFQPEINQKMRAILVDWLIEVHNKFELMPETLYLAINILDRYLSTESVARKELQLVGISSMLTASKYEEIWPPEVNDLTKISDNAYTNQQVLIMEKKILGQLEWNLTVPTPYVFLVRFIKASIPNEPAVENMACFLTELGMMNYATVTYCPSMVAASAVYGARCTLDKAPFWNETLKSHTGFSEEQLMECGRTLVRFHSCATENKLRVIYRKYSLDERGCVAMLPPAKALLTVAKPQT

SEQ ID NO: 7684 - protein, 236 aa, Zea mays
  unsure (1)..(236): unsure at all Xaa locations
MASLDAVRGDLALLILYLNKAEARDKICRAIQYGSKFISNGEPGPAQNVDKSTSLARKVFRLCKFVNDLHALISPPAKGTPLPLILLGKSKNAMLSTFLFLDQIVWAGRTGIYKNKERAEFLGRIAFYCFLGSNTCTAIIELAELQRLSTSMKKLEKELKHQELYKNEQYRMKLHKSNERLLALVKSSLDIVVAVGLLQLAPKKVTPRVTGXAFGFASSLIACYQLLPSPPAKQSK

SEQ ID NO: 7685 - protein, 399 aa, Zea mays
MDASKLRELRDFVEACKKNPSLLADPNLSFFRDYLQSLGAKIPAAAPSFESPKRSSMDDIDDDGDDDDDLDMRDPTPERDELDEEIVESDLELEGEIVQSDHDDPPQKMGNPSVEVTEENRDASQEAKGKAMEAISEGKLEDAIEHLTNAIVLNPLSAIMYGTRASVFIKMKKPAAAIRDANAALEINPDSAKGYKTRGMAYAMLGKWEEAAHDLHTASNMDYDEEINAVLKKVEPNAHKIVEHRRKYERLRKEREEKRAQRDRLRQRAEAQAAYDKAKRKEQSSSRSSGGASPRGFPGGMPGGGFPRGMPGGCFPGGGMPGGFPGGGMPGGFPGGVPGNVDMSKILNDPDLMAAFSDPEVMAALQDVMNNPANFAKHQANPKVGPIIAKMMAKFNGSQ

SEQ ID NO: 7686 - protein, 392 aa, Galphimia gracilis
DLEPVNPADVPVTAAGALKSYKLAARAISRLQSLPSGNISLLCDVLVKEVRDLTGYDRVMVYRFHDDEHGEVVSECCGPDLEAYLGLHYPATDIPQASRFLFMKNKVRMICDCLAPPVKVLQDERLPQPLSLCGSTLRSPHGCHAQYMANMGTMASLVMSVTINEDDNMLDGDQQHMARKLWGLVVCHHTSPRFVPFPLRYACEFLIQVFGVQINKEVELAAQMTEEHILRTQTLLCDMLLRDAPVAIITQSPNVMDLVKCDGAALYYRKKFWLLGVTPTEAQIRGIAEWLLEYHGGNTGLSTDSLMEAGYPGASVLGDAVCGMAAVKITSRDFLFWFRSNTAKEIKWSGAKHDPGDKDDIKKMHPRSSFKAFLEVVKWRSLPWEDVEMDAI

SEQ ID NO: 7687 - protein, 369 aa, Bradyrhizobium japonicum USDA 110
MKTRAAVAFEAKKPLEIVEVDLEGPKAGEVLVEIKATGICHTDAYTLDGFDSEGIFPSILGHEGAGIIREIGPGVTSVKPGDHVIPLYTPECRQCKSCLSQKTNLCTAIRATQGKGVMPDGTSRFSYKGKPIYHYMGCSTFSNFTVLPEIAVAKIREDAPFDKSCYIGCGVTTGVGAVVNTAKVEPGANVVVFGLGGIGLNVIQGAKMAGADKIIGVDVNDSKEDWGRRFGMTHFVNPKKITGDIVPHLVNLTDGGADYTFDCTGNTTVMRQALEACHRGWGTSIIIGVAEAGKEIATRPFQLVTGRNWRGTAFGGARGRTDVPKIVDWYMNGKIQIDPMITHVLKLEEINKGFDLMHEGKSIRSVVVY

SEQ ID NO: 7688 - protein, 392 aa, Blepharandra heteropetala
DLEPVNPADVPVTAAGALKSYKLAARAISRLQSLPSGNISLLCDVLVKEVRDLTGYDRVMVYKFHEDEHGEVISECRRPDLEAYLGLHYPATDIPQASRFLFMKNKVRMICDCLAPAVKVIQDERLPQALSLCGSTLRSPHGCHAQYMANMGTIASLVMSVIINEDNDMMDGDQQHIARKLWGLVVCHHTSPRFVPFPLRYACEFLIQVFGVQINKEVELAAQVREKHILRTQTLLCDMLLRDAPVAIITQSPNVMDLVKCDGAALYYRKKFWLLGVTPTEVQIRDIAEWLLEYHGGNAGLSTDSLMEAGYPGASDLGNAVCGMAAVRITSRDFLFWFRSHTAKEIKWGGAKHHPNDKDDVRKMHPRSSFKAFLEVVKWRSLPWEDIEMDAI

SEQ ID NO: 7689 - protein, 228 aa, Enterococcus faecium
MNPLFGLSLTLGVYVLSDKFLRKYKLPVLNPLVLSIVVIILFLHFSGISYKDYNIGGNFLTMLITPATVALAIPLYKNFRLLKENFYPVMAAILAGIVANCLVSVGFGYFFSLHKEMVISLLPKSVTTAISVDLSHTMGGVNAVTLAIVVSTGIFGSLIATHIFRLFKIESPVARGVALGSTSHAIGTAKAIEIGEIEGIISGLAICVNGILTVLLLPLFFQPFAGLF

SEQ ID NO: 7690 - protein, 171 aa, Hordeum vulgare subsp. vulgare
MGAAESSSKLGGSVHDFVVKDVRGNDVELSRYKGKVLLIVNVASRCGLANSNYTEMGQLYEKYREKGLEILAFPCNQFAGQEPDSDEKIVEFACDRFQAQFPIFRKVDVNGNNAAPLYKFLKSERGGLFGERIKWNFTKFLVDKEGHVMNRYAPTWSPLGIENDIKKLLEV

SEQ ID NO: 7691 - protein, 262 aa, Hordeum vulgare subsp. spontaneum
SAESNMCDLLRINTDRGVMIGDGKSRFSIGGKPIYHFVGTSTFSEYTVMHVGCVAKINPEAPLDKVCVLSCGISTGLGASINVAKPPKGSTVAIFGLGAVGLAAAEGARIAGASRIIGVDLNASRFEEARKFGCTEFVNPKDHTKPVQQVLADMTNGGVDRSVECTGNVNAMIQAFECVHDGWGVAVLVGVPHKDAEFKTHPMNFLNERNLKGTFFGNFKPRTDLPNVVEMYMKKELEVEKFITHSVPFSEINKAFDLMAKG

SEQ ID NO: 7692 - protein, 358 aa, Bradyrhizobium japonicum USDA 110
MWPDRRLIDLFKTEFPIVLAPMAGVMDAELVIAAAQGGALGSLPCAMLSAEKAREQVGLIRQRVKAPVNMNFFCHTPVDLTPEAEARWKQRLAGYYREHGLDPAAPISAANRAPFDAAFCEVVEELKPDVVSFHFGLPEQELLKRVKAAGSLVISSATTVKEAVWLERHGADAVIAQGAEAGGHRGMFLTDKIAEQPGTFALVPQVADAVKVPVIAAGGIADGRGIAAAFALGASGVQIGSAYLRCPESKVSAAGRAALAEGRDDSTVITNVMTGRPARGVQNRLMREAGPISPDAPPFPHAATALGPLKAAAEKQGRVDFTNLWAGQAIALGRELPAAELTRDLAKSALARMKALAG

SEQ ID NO: 7693 - protein, 248 aa, Silene latifolia
MEFSSQITREEGSPSSQRKLGRGKIEIKRIENTTNRQVTFCKRRNGLLKKAYELSVLCDAEVALIVFSSRGRLYEYANHSVKGTIDRYKKASSDNSGASSAAEANAQYYQQEAAKLRNQIRTVTENNRHLMGEGLSSLNMKDLKSLENKLERGISRIRSKKNELLFAEIEFMQKREVELHNNNQYLRAKIAENERAQQSMSLMPGGSSEYELAPPPQSFDSRNYFQVNALQPNNTHYSRPDQTTLQLN

SEQ ID NO: 7694 - protein, 245 aa, Oryza sativa
  unsure (1)..(245): unsure at all Xaa locations
TLLVGGQVGLGRGPGPPRIEAKRVSANPRPSCVRRVLARKRRRPEATANSARKLQRREISALPCRAFSASTTRERFRNIQLQEEFDTHDPKEMGSLLPYLMKRSEIIEIVGASDIIFALSQSGVCAAFSRVSNQRICFLNGRPDEVIRSLFYNKNNDSLITVSVYGSENFSALRCRTTRIEYIRRGKPDAGFPLFETESLKWPGFVEFDDVNGKVLTYSAQDSTYKVFDLKNYTLLYTISDKNVX

SEQ ID NO: 7695 - protein, 142 aa, Zea mays
  unsure (1)..(142): unsure at all Xaa locations
MDGIGPIRQDWHLVLVRKNAPTAAAKKDEKAVNVARRSXRQIEIMNTYIACMNNAASTVTYVNTKRLDDDTDNLGHERLPSDLKKNLMQARVDRKFTYATLVEMINEKAHVQHEYESGNEIANHEIIXELERALGTKLHDKK

SEQ ID NO: 7696 - protein, 256 aa, Triticum aestivum
  unsure (1)..(256): unsure at all Xaa locations
MSPRDNQAQRPNPSSPAVELEGPIDPSLARRRSRGPTQSIQGATERIYTRADTLDAKIQKLDAELAGLQGADKIKPRPAPAPXTVRRPGMTIPRQPKMYEGQRDMLYNQTYNLDQVAFASEGIKDAQQTMTAMKAANKELKGMMKTVRIEDIDSMQDEMMDLMDVSNEIQETLGRSYNVPDDIDEEELMGELDALEADMDFESNSVPSYLQPDKETDLDSELNLPAAPSGHAAVPANRQQEDELGLPTVPHASIRT

SEQ ID NO: 7697 - protein, 421 aa, Escherichia coli K12
MSNNEFHQRRLSATPRGVGVMCNFFAQSAENATLKDVEGNEYIDFAAGIAVLNTGHRHPDLVAAVEQQLQQFTHTAYQIVPYESYVTLAEKINALAPVSGQAKTAFFTTGAEAVENAVKIARAHTGRPGVIAFSGGFHGRTYMTMALTGKVAPYKIGFGPFPGSVYHVPYPSDLHGISTQDSLDAIERLFKSDIEAKQVAAIIFEPVQGEGGFNVAPKELVAAIRRLCDEHGIVMIADEVQSGFARTGKLFAMDHYADKPDLMTMAKSLAGGMPLSGVVGNANIMDAPAPGGLGGTYAGNPLAVAAAHAVLNIIDKESLCERANQLGQRLKNTLIDAKESVPAIAAVRGLGSMIAVEFNDPQTGEPSAAIAQKIQQRALAQGLLLLTCGAYGNVIRFLYPLTIPDAQFDAAMKILQDALSD

SEQ ID NO: 7698 - protein, 321 aa, Xylella fastidiosa Temecula1
MHYRRLGSTGLQLSVLSFGTWVTFGNQVARDEARNLVACAWDHGVNFFDGAETYAQGRAEQVLGDVIADLRLPRDGYCVSSKVFFGAVNEPRPTQCGLSRKHVHDACHAALKRLRVDYLDLFFCHRPDADTPIEETVRAMTTLIRQGKVLYWGTSEWSAAQIAEAIAIASREHLERPWVEQPQYNLLHRERVEREYVSLYAQGLGTTIWSPLASGLLTGKHNVGVASGSRLVQPGYEWLQRQVLGEGEARLVQARRFSEVAADLGQLPTQLAIAWCLRNPHVSTVILGASRVAQLKENLQALQVVAALDAAAWRCVEAAME

SEQ ID NO: 7699 - protein, 471 aa, Glycine max
MARLSSDQVLKDNNAADPTSVTTLYLTHKALSDITFLANFINLEKLDLKLNNLTSLEGLRSCVNLKWLSVVENKLESLEGIQGLTKLTVLNAGKNKLKSIDQVMSVVSLRALILNENEISSICKLDQLKDLNTLVLSKNPIRKIGEALMKVKSITKLSLSYCELQGIDTSLKSCVELSELRLAHNEIKCLPEELKLNSKLRSLDLGNNVITRWSELKVLKLLTNLRNLNLQGNPVATVDKVTRKVKKALPKLQIFNARPVDKDTENKKGSIVDGTHDFSVDQADHPSDQNEDNHLEAAADLDSGRKSTKKRKRTADASNKEDRVADEEKKGHKKDKTDRKNDGPEMDNKSTKKKAKKDDKPLDKGFALEENVSKVEKKLKKKHKNEEQSELDVIDDAEASFAELFKINDAENLNLVDEMRARDKVPKDVKLAGDTVTSFAKRKNAKMQNIESLSAPEAEVGMGGPSTWGDE

SEQ ID NO: 7700 - protein, 751 aa, Geobacillus stearothermophilus
MENQNRQNAAQCPFHGSVTNQSSNRTTNKDWWPNQLNLSILHQHDRKTNPHDEEFNYAEEFQKLDYWALKEDLRKLMTESQDWWPADYGHYGPLFIRMAWHSAGTYRIGDGRGGASTGTQRFAPLNSWPDNANLDKARRLLWPIKKKYGNKISWADLFILAGNVAIESMGGKTIGFGGGRVDVWHPEEDVYWGSEKEWLASERYSGDRELENPLAAVQMGLIYVNPEGPDGKPDPKAAARDIRETFRRMGMNDEETVALIAGGHTFGKAHGAGPATHVGPEPEAAPIEAQGLGWISSYGKGKGSDTITSGIEGAWTPTPTQWDTSYFDMLFGYDWWLTKSPAGAWQWMAVDPDEKDLAPDAEDPSKKVPTMMMTTDLALRFDPEYEKIARRFHQNPEEFAEAFARAWFKLTHRDMGPKTRYLGPEVPKEDFIWQDPIPEVDYELTEAEIEEIKAKILNSGLTVSELVKTAWASASTFRNSDKRGGANGARIRLAPQKDWEVNEPERLAKVLSVYEDIQRELPKKVSIADLIVLGGSAAVEKAARDAGFDVKVPFFPGRGDATQEQTDVESFAVLEPFADGFRNYQKQEYSVPPEELLVDKAQLLGLTAPEMTVLVGGLRVLGANYRDLPHGVFTDRIGVLTNDFFVNLLDMNYEWVPTDSGIYEIRDRKTGEVRWTATRVDLIFGSNSILRSYAEFYAQDDNQEKFVRDFINAWVKVMNADRFDLVKKARESVTALQVSDGIRSMGTANLQ

SEQ ID NO: 7701 - protein, 475 aa, Glycine max
  unsure (1)..(475): unsure at all Xaa locations
MTVFLATRLVLRRSPPLLWRRSFSRAAVEAEKDTVAVPSLPLFDYSPPPYAGPTADEILAKRREYLSPSILHFYKNPVNIVEGKKQYLFDEKGRRYVDAFGGIATVCCGHCHPDVVEAIVNQTKKLQHSTVLYLNNAIADFAQALTSKLPGNLKVVFFTNSGTEANELAILIARLYTGCHDIISLRNAYHGNAAGTMGATAQSIWKFNVVQSGVHHAVNPDPYRGIFGSDGEKYARDVQDIINFGTSGNVAAFISEAIQGVGGIIELAPGYLPAVYNTIKKTGGLFIADEVQAGFGRTGSHFWGFEAHNVVPDIVTMAKGIGNGIPLGAVVTTPEIAEVLTRRSYFNTFGGNPXCTAAGLAVLKVIEKEQLQQNAFVVGSYLKERLTALKDKYELIGDVRGRGLMLGVELVTDRELKTPAKGETLHVMDQMKELGVLIGKGGYYGNVFRITPPLCFTKEDADFVADAMDLTLSRM

SEQ ID NO: 7702 - protein, 166 aa, Pelargonium x hortorum
MASADVEYRCFVGGLAWATDDHALEQAFSQYGEVVESKIINDRETGRSRGFGFVTFSNEKSMNDAIEGMNGQNLDGRNITVNEAQSRGSGGGGGRREGGGGGGYGRREGGGGYSRGGGGGGYGGGGGGYGGGNGGGYGGGREQRGYGDSGGGSRYSRDSDGGNWRS

SEQ ID NO: 7703 - protein, 136 aa, Glycine max
  unsure (1)..(136): unsure at all Xaa locations
PTRAVLGGGDITGPHXHTRYADGLTDTLPXATMGAGSLAAKSEFEDKYKESESMDEGIKLVGEAICTDICNDLRSGSNVNTSVKTKGHKEYLMNHLLPNAHTYGNPKRYDTPKKTKDLSTKNAPVEENVGETEGDA

SEQ ID NO: 7704 - protein, 250 aa, Zea mays; identical to SEQ ID NO: 2044

SEQ ID NO: 7705 - protein, 126 aa, Oryza officinalis
MSERRRREKLNEMFLILKSVVPSIHKVDKASILAETIAYLKELEKRVEELESNNQLSPCALETRRRKCSEITGKKVSAGAKRKASAPEVASDDETDGERHCVSNVNVTIMDKEVLLVVQCQWKELL

SEQ ID NO: 7706 - protein, 171 aa, Oryza sativa (indica cultivar-group)
MAAAEGEQRKTVVVVGVDDSEHSNYALEWTMQHLASGMAGGGGAELVIVHAKPSPSSVVGFGAGPGSGEVVRYVEADLRKTAEDVVEKARRLCIANAMHALIEVIEGEPRYVLCNAVEKHSAGLLVVGSHGYGAIKRAFLGSVSDYCAHHAHCSVMIVKQPKAKRSRAETA

SEQ ID NO: 7707 - protein, 449 aa, Brassica napus
PPKPQPKPPPKPQPKPPPAPTPSPCPPQPPKPQPKPPPAPTPSPCPPQPPKPQPKPPPAPGPSPKPGPSPSPPKPPPSPAPKPVPPPSPSPKPSPPKPPAPSPKPSPPKPPAPSPPKPQNKTIPAVFFFGDSIFDTGNNNNLDTKLKCNYRPYGMDFPMGVATGRFSNGRVASDYISKYLGVKEIVPAYVDKKLQQNNELQQSDLLTGVSFASGGAGYLPQTSESWKVTTMLDQLTYFQDYKKRMKKLVGKKKTKKIVSKGAAIVVAGSNDLIYTYFGNGAQHLKNDVDSFTTMMADSAASFVLQLYGYGARRIGVIGTPPIGCTPSQRVKKKKICNEDLNYAAQLFNSKLVIILGQLSKTLPNSTIVYGDIYSIFSKMLESPEDYGFEEIKKPCCKIGLTKGGVFCKERTLKNMSNASSYLFWDGLHPSQRAYEISNRKLVKKYIHFI

SEQ ID NO: 7708 - protein, 97 aa, Glycine max
  unsure (1)..(97): unsure at all Xaa locations
KXEPRRKTQGGRALPPPPRXLRLLPPLRPRLEPVDREKPVRYWLRVXFPKIGSPLSLEDLAVRXGKEPKAEVQIYPLERPLPLRDLTDLCQKKCSGW

SEQ ID NO: 7709 - protein, 405 aa, Pirellula sp.
MLFIGSIPMSYRLDGSSPPMSIFLEPSPFQDSSMKVFVVGGAGYIGSHAVALLLDAGHEVVVFDNLSRGHAKSVPEGLLVEGDLNDQAKLTSLLKEHSIDAVMHFAAFAEVGESVRDPAIYYQNNVVATLSLLEAMRAADVKKIVFSSTTATYGQPDTVPIPETTPQNPINPYGFSKLVIEKALADYAHAYGFAYAALRYFNAAGARPDGTIGEHHDPESHLIPIVLQVALGQRESISIFGDDYPTPDGTCIRDYIHVDDLGDAHLRALDRLKPGEGIQVNLGTGRGTSVREIVDACRAVTGHPIPEVMGERRPGDPAELIADAKLAGEVLGWKPRYTDIQDIVKTAWNWHQTHPQVTTPFERPLSPSNRGQDRVFTATRFRRSTYQSEGRVCPVISSDWLSSSN

SEQ ID NO: 7710 - protein, 276 aa, Mesorhizobium huakuii
WGFDGSSTMQAEGRSSDCVLKPVALYPDPARTNGILVMCEVMMPDGVTPHESNSRATILDDEDAWFGFEQEYFFYKDGRPLGFPESGYPAPQGPYYTGVGYKNVGDVARKIVEEHLDQCLAAGINHEGINAEVAKGQWEFQIFGKGSKKAADQIWMARYLLLRLTETYGIDIEFHCKPLGDTDWNGSGMHCNFSTKFMREVGGKAYFEALMAQFDKNLMDHIAVYGPDNDKRLTGKHETAPWNKFSYGVADRGASIRVPHSFVKNDYKGYLEDRRP

SEQ ID NO: 7711 - protein, 130 aa, Pseudomonas aeruginosa UCBPP-PA14
MRAPKQFDVMVTDNMFGDILSDEASMLTGSIGMLPSASLDANNKGMYEPCHGSAPDIAGQGIANPLATILSVSMMLRYSFSQATAADAIEQAVSKVLDQGLRTGDIWSEGCRKVGTREMGDAVVAALKNL

SEQ ID NO: 7712 - protein, 95 aa, Oxalis tuberosa
LYAGIDISGTNGEVMPGQWEYQVGPSVGIEAGDHIWASRYILERITEQAGVVLTLDPKPIDGDWNGAGCHTNYSTKSMRDEGGFEVIKKAIFNLS

SEQ ID NO: 7713 - protein, 47 aa, Pueraria phaseoloides
RITEQAGVVLSLDPKPIEGDWNGAGCHTNYSTKSMREDGGFEVIKKA

SEQ ID NO: 7714 - protein, 355 aa, Staphylococcus aureus subsp. aureus N315
MWNKNRLTQMLSIEYPIIQAGMAGSTTPKLVASVSNSGGLGTIGAGYFNTQQLEDEIDYVRQLTSNSFGVNVFVPSQQSYTSSQIENMNAWLKPYRRALHLEEPVVKIIEEQQFKCHIDTIIKKQVPVCCFTFGIPNESIIERLKEANIKLIGTATSVDEAIANEKAGMDAIVAQGSEAGGHRGSFLKPKNQLPMVGTISLVPQIVDVVSIPVIAAGGIMDGRGVLASIVLGAEGVQMGTAFLTSQDSNASELLRDAIINSKETDTVVTKAFSGKLARGINNRFIEEMSQYEGDIPDYPIQNELTSSIRKAAANIGDKELTHMWSGQSPRLATTHPANTIMSNIINQINQIMQYK

SEQ ID NO: 7715 - protein, 395 aa, Glycine max
MDSHSHIIAWGSGEDGQLGIGSNEEKEWVCLVKALQPHRIRSVVAGSRNSLAIADDGKLFTWGWNQRATLGHPAETKSENKTENTPSQVKALSSVKIVQAAIGGWHCLAVDDQGRAYAWGGNEYGQCGEEPERKDGTGRPLRRDIEIPQRCAPKLVVRQVAAGGTHSVVLTREGHVWTWGQPWPPGDIKQISVPVRVQGLENVRLIAVGAFHNLALQEDGTLWAWGNNEYGQLGTGDTQPRSQPIRVQGLSDLTLVDIAAGGWHSTALTDEGEVYGWGRGEHGRLGFGDSDKSSKMVPQKVQLLAGEDIVQVSCGGTHSVALTRDGHMFSFGRGDHGRLGYGRKVTTGQPMEVPIDLPPPQDPSGTATEGHWIAKLVACGGRHTLAIVEWKSNES

SEQ ID NO: 7716 - protein, 280 aa, Oryza sativa
  unsure (1)..(280): unsure at all Xaa locations
MDHSIMMVKNEIENYSGSSPAMTSMRWKAAPRRASSLSGITVKRSSRFRGVSRHRWTGRFEAHLWDKNSWNPTQRKKGKQVYLGAYDEEEAAARAYDLAALKYWGPTTYTNFPVMDYEKELKIMENLTKEEYLASLRRKSSGFSRGVSKYRGVARHHQNGRWEARIGRVFGNKYLYLGTYSEYKNSTQEEAARAYDIAAIEYKGVNAVTNFDLRSYIRVPIQEKDMNTTTSSREMXAPDMDMCDLLSSGNVHAASGSAGFEEDXSHVIVVLEACSRCSNX

SEQ ID NO: 7717 - protein, 189 aa, Bradyrhizobium japonicum USDA 110
MMNRRTMLIAALAGAVAPVTRAVAGGGMSRISAYAFSFPALSGDDIRLAAFTGKPLLVVNTASLCGYTPQYAGLQELWSEFGERGLTVIGVPSNDFGGQEPGGTSEITETAHHQYGVTFPIAAKATVIGARAHPFYKWAADARPKDVPRWNFHKYLIGRDGYIAEVFASNIEPTDTRIKTAIAKTLADT

SEQ ID NO: 7718 - protein, 195 aa, Triticum aestivum
TDFTRKILAMDAKNYHAWSHRQWVLQALGGWESELQYCNQLLEEDVFNNSAWNQRYLVVTRSPILGGLAAMRDSEVDYTVEAIMVNPQNESPWRYLRGLYKDDNNLLVADNRISDACLKVLNKDWTCVFALSFLLDLLRMGLQPSDELKGTIEAMENSDPETGHADIAVAVCSILQKCDPLRINYWSWYQTTLSS

SEQ ID NO: 7719 - protein, 443 aa, Zea mays; identical to SEQ ID NO: 7032

SEQ ID NO: 7720 - protein, 266 aa, Zea mays
MSQGQPRRRQGEEGMHAQDKPVKFGDVLDVSGELADQPVAPRDAARLQAAEQSVLGGTQKGGPAAVLQSAATVNARAGHVGRAQTACPVADAGATVTETELAGRRVVTESVGGQVVGKMVSPAPVAMTDPPGALEKDAVTIGRALEAVGAMVGDRPVEQSDAAAVQVAELCATGSDSTVPGGLAAAAQSAADQNARATRDEDKVKLRNVLSNAREKLPADKGATREDAERVVSAEIRNKLDMATTPGGVADAVTTAARLNQERPRP

SEQ ID NO: 7721 - protein, 228 aa, Pseudomonas fluorescens PfO-1
MKLELMPMFWLAFTLLAYLFSRWLYRRTGRYVLSPLILVPALLLALAVPLHTAYAEYSSNTHWLMLVLGPVTVAFAVPIWQQRRLLVRHWSALLLGMLAGSAASIATSFGLAKALALDSSVTLSLVPRSITTPFAMPLAQDLGGVPELTAVFVMFTGVFGAMLGGVLLKWLPLRSALARGALFGVGAHGAGVSRAHEVGGEEGSVAGLVMVLTGLLNLFAAPLLAAVL

SEQ ID NO: 7722 - protein, 405 aa, Pasteurella multocida
MSISYFMKKIVILGSTGSIGTSTLSVITHNPDKYQVFALVGGRNVELMFQQCLTFQPSFAALDDDVAAKMLAEKLKAHQSQTTVLAGQQAICELAAHPEADMVMAAIVGAAGLLPTLSAVKAGKRVLLANKEALVTCGQLFIDAVRESQAQLLPVDSEHNAIFQSLPPEAQRQIGFCPLSELGISKIVLTGSGGPFRYTPLEQFEQITPAQAVAHPNWSMGKKISVDSATMMNKGLEYIEARWLFNASAEEMEVIIHPQSIIHSMVRYIDGSVIAQMGNPDMRTPIAETMAYPSRTVAGVEPLDFYQLNGLTFIEPDYQRYPCLKLAIDAFSAGQYATTAMNAANEIAVASFLDNKIKFTDIARLNQLVVSKLQPQKIHCIEDVLEVDKKARELSQSIILSFSHP

SEQ ID NO: 7723 - protein, 379 aa, Leavenworthia stylosa
  unsure (1)..(379): unsure at all Xaa locations
MTTTGRIIRSXAGVAWEAGKPLVIEEVEVAPPQKHEVRIKILFTSLWHTDVYFWEAKGQTPLFPRIFGHEAGGIVESVGEGVTDLKPGDHVLPIFTGECGDCPHCHSEESNMCDLLRINTERRGMIHDGESRFSINGKPIHHFLGTSTFSEYTVVHSGQVAKINPKAPLDKVWIVSWGLSTGLGAILNVAKPKKGQSVAVFGLGAVGLAAAEGARIAGASRIIGVDLNSKRFEEAKKFGVTEFVNPKDYDKPVQQVIAEMTNGGVDRSVECTGSVQAMIQAFECVHDGWGVAVLVGVPSKDDAFKTHPMNFLNEKTLKGTFFGNYKPKTDIPGVVEKYMNKELELEKFITHTVPFSEINKAFDYMLKGESIRCIITMGA

SEQ ID NO: 7724 - protein, 159 aa, Zea mays; identical to SEQ ID NO: 6950

SEQ ID NO: 7725 - protein, 245 aa, Triticum aestivum
  unsure (1)..(245): unsure at all Xaa locations
MPSRPAPLVHRLRLLRSAVVSPSSALLPCSRPRLAIPFAQPPLRAPAFAAASSPLLRPVGARFSLFSSMAAAASSASSIHDFTVKDASGKDVDLSTYKGKDDHFVKLTKIIVAYNYCSGLTNSNYTELAQLYEKYKDQGFEILAFPCNQFGGQEPGPNEXEIVQFACTRFKAEYPIFDKVDVNGDNVAPVYKFLKSRKGSLFGDNIKWNFSKFLVDKEGHVVDRYAPTTSPLSIEKDIKKLLASS

SEQ ID NO: 7726 - protein, 93 aa, Oxalis petrophila
AGINISGTNGEVMPGQWEYQVGPSVGIEAGDHIWASRYILERITEQAGVVLTLDPKPIDGDWNGAGCHTNYSTKSMRDEGGFEVIKKAILNLS

SEQ ID NO: 7727 - protein, 244 aa, Escherichia coli
MNFEGKIALVTGASRGIGRAIAETLAARGGKVIGTATSENGAQAISDYLGANGKGLMLNVTDPASIESVLEKIRAEFGEVDILVNNAGITRDNLLMRMKDEEWNDIIETNLSSVFRLSKAVMRAMMKKRHGRIITIGSVVGTMGNGGQANYAAAKAGLIGFSKSLAREVASRGITVNVVAPGFIETDMTRALSDDQRAGILAQVPAGRLGGAQEIANAVAFLASDEAAYITGETLHVNGGMYMV

SEQ ID NO: 7728 - protein, 470 aa, Pseudomonas aeruginosa PAO1
MADGKERLQLTRALASRHIFMLSLGGVIGTGLFMGSGVTINQGGPAGAVLAYLVAGVLMYLVMVCLGELSVQMPVSGSFQAHATRFIGPATGFMIGWVYWMSWASTVGLEFTAAGMLMTRWFPEVPVWLWSGFFVVVLFSLNALATRAFGEAEYWFAGIKVAAILVFIVVGGLVIFGGIELKSGAPAPMFSNLVGERLFPNGLSAVFAVMMTVVYAFQGCEIMGVAAGETERPEKSIPRAVRNVVFRVLIFYVLAIVVLSAIIPWQQAGLMESPFVQVFDMVGIPYAADLMNFVILTAILSVGNSGLYASTRILWAMSRSGMAPRGLSKLSARGVPLYALLITLCFALLSLLTSVVAADTLFMVLMAVSGMSGTVTWIVIAYAQYRFRREHMASGGTVAELKYAAPLFPLVPLACIAVCCSLFVFLALDPTQRPSLYWGFGFIAACYLAYYVVRRRQPQGLGDPALGRAG

SEQ ID NO: 7729 - protein, 466 aa, Shigella flexneri 2a str. 2457T
MGQSSQPHELGGGLKSRHVTMLSIAGVIGASLFVGSSVAIAEADPAVLLAYLFAGLLVVMIMRMLAEMAVATPDTGSFSTYADKAIGRWAGYTIGWLYWWFWVLVIPLEANIAAMILHSWVPGIPIWLFSLVITLALTGSNLLSVKNYGEFEFWLALCKVIAILAFIFLGAVAISGFYPYAEVSGISRLWDSGGFMPNGFGAVLSAMLITMFSFMGAEIVTIAAAESDMPEKHIVRATNSVIWRISIFYLCSIFVVVALIPWNMPGLKAVGSYRSVLELLNIPHAKLIMDCVILLSVTSCLNSALYTASRMLYSLSRRGDAPAVMGKINRSKTPYVAVLLSTGAAFLTVVVNYYAPAKVFKFLIDSSGAIALLVYLVIAVSQLRMRKILRAEGSEIRLRMWLDPWLTWLVIGFITFVLVVMLFRPAQQLEVISTGLLAIGIICTVPIMARWKKLVLWQKTPVHNTR

SEQ ID NO: 7730 - protein, 271 aa, Zea mays
MGIVEEAHNLRVVGEGKRGVIVLAHGFGTDQSVWKHLVPHLVADYRVVLFDTMGAGPTNPDYFDFSRYATLEGYALDLLAILQELGVRSCIYVGHSVSAVIGALASISRPDLFTKLVLLSASPRYLNDVDYYGGFEQDELDELFEAMRSNYKAWCSGFAPLCVGGDMESVAVQEFSRTLFNIRPDIALSVAQTIFQSDVRSLLPHVTVPCHIVQSTKDLAVPVVVSEYLHRHLGGDSIVEVMPSEGHLPQLSSPDIVIPVLLRHIQHDIAV

SEQ ID NO: 7731 - protein, 333 aa, Rhodopseudomonas palustris
MQMSEKFKQIRARLRLPVLVAPMLRISGPALVAASCSNGVIGSFPTVNARTPDQLDRWIDEIKQAVSAAGAYDAPYCANILARSDPDKLQADLKILIKHKVEIVLVSTGAPEKYVKPLQDIGCFVIADVASIRHARKALQQGVDGLALLTAGAGGQTGWANGFAFVRAIRDFYDGPLLLAGGVSDGQALWAARTLGCDLGLMGTRFIGTQECDASDGYKAMLVDSSIDDVVLTRGISGIDANFLRPSIIACGLDPQELVAPVSPERAREMFSSYADGMRGPKRWVDLWSAGHTVSGVKVVQSVSEVVDQLAVEYTRAQRATRAPLADADDPAI

SEQ ID NO: 7732 - protein, 338 aa, Thermoplasma acidophilum
MKYVRLGNSGTIVSQVAIGTWHLPGSGKYHMDGVEMVDEAEFYKIVRKAYDAGINFFDTANIYHGRVEKNEDHIDHIGNSEKILGRSLKGYDRESLVIATKVRGPVSTFPNGEGLSRKHIMWQIRESLNRLDVDYVDLYQIHWPDQNTPHLETMRTLSHLVDMDLVRYVGESNHSATDIEDFMNISERYGLHPFVTMQEPYNIMQRGIEKDKLNVARKYGLGLLAYIPLAQGVLSGKYLRPPEPGSRSSYYPDLISFSRKNEGIIKELMELAKEKGITGSQLAIAWIIKRSEIEKIPMIPLLGVTKEKYLDENLAALDVRLNDDDMKRIDQLTSGVES

SEQ ID NO: 7733 - protein, 359 aa, Candida rugosa
MSKSIVLLPGDHVGTEVVAEAVKVLKAIERTTPGTSFSFSTHLIGGAAIDATGVPLPDEALEAAKASDAVLLGAVGGPKWGTGDVRPEQGLLKIRKELGLYANLRPCSFASSKLVDLSPLKREIVEGTDFVVVRELVGGIYFGERKEDDGSGVASDTETYSVPEVERITRMAAFLALQHNPPQTVWSLDKANVLASSRLWRKTVTRVMTEEFPTVPFQHQLIDSAAMILVQKPTKLNGVVLTSNMFGDIISDEASVIPGSLGLLPSASLASLPDTNTAFGLYEPCHGSAPDLPAGKVNPLACILSAAMMLRLSLDNAAAADRIEQAVREVIDSGVATADLGGSSSTGEVGDAIVKALEK

SEQ ID NO: 7734 - protein, 199 aa, Leavenworthia crassa
SVGEGVTDLQPGDHVLPIFTGECGECPHCHSEESNMCELLRINTERGGMILDGESRFSINGKPIHHFLGTSTFSEYTVVHSGQVVKINPKAPLDKVCIVSCGLTTGLGATLNVAKPKKGQSVAVFGLGAVGLGTAEGARIAGASRIIGVDLNSNRFEEAKKFGVTEFVNPKEHNKPVQQVIAEMTNGGVDRSVECTGSV

SEQ ID NO: 7735 - protein, 262 aa, Thermotoga maritima
MSWYPGHIEKAKRQIKDLLRLVNTVVEVRDARAPFATSAYGVDFSRKETIILLNKVDIADEKTTKKWVEFFKKQGKRVITTHKGEPRKVLLKKLSFDRLARVLIVGVPNTGKSTIINKLKGKRASSVGAQPGITKGIQWFSLENGVKILDTPGILYKNIFSEDLAAKLLLVGSLPVERIEDQRIFERAFEIFARSIGIESSFSEFFEDFARKRGLLKKGGVPDIERALMLFFTEVAQGKAGRVSFERPEDITPVQQEQTRGV

SEQ ID NO: 7736 - protein, 387 aa, Magnetospirillum magnetotacticum
MSGRKGVTILGSTGSIGCNTVDLVERNPELYRVEALVANSRVDILAQQAKTLRAKLAVVADEGAYGALKEALAGTGIEAAAGPEAVVAAARMPADWVMAAIVGAAGLAPTLAAVRRGAVVGLANKECLVCAGQLMMAEVEKHGATLLPVDSEHSAIFQVFEADQHDRIEKIILTASGGPFRTKTREFMADVTPEQAVAHPNWSMGAKISVDSASMFNKGLELIEAHHLFDMPEDKIDIVVHPQSVIHSLVAYVDGSVLAQLGSPDMRTPIAYALGWPNRIEAPVPRLDLATIATLTFEAPDPVRFPSLRLAREALRAGGSAAAVMNAANEVSVAAFLGRRIGFLDIASIVERTVAGVTHCELTSIDDVLAQDAEARRFASALIDGGR

SEQ ID NO: 7737 - protein, 343 aa, Listeria innocua
MKAVVKTNPGYDQMELRDVEEPQVYGDKVKIKVAFTGICGSDIHTFKGEYKNPTTPVTLGHEFSGVVVEVGPDVTSIKVGDRVTSETTFETCGECIYCKERDYNLCSNRRGIGTQANGSFAEFVLSREESCHVLDERISLEAAALTEPLACCVHSALEKTTICPDDTVLVFGPGPIGLLLAQVVKAQGATVIMAGITKDSDRLRLAKELGMDRIVDTLKEDLAEVVLGMTDGYGAERVFDCSGAVPAVNQGLPLTKKKGDFIQVGLFAEKKNAIDEESIIQREIAYIGSRSQKPSSWILALDLLANGKINTDKMITKVYGLDDWREAFEAVMAGNEIKVLVKS

SEQ ID NO: 7738 - protein, 642 aa, Cryptococcus neoformans var. grubii
MGFNGPSLTPSRPAPAPPGRGAKQMPNSTTPHGTSAHESNFSSASYSSSFPSIVSSTGNPARNIVFNKDAVVRSGTANVKEEGLRAFMWSKRWLVLRNSEFCIYKNENSPSPIYALPLENVQDVQRVDLKPFCIEIETGDRLIYFAVRTDDDVYGWMDDIYSRSPRLGVSQPTNFVHQVHVGFDPKSGGFTGLPAQWSKLLTSSAITKEEAAKNPEAVLDVLQFYTQQHASDGGETIGPSSVPMLPQQSLSTSAAATRFEGVGLGGQQKLEHVRGLMNDKKVSQSTSQMPSCSSVSDERILKKGKVVVRYEPSSGAERRPSRDPHHLSDPSSSSPMSLPVEKRISTMNESQIMGKLRSVVSVQDPTFLYSKIKKVGQGASGLVFVAKTVSSGRKVAIKQMDLSQQPRKELIVNEIIVMKESQHANIVNFLDAFLLKGSELWVVMEFMEGGALTDVIENNKLTEDQIAAICLETCRGLQHLHSRSIIHRDIKSDNLLMNSHGEVKITDFGFCAKLTDQKSKRATMVGTPYWMAPEVVKQKEYGAKVDIWSLGIMTIEMIESEPPYLDEEPLKALYLIATNGTPTLKSPDTLSQNLKHFLSVCLCVDVAFRATSTELLKHEFLQIACPVKQLAQLLKFKQSSVS

SEQ ID NO: 7739 - protein, 286 aa, Prunus persica
FVLGHDCGHGSFSNNPKLNSVVGHLLHSSILVPYHGWRISHRTHHQNHGHVENDESWHPLSEKVYKTLDKATQMLRFTLPFPMLAYPFYLWGRSPGKSGSHFDPNSDLFVPNERKDIITSTACWTAMAGLLVGLSFVMGPVQMLKLYGVPYWLFVMWLDLVTYLHHHGHEDKLPWYRGKEWSYLRGGLTTLDRDYGLINNIHHDIGTHVIHHLFPQIPHYNLVEATEAAKPVLGKYYREPKKSGPLPLHLLGVLIRSMKRDHYVSDTGDVVYYQTDKKLPGSVTSE

SEQ ID NO: 7740 - protein, 378 aa, Schizosaccharomyces pombe
MSFEGKTITCKAAVAWGAKEPLSIEDIQVAPPKAHEVRVKVDWSAVCHTDAYTLSGVDPEGAFPIVLGHEGAGIVESIGEGVINVRPGDHVILLYTPECKECKFCRSGKTNLCSKIRETQGRGLMPDGTSRFSCRDKTLLHYMGCSSFSQYTVVADISLVAISHSAPLRSICLLGCGVTTGFGAVTHSAKVESGSTVAVVGCGCVGLAAMQGAVAAGASRIIAIDINADKEVYAKKFGATDFIDSSKVKDLVQYVIDVTDGGVDYAFDCTGNVTVMQQELQFCHKGWGKLCVIGVAAAGKTLDFRPFLVVTGRQVLGSAFGGVKGRSELPNFVDEYMQGHFKVDEYITNEEPLKNINKAFDHMHEGKCIRCVVDMNKP

SEQ ID NO: 7741 - protein, 327 aa, Ralstonia solanacearum
MPAAKHLPAALQHLSLPVIGSPMFIVSYPELVLAQCKAGIVGAFPALNARPAEVLDDWLTQINAELAAHRAAHPHAVVGPLAVNQIVHASNARLEQDVATCVKHKVPIFITSLRAPVREILDAVHSYGGIVLHDVINLRHAEKALEAGVDGLILVAAGAGGHAGTLSPFALVGEVRRIFNGPIALSGAIATGDAILAAQAMGADLAYIGTRFIASQEAHAAGAYKEAILRAAASDIVYTSLFTGVHGNYIRESIELAGLDPEALPEADKSKMNFGDGSAKARAWKDIWGAGQGVGQISDLPPAGEIVTRLKAEYEAAKLRLALHLRL

SEQ ID NO: 7742 - protein, 213 aa, Oryza sativa (japonica cultivar-group)
MAITRRHPPLLLLFLAVAAAATIAGASQSTRPRPAVSPAAAADFVRRSCRATRYPQVCERSLMPQAPAVGRSPRLLAQAALTVGADRARSCSGYLGGGGSSSSSKRSGGGGRGGAVGDCADTLRDAEERLRQSAAEMSRMGRSGSPRFAWRLSNVQTWASAALTDASTCLDSLATYAAPGIDVDALRKRVGAVSQATSNALALVNNLDPHHHL

SEQ ID NO: 7743 - protein, 496 aa, Shigella flexneri 2a str. 301
MITAFVFIPIFAIAAGVAQSLQYLNRYHVIREPPEHILNRLPSSASALACSAHALNLIEKRTLDHEEMKALNREVIEYFKEHVNPGFLEYRKSVTAGGDYGAVEWQAGGLNTLVDTQGQEFIDCLGGFGIFNVGHRNPVVVSAVQNQLAKQPLHSQELLDPLRAMLAKTLAALTPGKLKYSFFCNSGTESVEAALKLAKAYQSPRGKFTFIATSGVFHGKSLGALSATAKSTFRKPFMPLLPGFRHVPFGNIEAMRTALNECKKTGDDVAAVILEPIQGEGGVILPPPGYLTAVRKLCDEFGALMILDEVQTGMGRTGKMFACEHENVQPDILCLAKALGGGVMPIGATIATEEVFSVLFDNPFLHTTTFGGNPLACAAALATINVLLEQNLPAQAEQKGDMLLDGFRQLAREYPDLVQEARGKGMLMAIEFVDNEIGYNFASEMFRQRVLVAGTLNNAKTIRIEPPLTLTIEQCELVIKAARKALAAMRVSVEEA

SEQ ID NO: 7744 - protein, 411 aa, Oryza sativa
MTPGVSCRPVGVSFRRRPRILHCPSQRLRAGRSPSKTGQRARLVQRLGMERVSCVPLLRRLLLLAAAGLAGAEPQVPCYFVFGDSLVDNGNNNNIASMARANYPPYGVDFPGGATGRFSNGLTTADAISRLLGFDDYIPPYAGATSEQLLTGVNFASAAAGIRDDTGQQLGERISFSAQLQNYQAAVRQLVSILGGEDAAANRLSQCIFTVGMGSNDYLNNYFMPAFYPTSRQYTPEQYADVLINQYAQQLRTLYNYGARKVAVFGVGQVGCSPNELAQNSRNGVTCIERINSAVRMFNRRVVVLVNQFNRLLPGALFTYINCYGIFESIMRTPVEHGLAVTNRGCCGVGRNNGQVTCLPYQAPCANRDEYLFWDAFHPTEAANIFVGRRAYSAAMRSDVYPVDLSTLAQL

SEQ ID NO: 7745 - protein, 122 aa, Zea mays
  unsure (1)..(122): unsure at all Xaa locations
MKKIFGAKXKTRGPAPFIQDAPERINQPGXKPGPEDPKLDQELSPCTGHIPKTRPGPFQEAIXAPAIRLLKHKRMYHEQRNMLYNQTYNLDQIGFAADGLKDAQQTMNAMKAANKELMGMMK

SEQ ID NO: 7746 - protein, 354 aa, Nicotiana tabacum
MAADNIYDFVASNLLCTETKSLCFDDVDSLTISQQNIETKSKDLSFNNGIRSEPLIDLPSLSEECLSFMVQREMEFLPKDDYVERLRSGDLDLSVRKEALDWILKAHMHYGFGELSFCLSINYLDRFLSLYELPRSKTWTVQLLAVACLSLAAKMEEINVPLTVDLQVGDPKFVFEGKTIQRMELLVLSTLKWRMQAYTPYTFIDYFMRKMNGDQIPSRPLISGSMQLILSIIRSIDFLEFRSSEIAASVAMSVSGEIQAKDIDKAMPCFFIHLDKGRVQKCVELIQDLTTATITTAAAASLVPQSPIGVLEAAACLSYKSGDERTVGSCTTSSHTKRRKLDTSSLEHGTSEKL

SEQ ID NO: 7747 - protein, 63 aa, Prorocentrum minimum
MRGILVDWLVEVAEEYKLCADTLYLSVNYIDRFLSIHPVQRSNLQLVGIACMWIASKYEEIYP

SEQ ID NO: 7748 - protein, 420 aa, Brassica erucastrum
YHHHSYTFFFVILVLFPHAFSTNTLSSNEALTISSNRTLVSPGDVFELGFFKTTTRNSRDGTDRWYLGIWYKTTSDQRTYVWIANRDNPLLNSMGTLKISHANLVLFDQSATPVWSTNLTGAAHLPVTAELLANGNFVLRDSKTKDLDRFMWQSFDFPVDTLLPEMKLGWKHKILEREKILTSWKSPTDPSSGDYSFILETEGFLHEFYLYKNEFKVYRTGPWNGVRFNGIPKIQNWSYIDNSFIDNHEELAYSFQVNNNHNIHSRFRMSSTGYLQVITWTKTVPQRNMFWSFPEDTCDVYLVCGPYAYCDMHTTPRCNCIEGFVPKNAAQWELRDMSSGCVRSSKLTCGEGDGFLRLGKMKLPETTEAVVEKRIGLKECKEKCLRDCQCTGFANIDNMKGGSGCVTWTGELDDMRKYDA

SEQ ID NO: 7749 - protein, 168 aa, Oryza sativa
MAAAPSATSVHDFTVKDASGKDVNLSTYKGKVLLIVNVASQCGLTNSNYTELSQLYEKYKVQGFEILAFPCNQFGGQEPGSNEEIVQFACTRFKAEYPIFDKVDVNGNNAAPLYKYLKSNKGGLFGDSIKWNFSKFLVDKEGRVVDRYAPTTSPLSIEKDIKKLLGSS

SEQ ID NO: 7750 - protein, 460 aa, Sinorhizobium meliloti
MPVEILMPALSPTMEEGTLSKWLKNEGDKVSSGDVIAEIETDKATMEVEAVDKGTIGKLLIAAGTEGVKVNTPIAVLLQDGEAASDIDSMKTEAPKAETPKPAAAEAPAASAAPVAAQPKADVPSDPAIPAGTEMATMTVREALRDAMAEEMRANEDVFVMGEEVAEYQGAYKVTQGLLQEFGARRVVDTPITEHGFAGVGVGAAMTGLRPIVEFMTFNFAMQAIDQIINSAAKTLYMSGGQMGAPIVFRGPSGAAARVAAQHSQCYAAWYSHIPGLKVVMPYTAADAKGLLKAAIRDPNPVIFLENEILYGQSFEVPKLDDFVLPIGKARIHRTGKDATLVSFGIGMTYAIKAAAELEAQGIDVEIIDLRTIRPMDLPTVIESVKKTGRLVTVEEGYPQSSVGTEIATRVMQQAFDYLDAPILTIAGKDVPMPYAANLEKLALPNVAEVVDAVKAVCYK

SEQ ID NO: 7751 - protein, 302 aa, Xanthomonas campestris pv. campestris str. ATCC 33913
MLVFTHPACLGHDAGPEHPESPARLTAVVEALRDAFTDLDWREAPLAKLGDLCRVHEREQVDAVLETNFQGYHQLDVDTLMSPGSRAAALRAAGAGIAAVDAVMQDGAGTAFCAVRPPGHHATGQVSMGFCLFNNIAVAAAHARDRHGLERITVVDFDVHHGNGTQAIFERDPTVQYLSTHQSGLYPHSGSVHERGIGNIHNLLLPPGSDGLRFRNVWEDEMLPLIDAFRPQLVLISAGFDAHLRDPLADLMLDADDFAWLTGALRALATRHARGRVVSMLEGGYDLQALRESSVAHVGALR

SEQ ID NO: 7752 - protein, 130 aa, Oryza sativa
  unsure (1)..(130): unsure at all Xaa locations
XLLAATVNCXIFVIGYLVFRGANNQKHVFKKSPKALIWGKTPKLVGGKLLVSGYWGIARHCNYLGDILLALSFSLPCGTSSVIPYFYPTYLFILLIWRERRDEARCSEKYKEIWVEYCKLVPWRIFPYVY

SEQ ID NO: 7753 - protein, 92 aa, Saccharomyces cerevisiae
MSDENKSTPIVKASDITDKLKEDILTISKDALDKYQLERDIAGTVKKQLDVKYGNTWHVIVGKNFGSYVTHEKGHFVYFYIGPLAFLVFKTA

SEQ ID NO: 7754 - protein, 464 aa, Saccharomyces cerevisiae
MGQILSNPVIDKESHSGADSLTAFGLCAMQGWRMSMEDSHILEPNVLTKSDKDHIAFYGIFDGHGGAKVAEYCGNKIVEILQEQKSFHEGNLPRALIDTFINTDVKLLQDPVMKEDHSGCTATSILVSKSQNLLVCGNAGDSRTVLATDGNAKALSYDHKPTLASEKSRIVAADGFVEMDRVNGNLALSRAIGDFEFKSNPKLGPEEQIVTCVPDILEHSLDYDRDEFVILACDGIWDCLTSQDCVDLVHLGLREGKTLNEISSRIIDVCCAPTTEGTGIGCDNMSIVVVALLKEGEDVAQWSDRMKSKAHRTSVRSFADKRRRVFSYYDFSKCNDEQVFAITTKKPQDKFTRDHEAAVASVTAADNDDPMDIDDTDADTDAENLDPSSQSKSKTSGPIDLASLEALLGATGGVKTDSNGNKVTYTLPQSALAQLLQTMGHDPASSHPENDSNTDHKAGRSHLQ

SEQ ID NO: 7755 - protein, 457 aa, Novosphingobium aromaticivorans
MAKNWTADSWRGHEGRHLPTYPDAEKLNEVETTLTSFPPLVFAGEARALKADLAQVAAGKGFLLQGGDCAESFAEFHPNNIRDTFRVLLQMAVVLTFASKQPVVKVGRMAGQFAKPRSSPVEKIGDVELPSYLGDNINGIDFTPESRIPDPERMLRAYSQAAATLNLLRAFAGGGYANLRQVHQWTLDHIGKSPWAAKFSEMADKIGESLDFMEACGVDPSTVPQLQGTSFYTSHEALLLQYEEAMTRQDSLTGEWYDTSAHMLWIGDRTRFEGSAHVEYLRGVGNPIGMKCGPSLTPDALLRMLDTLNPGREAGRITLISRFGHDKVEAGLPPLVRAVTREGHPVVWSCDPMHGNVIKADNGYKTRPFDRILTEVKGFFAVHRAEGTHAGGIHIEMTGRDVTECTGGAVAITQEGLADRYHTHCDPRLNAAQSIELAFLMAEALNQERAERKAEAA

SEQ ID NO: 7756 - protein, 318 aa, Trichodesmium erythraeum IMS101
MTANYLEKWVEMGTLTWYPEIRNYTFDIASLLFMGSDESSQTKLVSLFEEWVKGLFSIPLSLPWTRFGKSLRCRQKLLQHIEEIILQRQQQQNLGEDALGILLQAQDKEVNGLSLDELKDQILLLLFAGHETLTSAIASFCLLTSQHLDVLTRLRQEQKQFSAIEPLTLENLKRMTYLDMVLKEVLRLIPPVGGGFRQVTQDCEFCGYSIPKGWLVQYQIAKTHQDETLYPDDKNFDPERFAPENAVDKQKVFGYVPFGGGMRECLGKEFARLEMKIFAVMLLRGYEWELLPEQDLSVVAAPTPYPRDGLKVKFRKVE

SEQ ID NO: 7757 - protein, 770 aa, Streptomyces thermoviolaceus
MTTAPWQDPALPATARVDDLLARMTLEEKTAQLYGVWVGASTDGDGVAPHQEQMNTDYDWDELITRGLGQLTRSFGTAPVDPAVGARALANAQRRIAEAGRFGIPAVAHEECLAGFTAWGATAYPVPLAWGATFDPQLVEAMAARIGRDMRSVGVHQGLAPVMDVVRDLRWGRVEETIGEDPYLVGTIGSAYVRGLESAGIVATLKHFAGYASSAGARNLAPVRAGVREFADITLPPFEMALREGGARSVMAAYTETDGVPASADPRLLTELLREQWGFTGTVVADYFAIDFLQTLHRVARSTAEAGRLALAAGIDVELPTVKAYGDELVAAVRSGEVPEELVDRAARRVLLQKCELGLLDADWTPEVPEGPVDLDSAENRAVARRLAEESVVLLANPDGVLPLPADGRIAVVGPRAADALAMLGCYSFPSHVGVQHPDVPMGIEIPTVLDALRAELPDAKVTFTEGCGVSDEDTSGFAEAVARAREADVCVAVLGDRSGLFGRGTSGEGCDVADLNLPGVQGALLDALVDSGTPVVLVLLTGRPYALGRWADRLAAVVQAFFPGEEGGPAVAGVLSGRVNPSGRLPVSVPRLPGGQPWTYLQPPLGLAGEVSSLDPTPLYPFGHGRSYTSFRWEDFEGSGDGRIGTDGSYELSLTVRNTGDRAGADVVQLYLHDPVASVTRPDVRLIGYQRVELEPGEARRVTFRFHTDLSAFTDLSGRRVVEPGELELRLAASAADVRHTARLTLTGEVRQVGHDRRLRCETELSTAD

SEQ ID NO: 7758 - protein, 266 aa, Gossypium barbadense
LSVEEIEVAPPQKNEVRVKIHFTSLCHTDVYFWEAKGQNPLFPRILGHEAEGVVESVGEGVIDVQPGDHVLPIFTGECKECPHCLSEASNMCDLLRINTERGGMLHDGHTRFSKDGKPIYHFLGTSTFSEYTVVHVGQVAKINPEAPLDKVCVLSCGMSTGFGATVNVAKPKKGGSVAIFGLGAVGLAAAEGARVCEASRIIGIDLNPNRFEEAKKFGCTEFVNPKDHNKPVQEVIAEMTGGGVDCSIECTGSTQAMVSAFECVHD

SEQ ID NO: 7759 - protein, 758 aa, Rhodopseudomonas palustris
MTEGSVARQPDLSTCDDEPIHIPGAIQPHGLLLALAADMTIVAGSDNLPELTGLAIGALIGRSAADVFDSETHNRLTIALAEPGAAVGAPIAVGFTMRKDAGFVGSWHRHDQLVFLELEPPQRDVAEPQAFFRRTNSAIRRLQAAETLESACAAAAQEVREITGFDRVMIYRFASDFSGEVIAEDRCAEVESYLGLHFPASDIPAQARRLYTINPVRIIPDINYRPVPVTPDLNPVTGRPIDLSFAILRSVSPVHLEYMRNIGMHGTMSISILRGERLWGLIACHHRKPNYVDLDGRQACELVAQVLAWQIGVMEEQAITRQTLKGQAIQRSLINDIEQLHDHRAGLARNSEALLELMGASGLCLHSREGVITIGQTPPGPIIDQLAQLAGRSGGSELFQTDRLSTIIPEAGAFAEVASGVLAVPLSRTPPRRVMLWFRPEVAQTVYWAGNPDKSVTAESGRLRPRTSFAAWTEQTHGRAIAWQPHEVAAAVEIRDLIIDVILRNTEKLERINTQLARSNEELESFAHVASHDIKEPLRHIEAFAGLLADNIREMGDERLGVMVSGIEKSSRRLRNLINDLAEFSQLGRRSKPLSWVSLETVLNEVLADLQPRITEARAEIQADRLPFARCDHNQIRQVLQNLIANSLKYRDPARPCRIRIFAQPDDNGGRAEIGSAPAIRICVTDNGIGFDKKYIDQVFEPFQRLHGPDDYEGSGIGLAICRKIVQRHGGRVGVDTVPGQGSTFWFTLPVSDDHGQG

SEQ ID NO: 7760 - protein, 411 aa, Oryza sativa; identical to SEQ ID NO: 6317

SEQ ID NO: 7761 - protein, 101 aa, Zea mays
  unsure (1)..(101): unsure at all Xaa locations
MAGLTNMPMRPARSDPPMPHRCPPSMARLRPKPMDRKKTCTLLLRVLTGVAGHHQIXQFSVRGKEPKDEAQIYTWNDATLRELTDLAKKVALPTRKRNARL

SEQ ID NO: 7762 - protein, 1832 aa, Podospora anserina
MYNPPGQRDATRPFHVPPPPPPMSPPPPTVGINNPMMTIPPPPPRHPNAPSTTGNVLLPPPPSGPPPNSGFPNSAIAPPSALGSTAPWHGAWGRAYDGRTAFNIPPPPPGGGAGGGGGGGSGGVLRAYDPKYHAQVLAAANNGATYTVPPPPPPQQQQQQQQQQQQQQQQQQQQQQQQQQQQQQQQQQQQQQQQQQQQQQQQQQQQQQQQQQQQSDQMGALTSATYIPQGDTYGEGVGIPGLGLEDSAIGWNMGAHLESATATPLDESSGRDRLYANAMAQRGSSTTSNATVSSVSVPPELAAQWPMEKVLGWLQANSFSSHWQETFKYLGLDGARFLELGSSHGGRGNFGMMHQQVYPRLLALSGPEWNQAREREEGKRMRRLVRSIVTGRPVEVKGGRLGGGQQQPQHARQNSTSAPPAVTGGQTGNRSAESPNVSVDDGFWDTGVTDADDGDKQTPNPIKIPEFGFSRRFSQSRATTMPTLSSTMPTDHRNMMKEIDTSRRHSPTLSESGEAGGTFRGGSTPLGGGGGGGGGGGRDSPSAGSPNPASGLFPSSTAGNLSASPHSSRFGHRSRNSTDSVSSSAAIYGSGVPADAAAMLKSGMNIADVVNAARNANDRRHAQDGGRPSPQESGGGDRSAGEPPGSAKGSGSFLSIFTRKKHGRKDDGFGGDEDSPTSPGLSFKPQSLGDNRPGSSAGTYGHHHAGNVRANRGGPRVFILATADCWNYRMLDVTDIETASDLRQLICINLGLPESEGAHLYPTELGKFEHDGEALDDSKLLAIKTQRADAIGTLKLFVRVGGPPQMRQTGAQIAMDEETYVKLNGRMRSSSSPPTSRQNTLTGKEGEDKMLTAEAIEYRTEQLRKQKEYLAKRKQVAENNHVADRSPSSSIVGRTVDFDQPRHSPFEDRKMDTLLPQRKPPAPPSDPSATLIKANSLKKTGHGLRLSGDSGYHPKRKTSSDLRSSGDVVFEKQKRWGPVADPSAGIGALLVGMSDGMASIARPRPGGGMMQQRQPSPHRVATEPITSQELQRGKKAMSTVNFGPAHQRERSGSGGGSPRPGGMPGSPGSYTWSSKNVPFLVPDYSPNGTPAPPTASRMPDGGGNSGDGCLDQNHNHQAQNGTIAKMRNVARAPSPGNVSPSSRRRPSDSFSSQAAVAKKRKSHGPDTDFTDNDVTFSASSTRASKKVDDSDSDDDSDDGLFAIPIAARNSGPDKGKTTAPAEGNSGDSDGASGTGTGKRPSLRLNTRSGSNSRAKKTLSVAFAVSPQSSSAGGKTPLEDDDSGRSSSQRRGTPGTPQSEGGWDSEEKDSKISRRKSFIEKDVWANRPPTDALVNNLEDFFPDLDVDQPVLEEGVDQEPPSPIAEGDENNQGSASVPPLPPLPPGLSTGKLHTFYNDNDTLGSDESTLKALESRPVSMQSLAHRSIRRSGGGGGLGRMKSIREVARGANEFGKRYTQGPGQIDAQSSAAAAGNRNTNLMRRKSTKMFNANIVQIQPDRGSLNLAMGGLTTIPQDSLPTRSTNSRESIPKRQTTFRWFKGQLIGKGTFGRVYLGMNATTGEFLAVKEVEVNPKAAQGDKKKMQELVAALDQEIDTMQHLDHVNIVQYLGCERKETSISIFLEYISGGSIGSCLRKHGKFEEPVVASLTRQTLSGLAYLHREGILHRDLKADNILLDLDGTCKISDFGISKKTDNIYGNDKTNSMQGSVFWMAPEVIRSQGEGYSAKVDIWSLGCVVLEMFAGRRPWSKEEAVGAIYKIANGETPPIPEDIREVISPVAIAFMLDCFTVVSSERPTADVLLSQHPFCELDPTYSFLDTELYAKIAGRVNDLGRGQ

SEQ ID NO: 7763 - protein, 343 aa, Bradyrhizobium japonicum USDA 110
MRAVVIHAPKDLRIDSYPDPAPGPGEVRVKIANGGICGSDLHYYHHGGFGVVRIQQPMALGHEIAGVVAAVGDGVTSVKPGTRVAVNPSKPCGKCLHCQEGMRNQCLDMRFLGSAMRFPHVQGGFREFLTIDATQAVPIADELSLAEAAVAEPLAVCLHAGKQAGPLLGKRVLITGCGPIGALMILVSRFGGASEIVVTDVADAPLAVARKLGATHAINVATHATALDPWRAGKGVFDTLFEASGNQAALRTALDVLRPGATLVQLGLGGEMTLPINSIVAKELQLRGTFRFDPEFELAVRLMGEGLIDVKPLITATMPFENAVAAFELASDRSQSMKVQLSF

SEQ ID NO: 7764 - protein, 385 aa, Geobacillus stearothermophilus
MSALFPTYNRWNIAVQSAEGTVVTDVNGKQYLDFVSGIAVCNLGHRHPHVQKSIEQQLNQYWHVSNLFTIPIQEEVASLLVAHSAGDYVFFCNSGAEANEAALKLARKHTGRHKVITFRQSFHGRTFATMAATGQEKVHSGFGPLLPEFIHLPLNDVDALKQAMSEEVAAVMLEVVQGEGGVRPVDPAFLQTASELCQQHGALLIIDEVQTGIGRTGKPFAYQHFDVEPDIITAAKGLGSGIPVGAMIGKAFLKESFGPGVHGSTFGGNPIAMAAAKATLEVVFDPAFLQDVQEKGRYFLARLHDALASLDIVKDVRGLGLLVGIECQTDVAPLLPLIHENGLLVLSAGPNVIRLLPLVVTKAEIDEAVDILTNVLNNANASAVL

SEQ ID NO: 7765 - protein, 156 aa, Pinus sylvestris
MAGLKAVAVPSGSENVKGVLHFTQEGNEATKVFGRITGLKPGLHGFHVHSMGDTTNGCLSTGPHYNPWKKDHGAPEDENRHAGDLGNIIAGEDGVAELSIQDWKIPLKGPHSIVGRAVVVHADRDDLGRGGHELSKTTGNAGGRVACGVIGLQSAV

SEQ ID NO: 7766 - protein, 186 aa, Triticum aestivum
  unsure (1)..(186): unsure at all Xaa locations
LWCLLPGTGAAPAAAPAGAGPAEGGGRTKTVVLVGVDDSDHSYRXALEWAVRHVAETAGAGPPVELVVVHGQAARVPSVVTFGSXAAAGDVVRVVDADLRKRAEDVVDRARRLCVANSVHGLIEVMEGEARYVLCDAVDKHHADLLVVGSHGYGAIKRAFLGSVSDYCAHHAHCSVMIVKQPKSKK

SEQ ID NO: 7767 - protein, 287 aa, Oryza sativa
EFGTREKEQTEVAVEESFPFRETAPPDEPLVTAEESWVVKLEQSVNIFLTESVITILDGLYRDRNYARFFVLETIARVPYFAFISVLHMYETFGWWRRADYIKVHFAESWNEFHHLLIMEELGGNSLWVDRFLARFAAFFYYFMTVAMYMVSPRMAYHFSECVERHAYSTYDKFIKLHEDELKKLPAPEAALNYYLNEDLYLFDEFQTARVPCSRRPKIDNLYDVFVNIRDDEAEHCKTMKACQTHGNLRSPHSMQKCLETDTECVIPEDDCEGIVDCVKKSLVSKE

SEQ ID NO: 7768 - protein, 354 aa, Oryza sativa
MAAAGAGASGPAAETAAATFRRVYGTLKAELLKDPSFDFNDDAIQWLESMLDYNVLGGKLNRGLAVVESYKILKGATEPSEEELFLACILGWGIEWLQAYFLVLDDIMDNSQTRRGKPCWFRLPKVGLIAINDGLVLRSQISRIFRRYFRGKSYYVDLLDLFNEVEIQTTSGQLLEPITTNEGRKDLNKYNVHVYRRIVEYKTAYYSFYLPVACALLLFGESLDNYAQVKHILVEMGVYFQSQDDYLDCFGEPEIIGKIGSDIEDFKCSWLFVQALERADEKQKGVLFENYGKSDPACVAKVKDLYNELHLQRVFSEYERESYEKLISAIEAQPNEAVRAVLKSFLHKIYKRSK

SEQ ID NO: 7769 - protein, 173 aa, Sulfolobus solfataricus
MDSKKVLFLVGEEFEDIELLYPFYRVMEEGFKPVIAWKEANSKVIGKHGYTVISDIAFKDVRPEDYIALVIPGGRGPEHIRTLEEVKNITRKFFELKKPVAAICHGPQILISANLVKGRKLTSVNSIKDDVIAAGGIYVDNDVVVDENLISSRVPSDLPAFASTLIKALKSIK

SEQ ID NO: 7770 - protein, 850 aa, Agrobacterium tumefaciens str. C58 (Cereon)
MASTDYHVDLTNCDREPIHIPGYIQPHGCLIACDNAMRMVLRHSENCGELLGLEGDLNGRTAEDVLGKKLVHDLRNALTVTGRTTRPAMLPAMETSDGRSFDISLHRYKSTTIIEFEPSGSDAQPLGTARKMVDRIREADSVESLISRTTRLVKATLGYDRVMIYRFQEDGAGKVVSEAKQPELESFLGQYFPASDIPQQARALYLKNTLRIISDASGTRIPVLPAVDVSGEPLDLSYAHLRSVSPIHCEYLRNMGVAASMSISVIVDGALWGLIACHHYSPRVLSMPVRIAAEMFGEFFSMHLQVLKQKRRLDTINHAHAALDRFLRLAAHHANIEELLVDSFQDFADLMPCDGVGLWVGNNWHGHGATPPHDAIPRLARFVASASEGRVWATHALSQAIPEAEIYAGTAAGMLAIPLSQVKSDYLLFFRKEIVQNLNWAGNPEKSYETGPMGDRLTPRKSFAIWKETVRLQAQPWSEADREIAEAARIALVEVAFHHSELMAGERERAEVRQRMLNEELNHRVKNVLAIIKSLVGNPSQEGKTLQEYVTALKGRIQALSFAHDQIIRGEGGGALRDLLEAELSPHRSPETTVKLEGPQITLDSRAFSVMALVLHELATNAAKYGALSQNGGQLHVRWDVNENRDCEISWRETLLTTLPAPSRAGFGTALISRSIPYDLGGRSTIRYLPNGLEAEILLPFRHVSSVSAAFETKTEAETLPQPRRYNREEPLKVLLVEDQMLIAMDVENMLEDNGIKAIETATSSAMAIEKLKTYLPDVAILDINLGSDTSIPVARELHRRGIPFLFATGYADGSMVPDEFGAVPVIRKPYDEDALMAGIGVLVGDTERV

SEQ ID NO: 7771 - protein, 143 aa, Zea mays; identical to SEQ ID NO: 2031

SEQ ID NO: 7772 - protein, 320 aa, Arabidopsis thaliana
  unsure (1)..(320): unsure at all Xaa locations
MRDLVSCFSENSINVTHPLSISSSSSSCSKYSTNNVCISPSLIPSIQTSITSIYRITLSKHLIIKVTWCNPHNNNGLSISVASADQNPSTTLKLNTSSRFFRKKKGNKSVDSDLGKIEVFWDLSSAKYDSNLCGPGTINGFYVIVLVDGSMGLLLGDSSEETLRKKGFSGDIGFDFSLXSRQEHFTGNNTFYSTKVRFVETGDSHEIVIRCNKETEGLKQSNHYPVLSVCIDKKTVIKVKRLQWNFRGNQTIFLDGLLVDLMWDVHDWFFSNQGACGRAVFMFRTRNGLDSSRLWLEEKIVKKDQQDKLDFSLFIYARKT

SEQ ID NO: 7773 - protein, 313 aa, Zea mays
MMSGSSPPPPSLPAGSGGFFRGYTKLCKGLAVILLIVHLVVQLFPSAVTYLALIPGRTIPFAWNLITAGYVEQTIPGMVVSIIGLLLFGKLLEPLWGSKELSKFIFIVNLSTSACVFMTAIVLYYITQQEIYLYTPFSGFYGVLSGLLVGIKQLLPDQELNLFVLKIKAKWIPSLVALISILGSIFIYDFMSYLPVLLFGMYMSWIYLRYFQKRLETSLKGDPSEEFSFSSFFPEFVRPFLDPIASVFHRLLCGRSDARGETLDTSPLPGSDSFEANRRRERGQRALEQRLAEKLAAVRSSEGGTSLDAADKV

SEQ ID NO: 7774 - protein, 182 aa, Triticum aestivum
MAGVGRNMVAPLLVLNLIMYIIVIGFASWNLNHFINGLTNRPGVGGNGATFYFLVFAILAGVVGAASKLAGVHHVRTWRGDSLATSASSALVAWAITALAFGLACKEIHIGGYRGWRLRVLEAFVIILMFTQLLYVLALHSGLFGNQFGNHAGAGGYGAEHGAYGAGDPHNKGMGTGGVARV

SEQ ID NO: 7775 - protein, 453 aa, Neurospora crassa
MSNICQLFMYSPRSTSPLPQTESKPRQVWTPEEDRLLAEAVTKGKKSSMDPKTPVSGSINWCKVASHLSRRNNKDCRKRWHYNVAHNIRKGTWTREEDQRLRKAFDSHGPRWSKVAQVVGSRNGDQCWKRWYDCLDPKIDRSPWTPEEDILLLQTVSQRGRNWTEIVNTHFPNRTSLAAKNRYSILRRRQKSASSSAPSPSSSRSRSSTPDIIRPRTKKTTITTTTTTTTTTTTTATTTKAIPSPMSMTSKPGYLSPTPPTSSQHTPELGQCFTRSPLSLSDTESTSTQGSGLGFLLPPSTLSTGTSSFPTMTTTTTTADASGFELFSFENNNGYKFSEDYAWGSCAPADLMAHVSAGPMSMGYASTSTSSPSPSPSSSWSSFSSSSPSPQSLSLNGIYMPVVNQGLVFNFPNVPATQQAQQQQQFEFIVQTPTPGGTGPPVEYASWCDNSRL

SEQ ID NO: 7776 - protein, 505 aa, Zea mays
  unsure (1)..(505): unsure at all Xaa locations
MPSGGGGNGGGISSSSRVMPNLPAGFRFHPTDEELMVHYLMRQAASLPCPVPIIAEVNIYQCNPWDLPAKALFGDKEWFFFSPRDRKYPNGARPNRAVGSGYWXKATGTDKAILFASSTPTSHGGANIVVGVKKALVFYGGRPPKGTKTDWIMHEYRLSGAADDDCKGSTRRRVSSSSSSSMRLDDWVLCRIHKKSNDFQLSSSSEHEHEQEEPAAGGSATTVEELDALVVVDNSSSSDTTTTTITTNDNNSTETAATHHDPQTMMMLSKSCSLTDLLDSIDYAALSSQMLLLDAPHPHADDPPPHMVYYPPAASATHQQAIIANNTNGNDDYYDDDNLLPTAAAPTAVDAAAALLSSSPADTNGVNKRKRVTAVDYGAAEPPTFFHHHLDDAAGNSFSTKKLKLPPPPSDSRHGGHFETATATSYRDSQQQLVHSPSSSNSNSSGGFFHQYGYGVRVQQQQPVLELEPAAAAATQQPHFGMPVERSREREMIYHWEGSGSTRAD

SEQ ID NO: 7777 - protein, 214 aa, Paeonia officinalis
  unsure (1)..(214): unsure at all Xaa locations
IVESVGEGVTDLKPGDHVLPVFTGECKECRHCKSEESNMCDLLRINTDRGVMLNDGKSRFSINGQPIFHFVGTSTFSEYTVVHVGCVAKINPEAPLDKVCVLSCGISTGLGATLNVAKPKKGSSVAIFGLGAVGLAAAEGPRIAXASRIIGVDLNPKXFEEAKKFGVTEFVNPKDYNKPVQEVIAEMTDGGVDRSVECTGSIMAMISAFECVHD

SEQ ID NO: 7778 - protein, 339 aa, Oenococcus oeni MCW
MKAAVYEGKKAIKMTELPTPKAGPNDVVIQNIYAGICGSDVAVYNHGSGTGHKIETDHEFGHEAVSKVVEVGDDVHDFKIGDRVYPYPLLARGDPSRAGSMGGFSEYILIPNAKLNRQLYLVPKEIDNHVAAMIEPFTVGTRAAKQTRPDKNDNAIVYGTGTIGMAAAVALKHLGVKQVMLVDLSDYRLNVAKELGFLTVNSSRDDVRSQAIEAFGKAEYSLHGEAPDTQIFLDAAGHNSILEDFLQFGPVGSRFVTVGVNNSKPQIDFLELIFGSKSVGGSGGYRPEDVQTVFEIMKERQSDLRKMVSQEFDWQDLEKGIQTATDTTISEKVLINYHL

SEQ ID NO: 7779 - protein, 415 aa, Hypecoum imberbe
SGKPFYAIVHRVTGSLIVDFEPVKPYEVPMTAAGALQSYKLAAKAIAKLQSLPSGSMERLCNTVVQEVFELTGYDRVMAYYFHEDDHGEVIAEVTKPGLEPYLGLHYPATYIPQAARFLFMKNRIRMICDCRAKHVKVLQDEKLPADLTLCGSTLRAPHTCHLQYMENMGSIASLVMAVVVNESNDEEESSEPPSQAPKKKKLWGLVVCHNTSPRFVPFPLRYACEFLIQVFAVHVNKEFELDNQIHEKRILRTQTLLCDMLMRDAPFGIISQSPNVMDLVKCDGAALLYKNKIYRLGLTPSEFQINDIASWLTEYHMDSTGLSTDSLYDAGFPGALSLGDAVCGMAAVRITCKDMLFWFRSHTAAEVRWGGAKHDPDERDDGRKMHPRSSFKAFLEVVKTRSLPWKDYEMDAIH

SEQ ID NO: 7780 - protein, 149 aa, Oryza sativa
  unsure (1)..(149): unsure at all Xaa locations
XSILLAGILCIYINYDCDRQRQEFRRTNGKCSIWGKAPSKIVASYQTTNGETKSSLLLTSGWWGLSRHFHYVPEILSAFFWTVPALYDHFLPHFYVIFLLLLLFARAKRDDARCSSKYGKYWKMYCNGGAGDRPPLPRSRPRRRPERLE

SEQ ID NO: 7781 - protein, 99 aa, Glycine max
RPPPHPLLQSKNRARVLGGDREADGGSMDNPEMQRFIQKEQQKAMMNEMVGKLTSACWDKCITSAPGSKFSSGESTCLTNCAQRFLDLSVLIAKRFEMQ

SEQ ID NO: 7782 - protein, 363 aa, Bacillus halodurans
MEKQIAVLPGDGIGPEVTDAAIEVLQAVADRFGHTFSYKKALLGGCAIDEVGTPLPEETLDVCRHADGILLGAVGGPKWDTLPGHLRPEKGLLGLRKGLNLFANLRPVTVYDSLADASTLKNDVIDGVDLLIVRELTGGLYFGEPRERRGEGETEEVVDTLLYTRGEMRRIIRKAFELAMVRNKHVTSVDKANVLESSRMWREVANEVAQEFPEVTLEHMLVDNAAMQLIRRPKQFDVLVTENLFGDILSDEASMVTGSLGMLPSASLTSDGPGLYEPIHGSAPDIAGKGVANPLATIASCAMMLKYSFGLHEEAKTIEDAIEAVLKQGYRTADIAKPGEESSSTKAITDAVVEAIQASVDIS

SEQ ID NO: 7783 - protein, 272 aa, Oryza sativa; identical to SEQ ID NO: 2350

SEQ ID NO: 7784 - protein, 458 aa, Streptococcus agalactiae 2603V/R
MENHRYEDEGKFQRKMTSRHLFMLSLGGVIGTGLFLSSGYTIAQAGPLGAVLSYLIGAVVVYLVMLSLGELAVAMPVTGSFHTYATKFISPGTGFTVAWLYWICWTVALGTEFLGAAMLMQRWFPNVPAWAFASFFALVIFGLNALSVRFFAEAESFFSSIKVIAIIIFIILGLGAMFGLVSFEGQHKAILFTHLTANGAFPNGIVAVVSVMLAVNYAFSGTELIGIAAGETDNPKEAVPRAIKTTIGRLVVFFVLTIVVLASLLPMKEAGVSTAPFVDVFDKMGIPFTADIMNFVILTAILSAGNSGLYASSRMLWSLANEGMLSKSVVKINKHGVPMRALLLSMAGAVLSLFSSIYAADTVYLALVSIAGFAVVVVWLAIPVAQINFRKEFLKENQLEDLSYKTPFTPVLPYITIILLLISIVGIAWDSSQRAGLYFGVPFIIFCYIYHKLRYKKW

SEQ ID NO: 7785 - protein, 326 aa, Triticum aestivum
  unsure (1)..(326): unsure at all Xaa locations
LRPQRAPDPPFSSRCCPPAHPHVLPSAGGSFSRGSTKLCKGLALRLLLARLLVQPFPSAVNYLALIPARTIPFAWNLMTAGYVEQTIPRVIISIIGLLLFGKLLEPLWGTKELSKFVFMVNFSTSMCVFVTAMAEYYVTQQESYLYTPISGFXGLLSALFVVIKQLMPEMELNLFVLKIKGKWIPSLIALISVXVSFFMKDLVSYLPVILFGIYMSWIYLRYFQKRLETGLKGDPSEEFSFSSFFPAILRPVLDPIATIFHRLLCGRSDRADRGQTLETSSLPGSDSTEANRRRERGQRALEQRLAEKLAAVKSTESTSLDASDKV

SEQ ID NO: 7786 - protein, 302 aa, Oryza sativa (japonica cultivar-group)
MQGGGFFRGYTKLCKGLAVILLLVHLLIQLFPSAVTYLALVPGRTIPFAWNLITGGYVELTIPGVIISIVGLLLFGKLLEPLWGSKELSKFIFVVNFSTSLCVFITAIALYYTTQEESYLYAPLSGFYGVLTGLLVGIKQLMSEQELNLFVLKIKAKWIPSLVALISVIVSFFVKELVSYLPVILFGIYMSWIYLRYFQRRLETGLKGDPSEEFSFSSFFPEFLRPVLDPIASIFHRLLCGRSERADARGQTLDTTPLPGSDSIEANRRRERGQRALEQRLAEKLAAVKSSEGTSQDASDKV

SEQ ID NO: 7787 - protein, 225 aa, Zea mays
MAMVLRMVLGKIPVETPKHEVLHTGAGYEIRKYPPSIAAELTYDPKEMRGDPDGGFTVLANYIGVLGKPQNTKPEKIAMTAPVITTGSGSGGDGEKIAMTAPVITTGGGEPEPIAMTAPVITDDQQAPGKVTMQFLLPSKYTRVEEAPRPTDERVVIREVPERKFGVARFSGVATDRTVREKAKGLKAALEKDGYTIKGPFVLARYNPSFTLPPLRTNEVMFPVE

SEQ ID NO: 7788 - protein, 145 aa, Zea mays
TVRIKEVMSYLPIILFGIYMSWIYLRYFQRRLEVGLKGDPSDEFSFSSFFPGFLRPILDPIASVFHKLFCGRPARPEGTGQTLDGSQFPGSGSTEANRRRERGQKALEQRLAEKLAAVRKAEGTPPPKQQQEEEEDAENDASDKV

SEQ ID NO: 7789 - protein, 363 aa, Aspergillus niger
MPAYNIVVFAGDHWGPEVTAEAIKVLRVIEKSRDDITLNLQDHLLGGASIDATANPLTDEALAAAKNADAVLLGAIGGPKWGTGAVRPEQGLLNVRKEMGTFGNLRPCNFAAPSLVEHSPLKASVCEGVDFNIIRELTGGIYFGDRKKMTAAATMDTEPYSRAEIERITPRAHLALQHNPPLPVWSLDKANVLATSRLWRKTVTEIMAKEFPQLKIEHQLIDSAAMIMVKNPRQLNGIIVTSNLFGDIISDEASVIPGSLGLLPSASLSGIPDGKGRVNGIYEPIHGSAPDIAGKGIVNPVAAILSVAMMMQYSFGRFDEARAIEAAVRNVLESGVRTGDIGGKATTSEVGDAVAAELEKLLK

SEQ ID NO: 7790 - protein, 875 aa, Neurospora crassa
MKFAIPLALLASGNLALAAPEPIHPSHQQLNKRSLAYSEPHYPSPWMDPKAIGWEEAYEKAKAFVSQLTLLEKVNLTTGIGWGAEQCVGQTGAIPRLGLKSMCMQDAPLAIRGTDYNSVFPAGVTTAATFDRGLMYKRGYALGQEAKGKGVTVLLGPVAGPLGRAPEGGRNWEGFSTDPVLTGIAMAETIKGTQDAGVVACAKHFIGNEQEHFRQVGESQDYGYNISETLSSNIDDKTMHEMYLWPFVDAIRAGVGSFMCAYTQANNSYSCQNSKLLNNLLKQENGFQGFVMSDWQAHHSGVASAAAGLDMSMPGDTMFNSGRSYWGTNLTLAVLNGTVPQWRIDDMAMRIMAAFFKVGQTVEDQEPINFSFWTLDTYGPLHWAARKDYQQINWHVNVQGDHGSLIREIAARGTVLLKNTGSLPLKKPKFLAVIGEDAGPNPLGPNGCADNRCNNGTLGIGWGSGTGNFPYLVTPDQALQARAVQDGSRYESVLRNHAPTEIKALVSQQDATAIVFVNANSGEGFIEIDGNKGDRLNLTLWNEGDALVKNVSSWCNNTIVVLHTPGPVLLTEWYDNPNITAILWAGMPGQESGNSITDVLYGRVNPSGRTPFTWGATRESYGTDVLYEPNNGNEAPQLDYTEGVFIDYRHFDKANASVLYEFGFGLSYTTFEYSNLKIEKHQVGEYTPTTGQTEAAPTFGNFSESVEDYVFPAAEFPYVYQFIYPYLNSTDMSASSGDAQYGQTAEEFLPPKANDGSAQPLLRSSGLHHPGGNPALYDIMYTVTADITNTGKVAGDEVPQLYVSLGGPEDPKVVLRGFDRLRVEPGEKVQFKAVLTRRDVSSWDTVKQDWVITEYAKKVYVGPSSRKLDLEEVLP

SEQ ID NO: 7791 - protein, 149 aa, Lotus japonicus
MGSIAVKLFLILGLLATSCVAQAPGAAPTQAPTTTPPPPPAAAPAPPPATPPPAATPAPTTTPPAATPAPSASPPAPTPTASPTGAPTPSASSPPAPIPSGPASGPGPAAGPGPNSADTPPPPSAAFSLNQPIIAGTALVATFFAMVLA

SEQ ID NO: 7792 - protein, 197 aa, Gossypium populifolium
  unsure (1)..(197): unsure at all Xaa locations
IVESVGEGVTHLKPGDHVLPVFTGECGNCRHCKSKESNMCDXLRINTDRGVMLSDGKTRFSINGKPIYHFVGTSTFSEYTVAHVGSVAKINPAAPLDKVCILSCGISTGLGATLNVAKPAKGSTVAIFGLGAVGLAAAEGARIAGASRIIGVDLNPNRFEEAKKFGCTEFVNPKDHNKPVQEVLAEMTNGGVDRSVE

SEQ ID NO: 7793 - protein, 327 aa, Oryza sativa
MGFKGFVEGGIASIVAGCSTHPLDLIKVRMQLQGEASAAAAAVAPAQAALRPALAFHAGQAVAIPHDVIAPPRKPGPIAVGAQILRAEGAAGLFSGVSATMLRQTLYSTTRMGLYDILKKKWTQENGGVLPLHRKIAAGLIAGGVGAAVGNPADVAMVRMQADGRLPLAERRNYRSVGDAIGRMARDEGVRSLWRGSSLTVNRAMIVTASQLATYDQAKEAILARRGPGADGLGTHVVASFAAGLVAAAASNPVDVVKTRVMNMKVAPGAPPPYSGAIDCALKTVRSEGVMALYKGFIPTVSRQGPFTVVLFVTLEQVRKVFNGVEF

SEQ ID NO: 7794 - protein, 532 aa, Daucus carota
MGGCFSKKEYQADGNGYRSAPTAYHTVTDQSYEKSSQRSQPQAQPQPQVQQTGPSLKPRQVHRPESNTILGKPFEDIRGKYTLGKELGRGQFGCVYQCTENSSGQLYACKSILKRKLVSKNDKEDIKREIQILQHLSGQPNIVEFKGVFEDRQSVHLVMELCAGGELFDRIIAQGHYSERAAATICRQIVNVVHVCHFMGVMHRDLKPENFLLSSKDKDAMLKATDFGLSVFIEEGKVYRNIVGSAYYVAPEVLRRSYGKEIDIWSAGVILYILLSGVPPFWAENEKGIFDAILEGVIDFESEPWPSVSNSAKDLVRKMLTQDPRRRITSAQVLDHPWMREGGEASDKPIDSAVLSRMKQFRAMNKLKQLALKVIAESLSEEEIKGLKSMFANMDTDKSGTITYEELKSGLARLGSKLSEVEVQQLMDAADVDGNGTIDYLEFITATMHRHKLESYEHQAFQYFDKDNSGFITKDELESAMKEYGMGDEATIKDIISEVDSDNDGRINYDEFCAMMRRARNRRKLFSVSLTS

SEQ ID NO: 7795 - protein, 522 aa, Streptomyces maritimus
MTTDLFNLSTLVDQHLDSGLSDKAALYSPHGHVSYGELYRSMCAMGRALRELGIQREQRVLLILDDTPAFFTAFLGAGRIGAVPVPINYQTDPEQVRFYAQDSYARAAVIEAVRYEELAPALQEAGVMVISTEPAGPDDGRLHMRDLIRGHEGELGAASTHAEDPALWLYSSGSTGRPKGVVHLQRDIAPACRHYAGDVLGVTQDDVHLSTTKLFHAYGLGNSLLFPLWFGGTCVLLPGFPAPHLVLETIERVRPTLLFSVPALYNAMPRSPGAGSRDLSSIRLCVSAAESLPAHVWERWRDLYGLTILDGVGSTEMLHIYCSNTERALRPGSSGRAVPGYQIKLVDPDGGDVEGAGSGEMFVRGGSMLAQYWHRADQTRSVLKGSWYRTGDRYRRDEDGFYWYEGRADDMMKVSGLWVAPAAIETALQQHPDVAEAAVVGVDTDRLTRIKAFIVLRDGCQGSDALARQLRQWCKDRLASHQFPHLVEFAADLPKTPTGKIQRFALRSQETVKADAPAAHAV

SEQ ID NO: 7796 - protein, 166 aa, Triticum aestivum
MAETEYRCFVGGLAWATDDNNLQQAFSQYGEILDAKIINDRETGRSRGFGFVTFGSEESMRQAIEEMNGKELDGRNITVNEAQSRRSGGGGGGGGYGGQRGGGGGYGGGGGGYGGQGGGGYGQGGGGGYGQGGGGYGGQRGGGGYGGGGGGYGGQRGGDSGGQWRN

SEQ ID NO: 7797 - protein, 393 aa, Ralstonia solanacearum
MMRITVLGATGSIGDSTLDVVRRHPDRYRVFALTANTQVDKLAALCRVFRPAMAVVGSATAAEVLRDQLGAEATGIDIRFGPEALEEAAAHPDCDAVMAAIVGAAGLRPTLAAVRAGKRVLLANKEALVMSGALFMDAVRQHGATVLPIDSEHNAIFQCLPQQRPSFGHGVARIVLTASGGPFRTRAVETLAEVTPDQACAHPNWVMGRKISVDSATMMNKGLEVIEAHWLFNVPVERLEVLIHPQSVIHSMVAYDDGSVLAQLGNPDMRTPIAYGLAYPERIEAGVPLLDLAATGTLAFEAPDLHRFPCLALAFDALRAGGTAPAVLNAANEVAVEAFLQRRIRFTEIAAVVGDTLARTAIGPADSLDTVFAADAQARRRAEHYIAASCLQS

SEQ ID NO: 7798 - protein, 498 aa, Mentha x piperita
MELLQLWSALIILVVTYTISLLINQWRKPKPQGKFPPGPPKLPLIGHLHLLWGKLPQHALASVAKEYGPVAHVQLGEVFSVVLSSREATKEAMKLVDPACANRFESIGTRIMWYDNEDIIFSPYSEHWRQMRKICVSELLSSRNVRSFGFIRQDEVSRLLRHLRSSAGAAVDMTERIETLTCSIICRAAFGSVIRDNAELVGLVKDALSMASGFELADMFPSSKLLNLLCWNKSKLWRMRRRVDTILEAIVDEHKFKKSGEFGGEDIIDVLFRMQKDTQIKVPITTNSIKAFIFDTFSAGTETSSTTTLWVLAELMRNPAVMAKAQAEVRAALKEKTNWDVDDVQELKYMKSVVKETMRMHPPIPLIPRSCREECVVNGYTIPNKARIMINVWSMGRNPLYWEKPDTFWPERFDQVSKDFMGNDFEFVPFGAGRRICPGLNFGLANVEVPLAQLLYHFDWKLAEGMKPSDMDMSEAEGLTGILKNNLLLVPTPYDPSS

SEQ ID NO: 7799 - protein, 441 aa, Desulfitobacterium hafniense
MKQTGLLFFPAFDWSLGDTHPEREERLLYTQEQLFEEGVMDLPQIKHYAPGLASLKDVQRTQGIFPAPESHDLDAHLIAAGSSLVLGEAWAKKEIHNGFALVRPPGHHSGATVLGNRGFCTLNNEAILINHLRTFHGIKKVAIVDTDVHHGDGTQDIFYHDPNVLFVSIHQDGRTLYPGSGFIYEKGGPNAWETTLDIPLPPGTGDEDLHHVLENWVLPRIYDFQPDLIINSAGQDNHFTDPLASMSVTARGYGRITELLNPDLAVLEGGYSIEGALPYVNLAIVLALAGEDYQGVIEPQKPRHPHSGSNAFRGFLKELKEQYRRAKPDWNIRADSFLPEGKWVYIPHSVYYDTEGFQEGRKDWIRQCNHCGGTVLIESQHTVTGNTFALVRIPFAACEQCTQAGYDLWEHLIGRKTSVLLQDQQHNKVELWHLDKGVTHF

SEQ ID NO: 7800 - protein, 506 aa, Leptospira interrogans serovar lai str. 56601
MKQKIAFILYTIWFISCSPQSRIDIAPLLLATLSQTTGSQNEISFQVLSPREGEILTVYQLETIVQANSDGEFEIFHEGNKLFSFQSTPSSPQTSPTFKPKNGHNTIQIRFKKSNGFVLSQEIHFYFGTKLSAGGAHSGFLINGELYTVGRNNFGQLGTGISTGDGINDRIVKVDPIRDIFSIHFNQNNSMAISQNGRVYTWGANSKGQLGIGNNNTDPARASDPGNRQPPTEIPGINDAVMGAYGFNHALVLKSDGTVVAFGQNNVGQLGNGENNLNRNSFSSNPVNVVQLRNVIQVIAGSEHSAALTENGEVYIWGRNQYGNLGNGIISPANTVQSVPVKVEGLSKIKQIANGRDHILALTSDGKIYSWGLNASGQLGIGGNGNPPPTPIPTQILNIQDVASIWAGGTQSFAILKNGEVKGWGANGNMASLALGESNTQKVYEPNKAVVGIDNVVHFGCGATHNFALLGNGEIYGWGWNFKGSLGRTDLQNNWGAPNPVYIKFP

SEQ ID NO: 7801 - protein, 198 aa, Zea mays
  unsure (1)..(198): unsure at all Xaa locations
SPGFGFVGIEXAASDVEYXCFVGGLAWXTDDHSLHNAFSTYGEVLESKIILDRETQRSRGFGFVTFSTEEAMRNXIEGMNGKELDGRNITVNEAQSRGGRXGGGGGYGGGRXGGGYGGCGRRDGGGGYXGXGGYGGGGGYXGGGGGYGGGNRGGGYGNSDGNWRNLAVGPRPSYPVRYRDVYSPRGFIFVRVVFAHLC

SEQ ID NO: 7802 - protein, 161 aa, Methanosarcina mazei Goe1
MRKWEKSDAESFFKYSSNPKILEDMRDAFPSTLEDCRKTVENFSYNDESKQCCRAIIVNGEAVGSIALFIKNDVYCRSAEIAYWLGEPFWGRGIMSEAIKQLCQTAFEQYDIVRIFAEPYAHNFGSRKALEKAGFVLEGIMKKGIYKNGNYFDYCMYALIK

SEQ ID NO: 7803 - protein, 345 aa, Shigella sonnei
MDIYMSRYEEITQQLIFSPKTWLITGVAGFIGSNLLEKLLKLNQVVIGLDNFSTGHQYNLDEVKTLVSTEQWSRFCFIEGDIRDLTTCEQVMKGVDHVLHQAALGSVPRSIVDPITTNATNITGFLNILHAAKNAQVQSFTYAASSSTYGDHPALPKVEENIGNPLSPYAVTKYVNEIYAQVYARTYGFKTIGLRYFNVFGRRQDPNGAYAAVIPKWTAAMLKGDDVYINGDGETSRDFCYIDNVIQMNILSALAKDSAKDNIYNVAVGDRTTLNELSGYIYDELNLIHHIDKLSIKYREFRSGDVRHSQADVTKAIDLLKYRPNIKIREGLRLSMPWYVRFLKG

SEQ ID NO: 7804 - protein, 369 aa, Stigmatella aurantiaca
MVYLLCRSRSQLRWILNGSAHRVRFAWGGHARPRRMHFRHLGRSGLMVSEISYGNWLTHGSQVEEAAAVACVRAALDEGITTFDTADVYAGTRAEEVLGRALQGQRREGLEIFTKVYWPTGPGPNDRGLSRKHILESIHGSLRRLKTEYVDLYQAHRYDTETPLEETMQAFSDVVRQGKAHYIGVSEWTADQLREGVKLSRQMGFQLVSSQPQYSMLWRVIEAEVVPASQELGVGQVVYSPIAQGVLTGKYRPGQKPPEGSRATDEKGGASFIKRFLNDDVLTRVQQLTPVAQEAGLSLAQLAVAWVLQNPNVSSAIIGASRPEQVKENVKAAGVKLSEEAMRHIDTLLGPIVERNPKKTLENSPRKRP

SEQ ID NO: 7805 - protein, 143 aa, Zea mays; identical to SEQ ID NO: 6408

SEQ ID NO: 7806 - protein, 394 aa, Zea mays subsp. mays
LGSARRARLPPGEMGWPLVGGMWAFLRAFKSGKPDAFIASFVRRFGRTGVYRSFMFSSPTVLVTTAEGCKQVLMDDDAFVTGWPKATVALVGPRSFVAMPYDEHRRIRKLTAAPINGFDALTGYLPFIDRTVTSSLRAWADHGGSVEFLTELRRMTFKIIVQIFLGGADQATTRALERSYTELNYGMRAMAINLPGFAYRGALRARRRLVAVLQGVLDERRAARAKGVSGGGVDMMDRLIEAQDERGRRLDDDEIIDVLVMYLNAGHESSGHITMWATVFLQENPDMFARAKAEQEAIMRSIPSSQRGLTLRDFRKMEYLSQVIDETLRLVNISFVSFRQATRDVFVNGYLIPKGWKVQLWYRSVHMDPQVYPDPTKFDPSRWEGHSPRAGTFL

SEQ ID NO: 7807 - protein, 355 aa, Mycobacterium tuberculosis H37Rv
MRLRTPLTELIGIEHPVVQTGMGWVAGARLVSATANAGGLGILASATMTLDELAAAITKVKAVTDKPFGVNIRADAADAGDRVELMIREGVRVASFALAPKQQLIARLKEAGAVVIPSIGAAKHARKVAAWGADAMIVQGGEGGGHTGPVATTLLLPSVLDAVAGTGIPVIAAGGFFDGRGLAAALCYGAAGVAMGTRFLLTSDSTVPDAVKRRYLQAGLDGTVVTTRVDGMPHRVLRTELVEKLESGSRARGFAAALRNAGKFRRMSQMTWRSMIRDGLTMRHGKELTWSQVLMAANTPMLLKAGLVDGNTEAGVLASGQVAGILDDLPSCKELIESIVLDAITHLQTASALVE

SEQ ID NO: 7808 - protein, 353 aa, Bacillus subtilis subsp. subtilis str. 168
MTHTVPQNMKAAVMHNTREIKIETLPVPDINHDEVLIKVMAVGICGSDLHYYTNGRIGNYVVEKPFILGHECAGEIAAVGSSVDQFKVGDRVAVEPGVTCGRCEACKEGRYNLCPDVQFLATPPVDGAFVQYIKMRQDFVFLIPDSLSYEEAALIEPFSVGIHAAARTKLQPGSTIAIMGMGPVGLMAVAAAKAFGAGTIIVTDLEPLRLEAAKKMGATHIINIREQDALEEIKTITNDRGVDVAWETAGNPAALQSALASVRRGGKLAIVGLPSQNEIPLNVPFIADNEIDIYGIFRYANTYPKGIEFLASGIVDTKHLVTDQYSLEQTQDAMERALQFKNECLKVMVYPNR

SEQ ID NO: 7809 - protein, 206 aa, Triticum aestivum
  unsure (1)..(206): unsure at all Xaa locations
LSGLISFGRGMGKPAPSGSPAKTSSAEYKKQGREMSSPVPEKTSTSGGCGKGSSALSTKGKKRSEEERGSEGNVKKSKHESCSPTSSSPKGQVTKVKLGHKITALQQMVSPFGKTDTASVLYEAINYIKWLHEQVQLLSDPYMKSCSSKDYKPWVRSDGMEKEDAETDLKSRGXXCLVPLSRTPQVYMDSNGPDYWTPPXRSCLFQ

SEQ ID NO: 7810 - protein, 923 aa, Pisum sativum
MELRVICIIRLVVACVLCLCIFIRSASSATEGFESIACCADSNYTDPKTNLNYTTDYRWYSDKSNCRQIPEILLSHRSNINFRLFDIDEGKRCYNLPTIKDQVYLIRGTFPFDSVNTSFYVSIGATELGEVTSSRLEDLEIEGVFRAPKDNIDFCLLKEDVNPFISQLELRPLPEEYLHDFSTNVLKLISRNNLCGIEDDIRFPVDQNDRIWKATSTPSYALPLSFNVSNVELNGKVTPPLQVLQTALTHPERLEFVHVGLETDDYEYSVLLYFLELNDTLKAGQRVFDIYLNSEIKKEGFDVLEGGSKYSYTVLNISANGSLNITLVKASGSKFGPLLNAYEILQARPWIDETDQTDLEVIQKMRKELLLQNQDNEALESWSGDPCMLFPWKGVACDGSNGSSVITKLDLSSSNLKGTIPSSVTEMTKLQILNLSHNHFDGYIPSFPPSSLLISVDLSYNDLTGQLPESIISLPHLNSLYFGCNQHMRDDDEAKLNSSLINTDYGRCNAKKPKFGQVFMIGAITSGSILITLAVVILFFCRYRHKSITLEGFGGKTYPMATNIIFSLPSKDDFFIKSVSVKPFTLEYIELATEKYKTLIGEGGFGSVYRGTLDDGQEVAVKVRSATSTQGTREFDNELNLLSAIQHENLVPLLGYCNEYDQQILVYPFMSNGSLLDRLYGEPAKRKILDWPTRLSIALGAARGLAYLHTFPGRSVIHRDVKSSNILLDHSMCAKVADFGFSKYAPQEGDSYVSLEVRGTAGYLDPEYYKTQQLSEKSDVFSFGVVLLEIVSGREPLNIKRPRVEWSLVEWAKPYIRASKVDEIVDPGIKGGYHAEALWRVVEVALQCLEPYSTYRPCMVDIVRELEDALIIENNASEYMKSIDSLGGSNRYSIVMDKRALPSTTSTAESTITTQNVSHPQPR

SEQ ID NO: 7811 - protein, 241 aa, Triticum aestivum
  unsure (1)..(241): unsure at all Xaa locations
MLLRLKITTVQPVALLLGHDHGATASPRRLAGALPQGGGASTRAKRLRSVAVAMALKEEEPESSRSRFAGGGPSWDPRMEIGVPYEQRPVNEYSALKESTLYSWAELSPGSFFMRLGSLCLVTFTVLAAPISAASFSPGKDPLKFVLAAGIGTLLLVSLVVLRIYLGWSYVGDRLLSAVVPYEETGWYDGQMWVKPAEVLARDRLLGSYKVKPVINLLKQTLVGTGALLVXAVALFAFAAP

SEQ ID NO: 7812 - protein, 198 aa, Oryza minuta
GQTPVFPRIFGHEAGGIVESVGEGVTDLAPGDHVLPVFTGECKECPHCKSAESNMCDLLRINTDRGVMIGDGRSRFSINGKPIYHFVGTSTFSEYTVMHVGCVAKINPAAPLDKVCVLSCGISTGLGATINVAKPPKGSTVAIFGLGAVGLAAAEGARIAGASRIIGIDLNANRFEEARKFGCTEFVNPKDHDKPVQQ

SEQ ID NO: 7813 - protein, 315 aa, Hordeum vulgare subsp. spontaneum
MATAGKVIKCKAAVAWEAGKPLSIEEVEVAPPQAMEVRVKILYTALCHTDVYFWEAKGQTPVFPRILGHEAGGIVESVGEGVTELVPGDHVLPVFTGECKDCAHCKSEESNLCDLLRINVDRGVMIGDGQSRFTINGKPIFHFVGTSTFSEYTVIHVGCLAKINPEAPLDKVCVLSCGISTGLGATLNVAKPKKGSTVAIFGLGAVGLAAMEGARMAGASRIIGVDLNPAKYEQAKKFGCTDFVNPKDHTKPVQEVLVEMTNGGVDRAVECTGHIDAMIAAFECVHDGWGVAVLVGVPHKEAVFKTHPMNFLNEK

SEQ ID NO: 7814 - protein, 140 aa, Zea mays
MVSFEMNDLKKIGLSLTGFGVFFSFLGIVFFFDKGLIAMGNILFLSGLGLTIGLKSTMQFFTKPKNYKGTISFGAGFFLVLIGWPFFGMLLEAYGFIVLFSGFWPTLAVFLQRIPILGWIFQQPFVTSFLDRYRGKRVPV

SEQ ID NO: 7815 - protein, 262 aa, Candida albicans
MGLFIPTNKLQNLKLYKYSSEDHSIISKYILKKWWNFFVQIFPLSMAPNVVTLLGLFFIIGNLMTVFYYDPYLNETQPTWCYFFYAFGLFMYQTFDGCDGCHARRTGQSGPLGELFDHSIDAINTTLGTFVFASVLKMGYGGLLLLSQFASVCNFYTSTWEEYHTHTLFLSKFSGPVEGILMICIVYIITGIFGPDIWTIDLFELNLTSLGYGYYKVDTSIIYTIIGLTSLYFNIASAMFNVSKHYKKSSTNNSSSGDKDGS

SEQ ID NO: 7816 - protein, 406 aa, Leptospira interrogans serovar lai str. 56601
MNDADIHKELFQHTKELADHYLLNTYARYDVAFRYGVNELLFDFDNKQYIDFHCGVAVTNLGHADPDIIEVVRSQADKLFHTSNLFYSEEASKLAELLILNSFPGKVFLTNSGTEAIEGAFKLARKYAYSKSIVDPIILSLEKSFHGRSVSGMSLTGQDKIRKGYGELLKGIEFIEPNNDEALVAAFERYQGRIVALIEEPILGESGIIPLSRNFLTLSRELTEENEALLIFDEIQTGMGRTGTLFAFETMGFSPDAMTLAKGLGSGFPIGALIVGEKYQDLFTQGSHGSTFGGNHLAAAVAYETIRIIQTREILNNVNICSDIAFTRLREMQEKYPVISEVRGKGLHIGLELKVPSKPIAEACLSAGLVVNATADNVVRIMPPLTISTDFLNQGLDILESVLKQN

SEQ ID NO: 7817 - protein, 184 aa, Salmonella enterica subsp. enterica serovar Typhi
MSDTLRPYKDLFPEIGQRVMIDTSSVVIGDVRLADDVGIWPLVVIRGDVNYVAIGARTNIQDGSVLHVTHKSPSNPHGNPLIIGEDVTVGHKVMLHGCTIGNRVLVGMGSIVLDGAIIEDDVMIGAGSLVPQHKRLESGYLYLGSPVKQIRPLSDAERSGLQYSANNYVKWKDDYLSQDNHIQP

SEQ ID NO: 7818 - protein, 152 aa, Populus tremuloides
MVKAVAVLNSSEGVSGTIFFTQEGDGPTTVIGNLSGLKPGLHGFHVHALGDTTNGCMSTGPHFNPVGKEHGAPEDENRHAGDLGNVTVGDDGTAAFTIIDKQIPLTGPHSIIGWAVVVHGDPDDLGKGGHELSKTTGNAGGRVACGIIGLQG

SEQ ID NO: 7819 - protein, 350 aa, Pseudomonas putida
MNEFFKKISGLFVPPPESTVSVRGQGFQFKVPRGQTILESALHQGIAFPHDCKVGSCGTCKYKLISGRVNELTSSAMGLSGDLYQSGYRLGCQCIPKEDLEIELDTVLGQALVPIETSALISKQKRLAHDIVEMEVVPDKQIAFYPGQYADVECAECSAVRSYSFSAPPQPDGSLSFHVRLVPGGVFSGWLFGGDRTGATLTLRAPYGQFGLHESNATMVCVAGGTGLAPIKCVLQSMTQAQRERDVLLFFGARQQRDLYCLDEIEALQLDWGGRFELIPVLSEESSTSSWKGKRGMVTEYFKEYLTGQPYEGYLCGPPPMVDAAETELVRLGVARELVFADRFYNRPPC

SEQ ID NO: 7820 - protein, 385 aa, Zea mays
  unsure (1)..(385): unsure at all Xaa locations
MAGWYEEAAGLLLRRSALAEMAVDVLLCAVPIWAAVMIGLFIGWAWRPRWTGLIFLGFRSRLRLLYVPPGLGARRLXVXTALSACSVATKLISSAFRRCRGKHQDRASPDDDAAATRDGGCRADGRXGPIMYCSRTIFEDATPELVRDFFWDGDFRLKWDPMLAYCKSLDEFPQNGATIVHWIKKFPFFCSDREYIFGGRIWESGKTYYCVTKGVPYPSLPKKEKPRRVELYFSSWRIRAVQSPKHVGQQSACEVTLVHYEDMGIPKDVARVAVRHGMWGAVKKLQSGFRAYQQMRHTETTLSHSVIMARMTTKISITASNDPLDHDLSVADKISDENDSSNAVQHGFDWKWLVVGGAVAAVCVLNTGLVGKAVLLGAARRQAKK

SEQ ID NO: 7821 - protein, 309 aa, Glycine max
MSNSRNTHWCYSCRRPVWLGRRDAVCPSCNEGFVHELNDMVHVNPFDLFEMDNNEERDQRLGLMETFSAFMRHQMADRGRSHDIRVRTDSNPEHSASFAPLLIFGGHIPFRLSRHGGFEALFNGAPGIGLTQGNTGDYFIGPGLEELFEQLSANNRQGPLPASRSSIDAMPTIKIVQRHLRSDSHCPVCKDKFELGSKARQMPCNHLYHSDCIVPWLVQHNSCPVCRQELPPQGLSSSNGGANGRSRSARVSSSGRESHGRRNPFSFLWPFRSSHSSSNDEATGSSSPTPTIPENSHHHHAGYSGWPFE

SEQ ID NO: 7822 - protein, 126 aa, Crocus sativus
VSNCYWNWGCAGLKPTVAAIEAGKDIALANKETLIAGGPFVLPLAHKHKVKILPADSEHSAIFQCIQGLPEGALRRIILTASGGAFRDWPVEKLKEVKVADALKHPNWNMGKKITVDSATLFNKGS

SEQ ID NO: 7823 - protein, 345 aa, Arabidopsis thaliana
MTATNKQVVLKNYVSGFPKESDFDFKTTTVEFKLPGGSNSVLVKNLYLSCDPYMRIRMGKPDPSTAALAQAYAPGKPIFGYGVSRVIESGHPDYKKGDLLWGIVGWEEYSVITPMTHMHFKIQHTDIPLSYYTGLLGMPGMTAYAGFYEVCSPKEGETVYVSAASGAVGQLVGQFAKMMGCYVVGSAGSTEKVNLLKTKFGFDDAFNYKEEPDLSAALKRCFPTGIDIYFENVGGKMLDAVLLNMNPHGRIAVCGMISQYNLENQEGVHNLSNIIYKRIRIQGFAVFDFYEKYSKFLDFVLPHIKEGKITYVEDVADGLEKGPEALVGLFHGKNVGKQVVVIARE

SEQ ID NO: 7824 - protein, 321 aa, Streptomyces avermitilis MA-4680
MRHRTLGAGGPVVSEVGLGTWRPLSRDGRRGAARLVGAARDLGITLFDTAGSYGDAEEALGIALRGAPRESYVLSTKVYYEPGGTVAGLSRAAVRAGVERSLRALRTEHIDLLSAHRFDDRTPLAETLTAFGELLEEGKIAHYGFSEWTAQQIAAACAAATEVGVRPPVASQPQYSVLWRVPEKAVVPLCQDLGIGTVAFWPLAQGLLTGKYAPGEPPPADSRAADPTGRLVMDHFMAEPILERVQLFARLARHQGMTPAQLAVSWVLNRPGVTSALVGASTPEQLNQTASAAGVLLSEPTMELIDKIFAGCVYDDVAGTG

SEQ ID NO: 7825 - protein, 59 aa, Nicotiana plumbaginifolia
MVKAVAVLSSSEGVSGTIFFTQDGDAPTTVTGNVSGLKPGLHGFHVHALGDTTNGCMST

SEQ ID NO: 7826 - protein, 98 aa, Buchnera aphidicola
  unsure (1)..(98): unsure at all Xaa locations
LPSASLNDSNXGLYEPAGGSAPDIAGKNIXNPIAQILSIAMLVRYTMKLPIISDQIESAVIDTLKKGYRTLDIANDKEKCESTNDIGDIISYILKKRI

SEQ ID NO: 7827 - protein, 149 aa, Triticum aestivum
  unsure (1)..(149): unsure at all Xaa locations
MGPARCASGRLWLLLLALAVADFTAAQQNQNPPPPGGQYYTNFSPSMAIVIVVLIAAFFFLGFFSVYIRHCYGDSPYSATTLPLGAAAARSRRQQRGLDXAVLETFPTMAYADVKEHKAVKGALECAVCISEFDDDETLRLLAKGLPRF

SEQ ID NO: 7828 - protein, 379 aa, Barbarea vulgaris
MITTGQIIRCKAAVAWEAGKPLVMEEVEVAPPQKHEVRIKILFTSLCHTDVYFWEAKGQTPLFPRIFGHEAGGIVESVGEGVTDLQPGDHVLPIFTGECGDCPHCHSEESNMCDLLRINTERGGMIHDGESRFSINGKPIHHFLGTSTFSEYTVVHSGQVAKINPEAPLDKVCIVSCGLSTGLGATLTVAKPKKGQSVAVFGLGAVGLGAAEGAKMAGASRIIGVDLNPKRFEEAKKFGVTEFVNPREHDKPVQQVIADMTNGGVDRSVECTGSVQAMIQAFECVHDGWGVAVLVGVPSKDDAFKTHPMNFLNERTLKGTFFGNYKPKTDIPGVVEMYMNKELELEKFITHTVPFSEINKAFDYMLKGESIRCIITMGA

SEQ ID NO: 7829 - protein, 368 aa, Rhizobium etli
MKQAYAAVSREKAKPLILECIGIEEPRADEILVRIVASGVCHTDLVVRDQGYDVPQPVVLGHEGSGVVEAVGSAVKDLVPGDHVALSYAYCGKCEKCLSGTPFYCEDFFGRNFRGTRPDGTCPIHDSHGKQISGCFFEQSSFATYAIASERNAVKVAKDVPLELIGPLGCGLQTGAGAVLNCLKPKPGSSIAVFGAGAVGMAATMAAKIAGCATIIVIDLNDERLELSRELGATHTINARKLDSVAAIRKIVPAGVDFSLECTSSPRVFRQAVDCLGTPGTCGLVGSSALGTEGTIDIGNFLFGRTLIGVVEGQSVPSEFVPQLIEYWQQGLFPFDKLVQFYDLDQINEAMADSESGKVIKPILRMKH

SEQ ID NO: 7830 - protein, 153 aa, Funaria hygrometrica
MALSLFGGRGNSVFDPFEFGSVWDPFTVLESGPSRQLASDVQAVASTRIDWRETPEAHIFKADLPGLTKEEVKVQVLEGRTLEICGERKKEEVQKSDTWHRMERAQGSFMRRFRLPEGTNTDDVKAQVQDGVLTVTVPKVQKPKPQVRQIEIA

SEQ ID NO: 7831 - protein, 73 aa, SINNINGIA CONSPICUA
ISGTNGEVMPGQWEFQVGPSVGIEAGDHIWCARYLLERITEQAGVVLSLDPKPIEGDWNGAGCPTNYSTKSMR

SEQ ID NO: 7832 - protein, 439 aa, Oryza sativa; identical to SEQ ID NO: 3553

SEQ ID NO: 7833 - protein, 791 aa, Zea mays
  unsure (1)..(791): unsure at all Xaa locations
MESSGCSSEIVESTEEFDTTPSGGSSLLHIKLKDEEKRGKSHDYSVEDDLDQLLKAIDSRTFRRALSPGSTGGDALGKSVLKKPARSGLSQNAGIGISSKAVNMKQALRRLCISQASEMAAMKRLSMSPGSSSSSEAGTIHRLYASLMVQSSSEGLLHDDEKMNLIEVSITPEKIDKSSSRGTSEFSEDCEFETADGSAVTSTSICSASSTYTDIRKIRIQDVIIGDPMDNESSLGENGNLGNKFSAATDDGSPKGPILSKPITTSRLVKPVFRCKPSGKKKVKQEPSSLGDSSNSTKFCSSKESISLTSTSCSSTSSFTKSRQPCRKEKSSPGPEKSDGTSPEWLAEQNECSQNSKSSISEYGCSTSISGESQFGLCGYSNRPHMAKDLRWLTIRQLALQQGSLGLDNFKLLKRLGCGDIGTVYLAELVDSDCLFALKVLDXEYLIRRKKMLRAQAEREILEMLDHPFLPTLYAHFTTDNLSCLVMEYCPGGDLHVLRQRQPGKSFPEPAARFYVAEVLLALEYLHMLGVIYRDLKPENILVREDGHIMLSDFDLSLRCSVNPVLLRSSSVTANHQPRKHTGPCAENYCINSSCLQQPSCAQTSCFTPRLPSIPKPRKPKSSQKRLPQLVVEPTDARSNSFVGTHEYLAPEIIKGDGHGSAVDWWTFGVFLYELLYGKTPFRGPGNDETLANVVSQNLRFPDHPAVSSNTKDLIRGLLVKEPENRFGSLRGAAEIKQHPFFEGLNWALIRSAAPPETQPCNIVTLAKERKKEGKCLEFRSNSEDLEFEVF

SEQ ID NO: 7834 - protein, 228 aa, Gossypium costulatum
FTSLCHTDVYFWEAKGQTPLFPRIFGHEAGGIVESVGEGVTHLKPGDHVLPVFTGECGNCRHCKSKESNMCDLLRINTDRGVMLSDGKTRFSINGKPIYHFVGTSTFSEYTVAHVGSVAKINPVAPLDKVCILSCGISTGLGATLNVAKPAKGSTVAIFGLGAVGLAAAEGARIAGASRIIGVDLNPNRFEEAKKFGCTEFVNPKDHNKPVQEVLAEMTNGGVDRSVE

SEQ ID NO: 7835 - protein, 325 aa, Streptomyces avermitilis MA-4680
MAEKMAIAKAINESLRKALESDPKVLIMGEDVGKLGGVFRVTDGLQKDFGEERVIDTPLAESGIVGTAIGLALRGYRPVVEIQFDGFVFPAYDQIVTQLAKMHARALGKIKLPVVVRIPYGGGIGAVEHHSESPEALFAHVAGLKVVSPSNASDAYWMMQQAIQSDDPVIFFEPKRRYWDKGEVNVEAIPDPLHKARVVREGTDLTLAAYGPMVKVCQEAAAAAEEEGKSLEVVDLRSMSPIDFDAVQASVEKTRRLVVVHEAPVFLGTGAEIAARITERCFYHLEAPVLRVGGYHAPYPPARLEEEYLPGLDRVLDAVDRSLAY

SEQ ID NO: 7836 - protein, 512 aa, Pinus taeda
MSVPEMGPFGVVVTGIVAIAIVYKLVQRWRFKLPPGPRPWPVVGNLLQIEPVRFRCFWDWSKKYGPIMSVWFGSTLNVVVSNTELAKEVLKEHDQQLADRPRSRSAEKFSRNGQDLIWADYGPHYVKVRKVCTLELFSPKRLEALRPIREDEVAAMVESIFNDCGKQEGIGKPLVVKRYLSGVAFNNITRPAFGKRFVNEEGKMDPQGVEFKEIVATGLKLGASLTMAEHIPYLRWMFPLEEGAFAKHGARRDNVTKAIMEEHTLARQTSGAKQHFVDALLTLQEKYDLSEDTIIGLLWDMITAGMDTTAITVEWAMAELVRNPRIQQKAQEEIDRVVGRDRVMNETDFPHLPYLQCITKEALRLHPPTPLMLPHKATQNVKIGGYDIPKGSNVHVNVWAIARDPAVWKDPVTFRPERFLEEDVDIKGHDYRLLPFGAGRRICPGAQLGINLVQSMLGHLLHHFVWAPPEGMQAEDIDLTENPGLVTFMAKPVQAIAIPRLPDHLYKRQPLN

SEQ ID NO: 7837 - protein, 145 aa, Glycine max
MASVVASLPPPLLLPARKSHMGNFPSSPVSLLSGRWNRVSFVVKASGESSESSTTLTVFKSVQNIWDQPEDRLGLIGLGFAAVAAFWASTNLIAAIDKLPLFPTVLELVGIFYSVWFTYRYLIFKPDREELFQILNKSASDILGQ

SEQ ID NO: 7838 - protein, 309 aa, Schaefferia frutescens
ALSIAGAVQSQKLAIRSISQLQSLPGGDIKLLCDTVVESVRELTGYDRVMVYKFHEDEHGEVVAESKRPDLEPYIGLHYPATDIPQASRFLFKQNRVRMIVDCHASPVLVIQDDGLMQPLCLVGSTLRAPHGCHAQYMENMGSKASLAMAVIINGNDEEVTGGRNCTRLWGLVVCHHTFARCIPFPLRYAWEFLMQAFGLQLNMELQLAAQLSEKHVLKTQTLLCDMLLRDSPTGIVTQSPSIMDLVKCDGAALYYQGKYYPIGVTPAEAQIKDIVEWLLAFHGDSTGLSTDSLADAGYPGATLLGDAV

SEQ ID NO: 7839 - protein, 528 aa, Cryphonectria parasitica
MMHDQASNGGDQAAPIKTQETPVPMSSSNSVPIMNAPAPLLRPAIPGSRGGARTPRLGLAIPPSPNVKPVTNPAGGAPQPQKASRPAPPTLSIATPMGSIGPPQEQQPGRSVAQPGHSASSGSEISAAHSRTDSFGGRGSNPTSAGSQYSNLSFVSQYGLGGKPHGTPDPQSAAGSMYSNASEGGLDMSRQDSMHGLERAMDEVTLERVRNLDVEDLDDEGWRIASQENRIVELGGLGEGAGGAVTRCQLKGGKTIFALKVITTNPDPDVKKQILREINFNKGCASDHICRYYGGFLEPSTATISIAMEFCEGGSLDSIYKEVKRLGGRTGEKVLGKIAEGVLQGLTYLEAKRILHRDIKPSNILLCRNGEVKLCDFGVSGDFGTKGEANTFIGTSYYMAPERITGQTYTITSDVWSTGVTLLEVAQHRFPFPADGTEMQPRAGLIDLLTYIVQQPIPKLKDEPEAGIFWSDNFKHFIESCLEKNPKRRGMPWKMLEHPWMIELKTKRVNMGKYLSQVWGWDDPKHSK

SEQ ID NO: 7840 - protein, 105 aa, Citrus sinensis
GEGTATQDSNNSGANSNGTATNGGEEDLKSWDTDFVKVDQATLFDLILAANYLNIKGLLDLTCQTVADMIKGKTPEEIRKTFNIKKDFTPEEEEEVRRENQWAFE

SEQ ID NO: 7841 - protein, 159 aa, Helianthus annuus
EFQVGPSVGISAGDEIWAARYILERITEIAGVVVSFDPKPIPGDWNGAGAHTNYSTKSMREEGGYEIIKKAIEKLGLRHSEHIAAYGEGNERRLTGRHETANINTSKWGVANRGASIRVGRDTEKEGKGYFEDRRPASNMDPYVVTSMIAETTILYVNP

SEQ ID NO: 7842 - protein, 507 aa, Oryza sativa
MEALWKQASRLKEQVSRQGVFKPFGAAYGNSENAFTDESEVNLHQRLEKLYLSTRAAKHFQRDIVRGVEGYIVTGSKQVDIGNKLSDDSQKYGTGNTCTSDNTLSKAAMYYGKARSLMEKERGNMLRAFGTQVAEPLRAMVMGAPLEDARHLAQRYDRMRQEAEAQAVEVSRRQNRVRESAPNGDVITKLEAAEYKLEELKSSMVGLGKEAVAAMAAVEAQQQRLTLQRLIAMMVSERQKIEAPPTPSAENYMAQPPPSYDEVNGMFASSSVDDSVTSVDFFLGEALDSFKAESESELNLSAGDIVIVRKISTNGWAEGECKGKAGWFPHGYIERRERVLASKMLMGTRWRGNQSFVKADQRCPEQTDSSTDEAEDGTNYYKTVNSDVFMHIMRLLRNTHAYLPERKMKLMTRWPRQRERARWRDDESTREIAAFAVGVTPVTSPTRPTYRYSLRFTILVLQKLIGTRDKIQELCNSNLLVSAIQRRMDIYKKEMYIFMLSCRNSSF

SEQ ID NO: 7843 - protein, 305 aa, Miscanthus floridulus
IESVGEGVTDVAPGDHVLPVFTGECKECAHCRSAESNMCDLLRINTDRGVMIGDGKSRFSINGKPIYHFVGTSTFSEYTVMHVGCVAKINPEAPLDKVCVLSCGISTGLGASINVAKPPKGSTVAIFGLGAVGLAAAEGARTAGASRIIGVDLNPSRFEEARKFGCTEFLNPKDHKKPVQEVLAEMTNGGVDRSVECTGNINAMIQAFECVHDGWGVAVLVGVPHKDAEFKTHPMNFLNERTLKGTFFGNFKPRTDLPNVVELYMKKELEVEKFITHSVPFAEINKAFELMAKGEGIRCIIRMEN

SEQ ID NO: 7844 - protein, 306 aa, Hordeum vulgare subsp. spontaneum
MATAGKVIKCKAAVAWEAGKPLSMEEVEVAPPQAMEVRDKILYTALCHTDVYFWEANGQTPVFPRILGHEAGGIVESVGEGVTELVPGDHVLPVFTGECKECAHCMSEESNLYDLLRINVDRGVMIDDGQSRFTIDGKPIFHFLGTSTFSEYTVIHVGCVAKIDPEAPLDKVCLLSCGISTGLGATLNVTKPKKGMTVAIFGLGAVGLAAMEGARMSGASRIIGVDLNPAKHEQAKKFGCTDFVNPKDHTKPVQEVIVEMTDGGVNRAVECTGNADAMISAFECVHDGWGVAHKEAVFKTHPMNFL

SEQ ID NO: 7845 - protein, 150 aa, Apium graveolens
MADQLTDDQISEFKEAFSLFDKDGDGCITTKELGTVMRSLGQNPTEAELQDMINEVDADGNGTIDFPEFLNLMARKMKDTDSEEELKEAFLVFDKDQNGFISAAELRHVMTNLGEKLTDEEVDEMIREADVDGDGQINYEEFVKVMMANV

SEQ ID NO: 7846 - protein, 774 aa, Neurospora crassa
MKSSWASYCLLSCTSALVSAIDLPFQTYPDCVNGPLASLKVCDATLSPPQRAAALVAAMTTEEKLQNLVSKSKGAPRIGLPAYNWWSEALHGVAYAPGTQFRSGDGPFNSSTSFPMPLLMAATFDDELIEKVGEVIGTEGRAFGNAGFSGFDYWTPNVNPFKDPRWGRGSETPGEDILRIKRYAASMIRGLQGPLPERRVVATCKHYAANDFEDWNGSTRHDFDAKVTLQDLAEYYLSPFQQCARDSKVGSIMCSYNAVNGVPACANTYLMQTILREHWNWTAPGNYITSDCEAVLDIFANHHYAKTNAEGTALAFEAGTDSSCEYESSSDIPGAWTQGLLEQSTVDRALTRLYEGLVRVGYFDGNHSEYASLGWKDVNSPKSQEVALQTAVEGIVLLKNDQTLPLGLKTDPKSKLAMIGFWANDPKTLSGGYSGKPAFEHSPVYAAEAMGFNVTTAGGPVLQNSTSNDTWTQAALEAAQDANYILYFGGLDTSAAGETKDRTTINWPEAQLQLIKTLTKLGKPLVVVQMGDQLDNTPLLATKTVNSILWANWPGQDGGTAVMQILTGLKSPAGRLPVTQYPANYTAAVPMTDMNLRPSDRLPGRTYRWYPTAVQPFGFGLHYTTFQAKIAAPLPRLAIQDLLSRCGGDNANAYPDTCALPPLKVEVTNSGNRSSDYVVLAFLAGDAGPRPYPIKTLVSYTRLRDVSPGHKTTAHLEWTLGDIARYDEQGNTVLYPGTYTVTVDEPAQASASFVVEGEAVVLDRWPAPSGQVVV

SEQ ID NO: 7847 - protein, 338 aa, Bacteroides thetaiotaomicron VPI-5482
MKALFIGGTGTISTDVVELAQQRGWEITLLNRGSKKLPEGVGSIIADIHDEEAVAKAIADESYDVVAQFIAYTAEDVERDIRLFRNKTKQYIFISSASAYQKPLADYRITESTPLVNPYWQYSRHKIAAEEVLMTAYRTTGFPITIVRPSHTYNGTKPPVSLHGNKGNWQILKRILDGKPVIIPGDGSSLWTLTHSKDFAKGYVGLMANPHAIGNAFHITTDESMTWNQIYQTIADALGKPLNALHVASDFLARHGGNYDFRGELLGDKAATVVFDNSKIKRLVPDFICTTSMADGLRQSVQYMLSHPETQTPDPEFDSWCDRVADAMAAADRAFEAE

SEQ ID NO: 7848 - protein, 367 aa, Streptomyces coelicolor A3(2)
MRSYVRQEQPPGGRTGLRLCGGHVAPSAHGRGTQATSAPHATTRRSAPDHPALREPPCHLPLSDHLRVGSGGTLNGRGRVRTMAQEVRGVIAPGKDEPVRIETIVVPDPGPGEAVVKIQACGVCHTDLHYKQGGINDEFPFLLGHEAAGVVESVGAGVTDVAPGDFVILNWRAVCGKCRACRRGRPWYCFDTHNAEQRMTLASTGQELSPALGIGAFAEKTLVAAGQCTKVDPAVPAEVAGLLGCGVMAGIGAAINTGNVGRGDTVAVIGCGGVGDAAIAGSYLAGASKVIAVDIDDRKLETARTMGATHTVNSRGTDPVEAIRELTGGFGADVVIEPSAARRPTARPSTPATWPAPSSWSACPLPR

SEQ ID NO: 7849 - protein, 253 aa, Rumex acetosa
MEFSNELSRDMEDGSPQRKMGRGKIEIKRIENVTNRQVTFCKRRNGLLKKAYELSVLCDAEVALIVFSSRGRLYEYANHSVKATIERYKKTCSDSTGVTSVEEANAQQEAAKLRNQIRTLQNQTRNTSRNLMGEGLTSMNMKDLKNLETRLEKGISRVRAKKNELLFGEIEFMQKKEIELHNNNQFLRAKIAESERSQQSMNLMPGSSSGEQHYELMPQSQAGPFDSRNFFQVSDLQPDERYSCQNQTPLQLV

SEQ ID NO: 7850 - protein, 92 aa, Oryza sativa
  unsure (1)..(92): unsure at all Xaa locations
XCKASKEVRDSGGCAGSINMSNIFTGKCVAKISPXRPYSHNCSSKKRXXSSRSTIRSTVSDALEDITALFYDEDRNEIYTGNSKGLVHVWSN

SEQ ID NO: 7851 - protein, 370 aa, Glycine max
MSNDKDTFNVADLTSALNEDNRADLVNALKSKIQSLAGQHSDILESLSPNVRKRVEVLREIQGQHDELEAKFFEERAALEAKYQKLYQPLYTKRYEIVNGATEVEEGAVKETTPDGEEDQEKGVPAFWLTAMKNNEVLAEEISERDEGALKYLKDIKWSRIENPKGFKLEFFFDTNPYFINSVLTKTYHMIDEDEPILEKAIGTEIQWHPGKCLTQKILKKKPKKGSKNAKPITKTENCESFFNFFNPPQVPEDDEDIDEDAAEELQNQMEQDYDIGSTIRDKIIPHAVSWFTGEAIQGDEFGDLEDDEDDEDIEEDDDEEEEEDEDDDDDEDDEEESKTKKKSSAPKKSGRAQLGDGQQGERPPECKQQ

SEQ ID NO: 7852 - protein, 579 aa, Zea mays subsp. mays
MKREYQDAGGSDGDMGSSKDKMMAAAAGAGEQEEEDVDELLAALGYKVRSSDMADVAQKLEQLEMAMGMGGVGGAGATADDGFVSHLATDTVHYNPSDLSSWVESMLSELNAPPAPLPPATPAPRLASTSSTVTSGAAAGAGYFDLPPAVDSSSSTYALKPIPSPVAAPSADPSTDSAREPKRMRTGGGSTSSSSSSSSSMDGGRTRSSVVEAAPPATQASAAANGPAVPVVVVDTQEAGIRLVHALLACAEAVQQENFSAAEALVKQIPMLASSQGGAMRKVAAYFGEALARRVYRFRPPPDSSLLDAAFADLLHAHFYESCPYLKFAHFTANQAILEAFAGCRRVHVVDFGIKQGMQWPALLQALALRPGGPPSFRLTGVGPPQPDETDALQQVGWKLAQFAHTIRVDFQCRGLVAATLADLEPFMLQPEGDDTDDEPEVIAVNSVFELHRLLAQPGALEKVLGTVRAVRPRIVTVVEQEANHNSGTFLDRFTESLHYYSTMFDSLEGAGSGQSADASPAAAGGTDQVMSEVYLGRQICNVVACEGAERTERHETLGQWRSRLGGSGFAPVHLGSNA

SEQ ID NO: 7853 - protein, 531 aa, Archaeoglobus fulgidus DSM 4304
MREKIGFWEAVSIGIGGMIGGGIFAVLGLSVQLAKGSAPIAFLIAGIVALFTAYSYAKLSLRFPSEGGTIEFLIKAYGTGLLAGGLNILLLVSYVVMIALYSYAFGSYAANALGTPILKSFLIAFVVIFFTVLNSLGAVVSGRAEDLLVAFKLAVLVIVAAAGLAFVNPERLMPSNWADAVSIIAGGMIIFLAYEGFELIANAGGDVEHPKVLEKAFYVSVVVVIAVYVLIAIITVGTLPYEKIMEARDYALAIAAEPALGQLGFWFVTFAALASTSSAINATLYGTARASYMVAKFGELPEFVGKKLWRQAYEGLVVIPILSIILSITTNLETIATAGSGGFLLIFAAVNLAAVKLRRKVKVNPLISSAGAIMALAAFTILALRMAEENLYALAVMLSLIAASFLFEWTYRWYTGREIGRYVDRKLIEREKNLRNWEEWIPAVVDELRRRYSDSEVYLVGSLARGEAEKAGDVDLLVLTDAVENGEKEGITRDIKKKLELGPQHCLDLHFEKKSLRDEALKRAVSYRRLK

SEQ ID NO: 7854 - protein, 90 aa, Glycine max
  unsure (1)..(90): unsure at all Xaa locations
TRNTTAFFRAFATVCRVIPAVIRXGVMQLTNTLNEEHECKIRTDARLEALLMREVNESRLADYLRELQRTEDKKERYIAALKRETLTREP

SEQ ID NO: 7855 - protein, 353 aa, Pseudomonas putida
MTYNVTIEATGEIIEVEEGQTILQAALRQGVWLPFPCGHGTCATCKVQVVEGEADHGAASPFALMDMERDEGKVLACCAIPMSDMVIEADIDVDPDFAGHHVEDYRGVVSALVDLSPTIKGVHIKLDRPMTFQAGQYINLTLPGVEGSRAFSLANPPSQADEVELHIRLVEGGAATSFIHRQLKVGDAVELSGPYGQFFVRDSQAGDLIFIAGGSGLSSPQSMIFDLFERGDTRQITLFQGARNRAELYNRELFEELAARHSNFSYVPALNQAHDDPEWQGFKGFVHDAAKAHFDGRFSGHKAYLCGPPPMIDAAITTLMQGRLFERDIFMERFFTAADGAEDSTRSALFKRI

SEQ ID NO: 7856 - protein, 459 aa, Lactococcus lactis subsp. lactis
MENLQEKHEAQRGLQNRHIQLIAIAGTIGTGLFLGAGKTIQMTGPSVIFAYILIGIAMFFFLRTIGEMLYNDPSQHSFLNFVTKYSGVRTGYFTQWSYWLVIVFVCISELTAIGTYIQFWLPQVPLWLIEIVMLALLFGLNTLNSRFFGETEFWFAMIKVAAIIGMIVTAIILVAGNFHYSTVLSGKTVHDSASLSNIFDGFQLFPHGAWNFVGALQMVMFAFTSMEFIGMTAAETVNPKKSLPKAINQIPVRILLFYVGALLAIMAIFNWHYIPADKSPFVMVFQLIGIKWAAALINFVVLTSAASALNSSLFSATRNMYSLAQQHDKGRLTPFTKLSKAGIPINALYMATALSLLAPVLTLIPQIKNAFDFAASCTTNLFLVVYFITLYTYWQYRKSEDYNPKGFLTPKPQITVPFIVAIFAIVFASLFFNADTFYPALGAIVWTIFFGLYSHYKKI

SEQ ID NO: 7857 - protein, 72 aa, Zea mays; identical to SEQ ID NO: 2770

SEQ ID NO: 7858 - protein, 173 aa, Helicobacter pylori
MNLEKLEISHDANALCVVIEISKHSNIKYELDKESGALMVDRVLYGAQNYPANYGFVPNTLGSDGDPVDALVLSDVAFQAGSVVKARLVGVLNMEDESGMDEKLLALPIDKIDPTHSYVKDINDLSKHTLDKIKHFFETYKDLEPNKWVKVKGFENKESAIKVLEKAIKAYQG

SEQ ID NO: 7859 - protein, 424 aa, Brassica rapa
TLSFLLVFFVLILLPPAFSINTLSSEESLTISSNRTLVSRGDVFELGFFKTTSSSRWYLGIWYKKFPYRTYVWVANRDNPLSNSIGTLKISGSNLVLLDNSNKSVWSTNVTRGNERSPVVAELLANGNFVMRDSNNNDASEFLWQSFDYPTDTLLPEMKLGYDLKTGLNRFLISWRSSDDPSSGDYSYKLEPRRLPEFYLLQGDVREHRSGPWNGIRFSGILEDQKLSYMEYNFTETSEEVAYTFRMTNNSFYSRLTLSSTGYFERLTWAPSSVVWNVFWSSPNHQCDMYKICGPYSYCDVTTSPVCNCIQGFRPKNRQQWDLRISLRGCIRRTRLSCSGDGFARMKYMKLPETTMAIVDRSIGVKECEKRCLSDCNCTAFANADVRNGGTGCVIWTGRLDDMRNYVPDHGQDLYVRLAAADLV

SEQ ID NO: 7860 - protein, 406 aa, Escherichia coli O157:H7 EDL933
MSQPITRENFDEWMIPVYAPAPFIPVRGEGSRLWDQQGKEYIDFAGGIAVNALGHAHPELREALNEQASKFWHTGNGYTNESVLRLAKKLIDATFADRVFFCNSGAEANEAALKLARKFAHDRYGSHKSGIVAFKNAFHGRTLFTVSAGGQPAYSQDFAPLPPDIRHAAYNDINSASALIDDSTCAVIVEPIQGEGGVVPASNAFLQGLRELCDRHNALLIFDEVQTGVGRTGELYAYMHYGVTPDLLTTAKALGGGFPVGALLATEECASVMTVGTHGTTYGGNPLASAVAGKVLELINTPEMLNGVKQRHDWFVERLNIINHRYGLFNEVRGLGLLIGCVLNADYAGQAKQISQEAAKAGVMVLIAGGNVVRFAPALNVSEEEVTTGLDRFAVACEHFVSRGSS

SEQ ID NO: 7861 - protein, 157 aa, Udeniomyces puniceus
MVQAVVVLTGDSMVTGVVNFGTNRSKSEPKLLFTWEISGNDANALKRFPTVHTFGDNTNGCTSAGPHFNPFTKEHGAPEDDNRHVGDLGNVTTDTSGGAKGSKQDLFVKLIGQNSILGRTVVIHAGTDDLGKGGNAESKKTGNAGARLACGVIGLTN

SEQ ID NO: 7862 - protein, 92 aa, Oxalis tuberosa
GINISGTNGEVMPGQWEYQVGPSVGTEAGDHIWASRYILERITEQAGVVLTLDPKPIDGDWNGAGCHTNYSTKSMRDEGGFEVIKKAILNLS

SEQ ID NO: 7863 - protein, 310 aa, Phytophthora infestans
MSALTQYKPVATSEKKSGAMSFLLDLAAGGVAGGISKTVVAPIERVKLLLQVQAASTQIKPEDQYKGIVDCFVRVTKEQGVNSLWRGNLANVIRYFPTQALNFAFKDKFKKLFMDGVTKEQFWRFFMGNLASGGAAGATSLLFVYPLDFARTRLGADVGKGKSRMYTGLVNCVSTIYKSDGISGLYQGFGVSVGGIIVYRAAFFGGYDTLRDVALRDPKNAPVWQKWLVAQTVTSLAGMISYPFDTVRRRMMMQAGRKDILYTSTLDCAMKIAKNEGSGAFFKGAGSNILRGTGGAIVLVLYDEFKKMMV

SEQ ID NO: 7864 - protein, 268 aa, Catharanthus roseus
MLELRLVQGSLLKKVLESLKDLVTDANFDCSASGFSLQAMDSSHVALVALLLRSEGFEHYRCDRNPSMGMNLNNMAKMLKCAGNDDIITLKADDGSDTVTFMFESPTQDKISDFEMKLMDIDSEHLGIPEAEYHAIVRMPSAEFARICKDLSSIGDTVVISVTKEGVKFSTRGDIGTANIVCRQNTTVDKPDEATIIEMNEPVSLTFALRYLNSFTKATPLSNNVTISLSSELPVVVEYKIAEMGYIRFYLAPKIEEDDEEQSLEYQA

SEQ ID NO: 7865 - protein, 453 aa, Arabidopsis lyrata subsp. petraea
MESSISQTLSKVSDPTTALLIVVSLFIFIGFITRRRRPPYPPGPRGWPIIGNMLMMDQLTHRGLANLAKKYGGLCHLRMGFLHMYAVSSPDVARQVLQVQDSVFSNRPATIAISYLTYDRADMAFAHYGPFWRQMRKVCVMKVFSRKRAESWASVRDEVDKMVRSVSCNVGKPINVGEHIFALTRNITYRAAFGSACEKGQDEFIRILQEFSKLFGAFNVADFIPYFGWIDPQGINKRLVKARNDLDGFIDDIIDEHMKKKENQNAVDDGDVVDTDMVDDLLAFYSEEAKLVSEAADLQNSIKLTRDNIKAIIMDVMFGGTETVASAIEWALTELLRSPEDLKRVQQELAEVVGLDRRVEEADIEKLTYLKCTLKETLRMHPPIPLLLHETAEDTSIDGFFIPKKSRVMINAFAIGRDPTSWADPDTFRPSRFLEPGVPDFKGSNFEFIPFGS

SEQ ID NO: 7866 - protein, 161 aa, Narcissus pseudonarcissus
LKKGSSTDQDVEVYRGEEFDDDGRPRRTGTVWTASAHIITAVIGSGVLSLAWSMSQLGWIAGSVTLFLFSIVTFFTSSLLTDCYRSPDPVHGKRNYTYMSAVKSNLGSTKVWFCGICQYVILVGTAIGYTITASISAAAISKSGCFHKKGHEADCAVSDSL

SEQ ID NO: 7867 - protein, 506 aa, Azotobacter vinelandii
MHLRRREQRLRRGHRLQLVGGLRPHRRPRRRLRHARRDGGRLRLLRRPRGRRRRRGPRPRRRRPVADRGEADPLLRPLRGRRADLPRHGRAQGNARGARLPEAVPRTHHRRRPARRLATRRHRRRSGTADRGQRDQGQERSQAAGGRSAGRRLRVLPLSPHSIRRTIMARKISYQQAINEAMAQEMRRDESVFLIGQDIAGGAGAPGEQDAWGGVLGVTKGLYHQFPGRVLDAPLSEIGYVGAAVGAATRGLRPVCELMFVDFAGCCLDQILNQAAKFRYMFGGKAVTPLVLRAMYGAGLRAAAQHSQMLTSLWTHIPGLKVVCPSSPYDAKGLLIQAIRDNDPVIFLEHKMLYGMQGEVPEELYTVPFGEANFLREGDDVTLVTYGRMVHLAMDAAASLARQGIGCEVLDLRTTSPLDEDSILESVEKTGRLVVIDEANPRCSMATDISALVAQKAFAALKAPIEMVTAPHTPVPFTDSLEDLYIPNAAKIEAAVLKIVDKRKVA

SEQ ID NO: 7868 - protein, 95 aa, Zea mays
  unsure (1)..(95): unsure at all Xaa locations
GELSWKXIVAIFLDDPKAFFFNHVDNFXKHFPGTLTPIKDWFKDSKIPDGKPANKFGFGNKPPNKENPLKVIQKPTESWEKLVKKNIPPGKLSLA

SEQ ID NO: 7869 - protein, 60 aa, Oryza sativa
MGYVGQHGVATLRRYKYSGVDHSLVAKYILQPFWSRFVNLFPLWFPDSSISSFFFDSFNW

SEQ ID NO: 7870 - protein, 183 aa, Streptococcus pneumoniae TIGR4
MKSIGTQILQTERLILRRFVESDAEAMFQNWASSAENLTYVTWDPHPDVEITRNSICNWVASYTNLNYYKWAICLKENPEQVIGDISIVKIDEADLSCEIGYVLGKAYWGNGMMTETLKAILDFCFTQAGFQKVRARYASLNPASGRVMEKAGMSYLQTIVNGVERKGYLADLIYYGISREEC

SEQ ID NO: 7871 - protein, 219 aa, Neurospora crassa
MRSFLPLLSLGAVAQALHFFIDGTSPKCFYEELPKDTLVVGHYTAEEWDDQRHSWQKHDGINIFISVDELFDNDHRVVSQRGGPGGKFTFTAAEAGDHRICFTPTSTSGRSSWMSVNNPNGGIKLTLDMAIGESSAIESADKGKLQDLATRAKDLNNRLQDIRREQVFQREREAEFRDQSESTNARIVRWVLIQLVVLGVTCAWQLSHLRSFFIKQKLT

SEQ ID NO: 7872 - protein, 349 aa, Triticum aestivum
MKKPGKLALPSQDSTIGKFLTQSGTFKDGDLLVNKDGLRIVPQSEEGEAPPIKPLDNNHQLSIDDLDSIKVIGKGNSGTVQLVRHKWTGQFFALKVIQLNIQESIRKQMAQELKISLFTQCQYVVTCYQCFYVNGVISIALEYMDGGSLADFLKAVRTVPEAYLAAICKQVLKGLMYLHHEKRVIHRDLKPSNILINHRGEVKISDFGVSAIISSSSAQRDTFTGTFNYMAPERISGQKHGHLSDIWSLGLVMLECATGNFPYPPRESFYELLEAVVDQPSPSAPSDQFSPEFCSFISACIQKNAADRSSAQTLSAHPFLSMYDDLNIDLSDYFTTAGSPLATFKQIAL

SEQ ID NO: 7873 - protein, 119 aa, Antirrhinum majus
TIIPVPNVTSKILAKVIEYCKRHVEAAAKTDADDGQGDRDALKVFDAEFVKVDQGTLFDLILAANYLNIKSLLDLTCQTVADMIKGKTPEEIRKTFNIKNDFTPDEEEEVRRENAWAFE

SEQ ID NO: 7874 - protein, 364 aa, Streptomyces coelicolor A3(2)
MVVSEHETFSAARPSPSKPQERCPMTDSPALPAVNREWHLVTRPVGWPKPEDFALVEAEVPTPGDGQVLVRNLYVSVDPYMRGRMSAAKSYAAPYELGKPMLGGAVGEVVASNAEGIAVGDHVLHFLGWREYAAVDAKSAVKVDPDAAPLSTYLGVLGMTGLTAYAGLLRTASFKEGDSVFVSGAAGAVGSQVGQIAKLKGASRVIGSAGSDEKVKLLLDEYGFDAAFNYKNGPVSEQLRAAAPDGVDVYFDNVGGDHLEAAIGSLNLNGRIAICGAISVYNNTEPAPGPKNLARLIQTRGRIEGFLVGDHYDLQPKFVEEVGPWVRTGELKYRETVVEGIENNLEAFLGVLRGDNTGKMIVKL

SEQ ID NO: 7875 - protein, 348 aa, Staphylococcus aureus subsp. aureus MW2
MTYNIVALPGDGIGPEILNGSLSLLEIISNKYNFNYQIEHHEFGGASIDTFGEPLTEKTLNACKRADAILLGAIGGPKWTDPNNRPEQGLLKLRKSLNLFANIRPTTVVKGASSLSPLKEERVEGKDLVIVRELTSGIYFGEPRHFNNHEALDSLTYTREEIERIVHVAFKLAASRRGKLTSVDKENVLASSKLWRKVVNEVSQLYPEVTVNHLLVDACSMHLITNPKQFDVIVCENLFGDILSDEASVIPGSLGLSPSASFSNDGPRLYEPIHGSAPDIAGKNVANPFGMILSLAMCLRESLNQPDAADELEQHIYNMIEHGQTTADLGGKLNTTDIFEILSQKLNH

SEQ ID NO: 7876 - protein, 272 aa, Staphylococcus aureus subsp. aureus MW2
MKRLENKVAVVTGASTGIGQASAIALAQEGAYVLAVDIAEAVSETVDKIKSNGDKAKAYIVDIASEQQIDNFASEIREQIGHVDVLFNNAGVDNAAGRIHEYPTDVYDKIMNVDMRGTFLMTKMMLPLMMTKGGSIVNTSSFSGQAADLYRSGYNAAKGAVINFTKSIAIEYGRDGIRANAIAPGTIETPLVDKLTGTSEDKEGKAFRENQKWMTPLGRLGKPEEVGKLVVFLASDESSFITGETIRIDGGVMAYTWPGEMLSDDSWKRTLE

SEQ ID NO: 7877 - protein, 197 aa, Oryza punctata
GQTPVFPRILGHEAGGIVESVGEGVTELAPGDHVLPVFTGECKECAHCKSEESNMCDLLRINVDRGVMIGDGQSRFTINGKPIFHFVGTSTFSEYTVIHVGCLAKINPEAPLDKVCILSCGISTGLGATLNVAKPKKGQTVAIFGLGAVGLAALEGARLSGASRIIGVDLNPAKFEQAKKFGCTDFVNPKDHSKPVH

SEQ ID NO: 7878 - protein, 173 aa, Pyrococcus furiosus DSM 3638
MPVYEINGIKPKIHPTAYVDENAVIIGDVVLEEKTSVWPSAVLRGDIERIYVGKYSNIQDNVSIHTSHGYPTEIGEYVTIGHNAVVHGAKIGNYVIIGMGAIILDGAKIGNHVIIGAGALVPPNKEIPDYSLVIGVPGKVVRQLSEEEIEWTKKNAEVYVELAEKHMKGRKKI

SEQ ID NO: 7879 - protein, 326 aa, Lactococcus lactis subsp. lactis
MAVKTYIAAITEALDLALEKDKDALIFGEDVGQNGGVFRATDGLQAKYGEERVFNTPLAESGIGGMAIGLATQGFHPIMEIQFGTFIFEVFDSIAGQMSRTRYRFNNTRSNNIVVRTPYGIGTKTPEMHADSIEGLFSQIPGIRVVMPSNPADAKGLLLASIENNDPVIFLENLHLYRSLKGEVPEGYYTTPLDTAAVAKEGSDVSIIAYGGTVPLALKAAEQLEKDGIKAEVLDLRTVAPLDIESIGKTVEKTGRVVVVQEAQRTAGIAANVMAEISERFVLNLKAPIGRVSGPDSIFPFAQAENDWAVKAEDIVNKVKEVVDYD

SEQ ID NO: 7880 - protein, 332 aa, Salmonella typhimurium LT2
MIYQPDENRYHTMEYRRCGRSGVKLPAISLGLWHNFGDTTRVENSRALLQRAFDLGITHFDLANNYGPPPGSAECNFGRILQEDFLPWRDELIISTKAGYTMWDGPYGDWGSRKYLIASLDQSLKRMGLEYVDIFYHHRPDPETPLKETMKALDHLVRHGKALYVGISNYPADLARQAIDILEDLGTPCLIHQPKYSLFERWVEDGLLALLQEKGVGSIAFSPLAGGQLTDRYLNGIPEDSRAASGSRFLKPEQITADKLEKVRRLNELAARRGQKLSQMALAWVLRNDNVTSVLIGASKPSQIEDAVGMLANRRFSAAECAEIDAILEGRF

SEQ ID NO: 7881 - protein, 157 aa, Zea mays
  unsure (1)..(157): unsure at all Xaa locations
MVKAVAVLGSSDGVKGTIFFTQEGDGPTAVTGSVSGLKPGLXGFHVHALGDTTXNGCMSTGPHYNPASKEHGAPEDENXAHAGDLGNVTAGADGVANINVTDSQIPLTGPNSIIGRXAVVVHADPDDLGKGGXHELSKSTGNARWPVLAXGIIGLQG

SEQ ID NO: 7882 - protein, 158 aa, Saccharum officinarum
MATAGKVIKCKAAVAWEAGKPLSIEEVEVAPPQAMEVRVKILYTALCHTDVYFWEAKGQTPVFPRILGHEAGGIVESVGEGVTELAPGDHVLPVFTGECKECAHCKSEESNMCDLLRINVDRGVMIGDGKVPLTINGQPIFHFVGTFTFTSTPSFMSL

SEQ ID NO: 7883 - protein, 287 aa, Zea mays
PHLTLPLDHFALRVPPQPEPTAAPSTCRSDARLSDYERLSVLGHGNGGTVYKARHRRSAQPVALKLFADGDTSAAREAEILMLAADAPHVGRLHAVIPERPIAAEALQELLDLAAGHALRVVHRDLKPSNLLVGADGEVKIADFGAGKVLRRRLDPCASYVGTAAYMSPERFDPEAYSGDYDPYAADVWSLGVAILELYRGHFPLLPAGQRPDWAALMCAICFGEAPEPPAAASEEFRDFVARCLEKKAGRRASVAELLEHPFVAEREAAGAQEALAALVKEAEQEY

SEQ ID NO: 7884 - protein, 396 aa, Staphylococcus epidermidis ATCC 12228
MTQSEKIINLTNHYGAHNYVPLPIVISEAEGVWVKDPEGNTYMDMLSAYSAVNQGHRHPRIIQALKDQADKVTLVSRAFHSDNLGQWHEKICKLAGKDKALPMNTGAEAVETALKAARRWAYDVKGIEPNKAEIIAFNGNFHGRTMAPVSLSSEAEYQRGYGPLLEGFRKVEFGDVNQLKAAINKNTAAILVEPIQGEAGINVPPEGYLKTIRELCDEHQILFIADEIQAGLGRSGKLFATDWDHVKPDVYILGKALGGGVFPISVVLADNEVLDVFTPGSHGSTFGGNPLASAVSIAAIDVIIDEDLPGRSLELGEYFKSELKKIEHPSIKEVRGRGLFIGIELHESARPYCEALKEQGLLCKETHDTVIRFAPPLVITKEELDMALEKIKSVFA

SEQ ID NO: 7885 - protein, 252 aa, Glycine max
  unsure (1)..(252): unsure at all Xaa locations
MFPHKVASMAFPNPSMSVSPQKKMGRGKIEIKRIENTTXNRQVTFCKRRNGLLKKAYELSVLCDAEVALIVFSSRGRLYEYANNSVKATIERYKKACSDSSGAGSASEANAQFYQQEADKLRAQISSLQNNNRQMMGESLGPLTAKELKNLETKLEKGISRIRSKKNELLFAEIEYMQKREIDLHNNNQLLRAKIAEGERNHHNLAVLPGGSNYDSLQTSQQQFDSRGSFQVTGLQPNNQYARQDQMSLQLV

SEQ ID NO: 7886 - protein, 426 aa, Pseudomonas aeruginosa PAO1
MSKTNESLLKRRQAAVPRGVGQIHPVVAERAENSTVWDVEGREYIDFAGGIAVLNTGHLHPKVIAAVQEQLGKLSHTCFQVLAYEPYIELAEEIAKRVPGDFPKKTLLVTSGSEAVENAVKIARAATGRAGVIAFTGAYHGRTMMTLGLTGKVVPYSAGMGLMPGGIFRALAPCELHGVSEDDSIASIERIFKNDAQPQDIAAIIIEPVQGEGGFYVNSKSFMQRLRALCDQHGILLIADEVQTGAGRTGTFFATEQLGIVPDLTTFAKSVGGGFPISGVAGKAEIMDAIAPGGLGGTYAGSPIACAAALAVLKVFEEEKLLERSQAVGERLKAGLREIQAKHKVIGDVRGLGSMVAIELFEGGDTHKPAAELVSKIVVRAREKGLILLSCGTYYNVIRFLMPVTIPDAQLEKGLAILAECFDELA

SEQ ID NO: 7887 - protein, 647 aa, Brassica napus
MSSAPSPGTGSPPSPPSNSTTTTPPPASAPPPTTPSSPPPPSTIPTSPPPSSRSTPSAPPPSPPTPSTPGSPPPLPQPSPPAPTTPGSPPAPVTPPTRNPPPSVPGPPSNPSREGGSPRPPSSPSPPSPSSDGLSTGVVVGIAIGGVALLVIVTLICLLCKKKRRRDEEDAYYVPPPPPPGPKAGGPYGGQQQQWRQQNATPPSDHVVTSLPPPPKAPSPPRQPPPPPPPPFMSSSGGSDYSDRPVLPPPSPGLVLGFSKSTFTYEELARATNGFSEANLLGQGGFGYVHKGVLPSGKEVAVKQLKVGSGQGEREFQAEVEIISRVHHRHLVSLVGYCIAGAKRLLVYEFVPNNNLELHLHGEGRPTMEWSTRLKIALGSAKGLSYLHEDCNPKIIHRDIKASNILIDFKFEAKVADFGLAKIASDTNTHVSTRVMGTFGYLAPEYAASGKLTEKSDVFSFGVVLLELITGRRPVDANNVYVDDSLVDWARPLLNRASEQGDFEGLADAKMNNGYDREEMARMVACAAACVRHSARRRPRMSQIVRALEGNVSLSDLNEGMRPGQSNVYSSYGGSTDYDSSQYNEDMKKFRKMALGTQEYNATGEYSNPTSDYGLYPSGSSSEGQTTREMEMGKIKRTGQGYSGPSL

SEQ ID NO: 7888 - protein, 155 aa, Triticum aestivum
  unsure (1)..(155): unsure at all Xaa locations
VEFRRICKCLSNFGDEYGVISVTDEDLTYFAKGTDGDVYVEXKQQEEDTTIFKIDVREPVRLAFNPKYLNTFAKVFTLSGQVKLFLSKTHPLMVECKIGQKGRIRCFVAPKVEPEFQGEEEKKEAQKEEVINVGKMESDTDANKNKKRKRKLTDD

SEQ ID NO: 7889 - protein, 572 aa, Mycobacterium leprae
MFLSADVSCIEIVDINCSELRNDRRIPPQLALFCTNAANKAESAVTSHGQLPIMANRRWAPHTRRQSGRATSTCSSLMRFSASESRAHSRFECYTLVRWSIRGQGGRAISKLGFWSVVMLGINSIIGAGIFMTPGEVIKIAGPFAPIAYTLAGIFAAVLAIVFATAAKYVKTNGSSYAYTTAAFGHRIGIYVGVTHAITASIAWGVLASSFVSTLLRVAFPEKIWADNDELISVKTLTFLVFIAVLLAINIFGNLVIRWANGISALGKIFALSVFIAGGLWTIITQHVNNYVTSRSAYQPTTYSLLGVTEIGKSTAASMTLATIVALYAFTGFESIANAAEEMNTPDRTLPKAIPLTILTVGVIYILALVVAMLLGSDKIVATNHTVKLAAAVGNNTFRTIIVVGALVSMFGINVAASFGAPRLWTALSDGRILPTRLSSKNRFGVPIVAFGITAFLTLAFPLSLRFDSLNLTGLAVIARFIQFIIVPIALFALARSRTTNSVYVKRNVFTDKVLPITAVVVSAGLMVSFDYRSIFLTRGGPNYFSISLIAITFIGIPAVAYLHYYRTSGIK

SEQ ID NO: 7890 - protein, 112 aa, Glycine max
  unsure (1)..(112): unsure at all Xaa locations
MSEPPKPRLVICMGDIHGFITKLQILWSNLEASLDRSEFETATLIFLGDYCDRGPGTRHLIEFLVSLPSRYXSEGWFKGEGYENMQLQGRRWSGKIKVKFNTVKGTEPRAEF

SEQ ID NO: 7891 - protein, 276 aa, Triticum aestivum
  unsure (1)..(276): unsure at all Xaa locations
MAKQTTLDEFNAVFPKLEEVLLDHARSYKLPQEQLDWYKKSLEANPLGGKCNRGMSVPDSVSLLLEKPLTEEQYFQAATLGWMTELLQAFFLVSDDIMDSSITRRGQPCWYRQEGVGMIAINDAFMLEMAIYTLLXTYFRTHPAYVDLIELFHETTFQTELGQLCDLLTAPEDNVNLDNFSLEEYSFIVIYKTAYYSFYLPVALALHQLNLATPSNLKQAEDILIPLGEYFQIQDDYLDNFGKPEHIGKIGTDIKDNQCSWLEKQALAVAHPRSSA

SEQ ID NO: 7892 - protein, 161 aa, Oryza sativa; identical to SEQ ID NO: 686

SEQ ID NO: 7893 - protein, 339 aa, Bacillus subtilis subsp. subtilis str. 168
MTASQQQIQLARRPQGIPVHEDFRFETIPVPEPKQGEVLVKTLYVSVDPYMRGRMQDTKSYVEPFALDKALSGGVIAEVVSDGNHLKKGDIVIGNLSWQEFSAVSESALRKIDTSLAPASAYLGILGMTGLTAYFGLLDIGRPKEGETVVVSGAAGAVGSTVGQIAKIKGARVVGIAGSDEKIDYLKQELQFDEAINYKTADDIQKALQNACPDGVDVYFDNVGGPISDAVMNLLNEFARIPVCGAISSYNAESEADDMGPRVQSKLIKTKSLMQGFIVSDYSDRFSEGAKQLAEWLKAGKLHYEETITEGFENIPDAFLGLFKGENKGKQLIKVSDPS

SEQ ID NO: 7894 - protein, 428 aa, Escherichia coli CFT073
MRMSSNKELMQRRSQAIPRGVGQIHPIFADRAENCRVWDVEGREYLDFAGGIAVLNTGHLHPKVVAAVEAQLKKLSHTCFQVLAYEPYLELCEIMNQKVPGDFAKKTLLVTTGSEAVENAVKIARAATKRSGTIAFSGAYHGRTHYTLALTGKVNPYSAGMGLMPGHVYRALYPCPLHGISEDDAIASIHRIFKNDAAPEDIAAIVIEPVQGEGGFYAATPAFMQRLRALCDEHGIMLIADEVQSGAGRTGTLFAMEQMGVAPDLTTFAKSIAGGFPLAGVTGRAEVMDAVAPGGLGGTYAGNPIACVAALEVLKVFEQENLLQKANVLGQKLKDGLLAIAEKHPEIGDVRGLGAMIAIELFEDGEHSKPDVKLTAEIVARARDKGLILLSCGPYYNVLRILVPLTIEDAQIRQGLEIISQCFAEAKQ

SEQ ID NO: 7895 - protein, 359 aa, Schizosaccharomyces pombe
MSQYDVEPLLSKAAILNKYADLPQNGKVMAEYIWIDGFNHLRSKTMTLDAKPSSIDQLRVWNFDGSSTGQAPGNNSDTLLKPVAMYNDPFRRGDNILVLAACYTADGSPNGFNHRDACAKLLEKHADKETWFGIEQEYTMLDYYDRPFGWPKGGFPGPQGPFYCGVGTGRVFARDIVEAHYKACLYAGINISGINAEVMPSQWEYQVGPCAGIEMGDQLWMSRFLLHRIAEDFGVKISFHPKPILGDWNGAGCHTNVSTKDTRAEGGIKAIESYLEKFAKRHKEHIAVYGDDNDLRLTGRHETGSIDKFTYGVADRGASVRIPRSVAMNGCGYFEDRRPASSIDPYLVTGIITETMFEH

SEQ ID NO: 7896 - protein, 751 aa, Geobacillus stearothermophilus
MENQNRQNAAQCPFHGSVTNQSSNRTTNKDWWPNQLNLSILHQHDRKTNPHDEEFNYAEEFQKLDYWALKEDLRKLMTESQDWWPADYGHYGPLFIRMAWHSAGTYRTGDGRGGASTGTQRFAPLNSWPNNANLDKARRLLWPIKKKYGNKISWADLFILAGNVAIESMGGKTIGFGGGRVDVWHPEEDVYWGSEKEWLASERYSGDRELENPLAAVQMGLTYVNPEGPDGKPDPKAAARDIRETFRRMGMNDEETVALIAGGHTFGKAHGAGPATHVGPEPEAAPIEAQGLGWISSYGKGKGSDTITSGIEGAWTPTPTQWDTSYFDMLFGYDWWLTKSPAGAWQWMAVDPDEKDLAPDAEDPSKKVPTMMMTTDLALRFDPEYEKIARRFHQNPEEFAEAFARAWFKLTHRDMGPKTRYLGPEVPKEDFIWQDPIPEVDYELTEAEIEEIKAKILNSGLTVSELVKTAWASASTFRNSDKRGGANGARIRLAPQKDWEVNEPERLAKVLSVYEDIQRELPKKVSIADLIVLGGSAAVEKAARDAGFDVKVPFFPGRGDATQEQTDVESFAVLEPFADGFRNYQKQEYSVPPEELLVDKAQLLGLTAPEMTVLVGGLRVLGANYRDLPHGVFTDRIGVLTNDFFVNLLDMNYEWVPTDSGIYEIRDRKTGEVRWTATRVDLIFGSNSILRSYAEFYAQDDNQEKFVRDFINAWVKVMNADRFDLVKKARESVTALQDALSYRSNTAVRLQ

SEQ ID NO: 7897 - protein, 441 aa, Bifidobacterium longum DJO10A
MGHDLSQDAEIWDDAYKLDRAHVFHSWHAQRNLDPTEVVTGHGVWLKYGDGREMLDFTSQQVNVNIGYQHPKVIEGIKKQAELLCTVGPDYANLARGRAASLVARRAPEGFDKVFFTNAGADANENAMRAARLFTGRDKILSSYRCYHGNTGAAISATGDWRRKPNDYSRGHVHFFTPYLYRSEFSATTQEEECERALAHLEHVIQFEGPDTIAAVLLESVPGTAGIIIPPKDYFKGVREITKKYSILMITDEVMAGFGRTGFWFALDDYDYTPDIISFAKGCNSGYVPAGGVIMSDPVAHRFDDIVFPGGLTYSGHPLAMGAIVATQEAMEEEHIVDNAYTIGKDVLGPQLTALYDKHPKIGEVRGKGVFWAVEMVADRTTKEPLDDATMKQIVAEGDKRGLILGVHNNRIHVTPPCVISADEATQGVEILDQVLTAAGC

SEQ ID NO: 7898 - protein, 929 aa, Oryza sativa (japonica cultivar-group); identical to SEQ ID NO: 6648

SEQ ID NO: 7899 - protein, 384 aa, Glycine max
MAKEGPNWDGLLKWSIAHSDGTRPTRNLSEEDRRWFMEAMQSQTIDVVKRMKEITLVMQTPEQVLKDQGVTPADIEDMLDELQEHVESIDMANDLHSIGGLVPLLGYLKSSHANIRAKAADVVTTIVQNNPRSQQLVMEANGFEPLISNFSSDPDVTVRTKALGAISSLIRHNKQGITVFRLANGYAALKDALASENVRFQRKALNLIHYLLHENNSDCNIVNELGFPRMLMHLASSEDSDVREAALRGLLQLAHNAKDGKDGNEKDSAKIKQLLQERINNISLMSAEDLGVVREERQLVDSLWSTCFNEPSSLREKGLLVLPGEDVPPPDVASKYFEPPLRSSTANPSSKKDPEKNEIPLLLGSGPSPTYTNNQGSNKGDASS

SEQ ID NO: 7900 - protein, 354 aa, Neurospora crassa
MASDSPVVPTAYEPKDMKFRYLGNTGLQVSIFSLGGWLTYGGTQKGEIVKKCLQTAWNHGIQTFDTAEVYANGASEVEMGQALKELGWPRDEYVLTTKVFFGTGRKEPNTRGLSRKHIVEGLKASVNRLQTPYVDVVFAHRPDAATPMLEIVEAFTQVIRNLNLAYYWGTSEWSAVQIKEAIHLADKHNLIAPVVEQPQYNAFHRERFENEYAPLFKEHGYGTTIWSPLASGLLTGKYNDGIPEDSRFATNKAFFENTIKSLQSEEGQAKIEKVRKLTKIAERLGATVTHLALAWAAKNPNVSTVILGATKVEQIEDNLKALPLIDKLTPEIMEEIESVLDNKPTPPATYGRDR

SEQ ID NO: 7901 - protein, 342 aa, Sinorhizobium meliloti
MAVLVTGGAGYIGSHMVWSLLDGGEAVVVLDCLSTGFRWAVAPEARFYFGDVGDRALLQRVFAENEIDSVVHFAGSAVVPESVANPLAYYENNTANTRTLIAATVEAGIRHFVFSSTAAVYGTQDTPDPVSETAALRPQSPYGRSKLMSEMMLQDAAAAHDFRFVALRYFNVAGADPLGRAGQSTLGATHLIKVACEAALGRRRKIDVLGTDYPTADGTGVRDYIHVSDLVAAHRSALAYLRAGGEPLVANCGYGHGFSVLQVLDTVRQVSGRDFMVDYAPRRPGDPAQIVADPSVARLKLDWVPTHASLEHIVRSAFDWESHLSRKNSFDEEQDERLIANG

SEQ ID NO: 7902 - protein, 186 aa, Zea mays
MASLGLPGPSSYHDLCCYGAGIAGNIFAFVLFISPLPTFRRIVRNGSTEQFSATPYIYSLLNCLVCMWYALPFVSYGVVLVATVNTIGAAFQLAYTAVFIAYADAKKRLKVSVLLAGVFCVFGLIVYVSMALFDPKPRRTFVGYLSVASLIFMFASPLSIINLVIRTKSVEYMPFYLSLSMSLMSM

SEQ ID NO: 7903 - protein, 340 aa, Xanthomonas axonopodis pv. citri str. 306
MKALVKREANKGIWLEQVPVPTPGPNEVLIKLEKTAICGTDLHIYLWDEWSQRTIEPGLTIGHEFVGRVAELGSAVTGYQIGQRVSAEGHIVCGHCRNCRGGRPHLCPNTVGIGVNVNGAFAEYMVMPASNLWPIPDQIPSELAAFFDPYGNAAHCALEFDVIGEDVLITGAGPIGIIAAGICKHIGARNVVVTDVNDFRLKLAADMGATRVVNVSKTSLKDVMADLHMEGFDVGLEMSGNSRAFNDMLDCMYHGGKIAMLGIMPRGAGCDWDKIIFKGLTVQGIYGRKMYETWYKMTQLVLSGFPLHKVLTHQLPIDDFQKGFDLMEEGKAGKVVLSWN

SEQ ID NO: 7904 - protein, 63 aa, Zea mays
SSCHKASKGVRRKQLNDLFSSIRSLLPDADHAKKLSIPTTVSRVLKYIRELRKQVDNLERRRR

SEQ ID NO: 7905 - protein, 156 aa, Zea mays
  unsure (1)..(156): unsure at all Xaa locations
MAASSTATSVHDFIVKDASGKDVDLSTYKGKVLLIVNVASQCGLTNSNYTELAQLYEKYKDQGFEXPGTNEEIVQFACTRFKAEYPIFDKVDVNGNNXAPIYKFLKSSKGGLFGDSIKWNFSKFLVDKEGRVVDRYAPTTSPLSIEKDIKKLLGSS

SEQ ID NO: 7906 - protein, 337 aa, Rhodopseudomonas palustris
MTVLVTGGAGYIGSHTVLALVEAGESVVVIDNLSTGFSQFVPEGVPLFIGDAGDENLVDGVIASHRVDAIIHFAGSVIVSASMRDPLGYYRNNTSTSRSLLSAATRRGVKNFIFSSTAAVYGNPDRIPVGEDAPTRPLSPYGRSKLMTEIMLHDAAEAYGVNYVALRYFNVAGADPLGRVGLATEGATHLIKIAVEAATGQRSRIDVYGTDYPTTDGSCIRDFIHVTDLAEAHGAALGYLRAGGGPVTLNCGYGHGYSVFETIDAVKRVAGRNFAVAAASRRPGDIMTMIADTSRIRRTLDWIPRYDDLDTIAAHALGWEEKLLRQRQAVELQAIPA

SEQ ID NO: 7907 - protein, 698 aa, Solanum demissum
MSLNRTCNSSFWTKEEDKAFENALAVFSGDNDKFLKIAAAVPGKSLQEIIDHYNVLVEDINDIESGKVPLPKYERMQSSSSCRRRSLGAGVERRKGLPWTAEEHRSFLQGLAKHGKGDWRGISRNFVFSRTPTQVASHAQKYYSRLNDNNAKRRKSIHDVTSVGAANITEPSQGQKSDELTGPCGGQSQWPIADYVTEAFDTGMLSLPGSVTNCTTDAIEGPSAVNPEKFPLVAALGSELNSSFPGVDEFLQSVEDLIIVPAEGTSGVCHGVDTRTSPSLSVQPSVTGGTGMYTHPVSFPDVHEFLQEVEDLITVPAEGTSGACHGIDTRTSPSLSLQSSVAGGTRMYTHSVTVPAEGTSGVRCGIDTRTSPSLSLQPSVAGGTRMYPHPVNVLAEGTSGASHGVDTRTSPSLSLQPSVAGGSRIYPHPVNVPAEGISGVSHGVDTRTSPSLSLQPSVGGGTGMYTHPVTVRVEGTSGARRGVDTRTSPSLSLQPSVVGGIGMYTHPIIVPAEGTSGTRRGVDTRTSPSLSFQPSVGGGTGMYTHPVTVLAEGTSGVRCGVGTRTSPSLGLQPSVAGGTRMYTHAVNNVGYDLEELMTKQLVGASQEGPSINTASLPSPIADHIGLHGCTTSSSVAKNGFVSTMEAPGGGFSVDSMQTPSIPGHIGGGTYPCWEPSSKDDSIFDLEYLYTDHMFGFRK

SEQ ID NO: 7908 - protein, 922 aa, Zea mays
  unsure (1)..(922): unsure at all Xaa locations
IRHEGYDRVMAYKFHEDEHGEVFAEITKPGIEPYIGLHYPATDIPQAARFLFMKNKVRMICDCRARSVKIIEDEALSIDISLCGSTLRAPHSCHLKYMENMNSIASLVMAVVVNENEEDDEPEPEQPPQQQKKKRLWGLIVCHHESPRYVPFPLRYACEFLAQVFAVHVNKEFELEKQIREKSILRMQTMLSDMLFKESSPLSIVSGSPNIMDLVKCDGAALLYGDKVWRLQTAPTESQIRDIAFWLSEVHGDSTGLSTDSLQDAGRHXSPPPPPHPGAASLGDMICGMAVAKITSKDILFWFRSHTAAEIKWGGAKHDPSDKDDNRRMHPRLSFKAFLEVVKTKSLPWSDYEMDAIHSLQLILRGTLNDASKPAQASGLDNQIGDLELDGLAELQAVTSXEMTRREGNQQTVPITAQDGSGLEHWMWNAAMTKLTGWHRDEVIDRMLLGEVFDSSNASCLLKSKDAFVRLCIIINSALAGEEAEKAPIGFFDRDGKYIECLLSIDLYGCSRGMHDHVAGLCFVPLXSFLHKLVMDKFTRVEGDYRAIIHNPNPLIPPIFGADQFGWCSEWNAAMTKLTGWHRDEVIDRMLLGEVFDSSNASCLLKSKDAFVRLCIIINSALAGEEAEKAPIGFFDRDGKYIECLLSVNRKVNADGVVTGVFCFIHVPSDDLQHALHVQQASEQTALRRLKAFSYMRHAIDKPLSGMLYSRETLKGTGLDEEQMRQVRVADNCHRQLNKILADLDQDNITDKSSCLDLDMAEFVLQDVVVSAVSQVLIGCQGKGIRVACNLPERSMKQKVYGDGIRLQQILSDFLFVSVKFSPAGGSVDISSKLTKNSIGENLHLIDFELRIKHQGAGVPAEILSQMYGEDNREQSEEGLSLLVSRNLLRLMNGDIRHLREAGMSTFILTAELAAAPSAAGH

SEQ ID NO: 7909 - protein, 751 aa, Geobacillus stearothermophilus
MENQNRQNAAQCPFHGSVTNQSSNRTTNKDWWPNQLNLSILHQHDRKTNPHDEEFNYAEEFQKLDYWALKEDLRKLMTESQDWWPADYGHYGPLFIRMAWHSAGTYRTGDGRGGASTGTQRFAPLNSWPNNANLDKARRLLWPIKKKYGNKISWADLFILAGNVAIESMGGKTIGFGGGRVDVWHPEEDVYWGSEKEWLASERYSGDRELENPLAAVQMGLTYVNPEGPDGKPDPKAAARDIRETFRRMGMNDEETVALIAGGHTFGKAHGAGPATHVGPEPEAAPIEAQGLGWISSYGKGKGSDTITSGIEGAWTPTPTQWDTSYFDMLFGYDWWLTKSPAGAWQWMAVDPDEKDLAPDAEDPSKKVPTMMMTTDLALRFDPEYEKIARRFHQNPEEFAEAFARAWFKLTHRDMGPKTRYLGPEVPKEDFIWQDPIPEVDYELTEAEIEEIKAKILNSGLTVSELVKTAWASASTFRNSDKRGGANGARIRLAPQKDWEVNEPERLAKVLSVYEDIQRELPKKVSIADLIVLGGSAAVEKAARDAGFDVKVPFFPGRGDATQEQTDVESFAVLEPFADGFRNYQKQEYSVPPEELLVDKAQLLGLTAPEMTVLVGGLRVLGANYRDLPHGVFTDRIGVLTNDFFVNLLDMNYEWVPTDSGIYEIRDRKTGEVRWTATRVDLIFGSNSILRSYAEFYAQDDNQEKFVRDFINAWVKVMNADRFDLVKKARESVTALQVLFNTRSGTVAKLQ

SEQ ID NO: 7910 - protein, 520 aa, Lycopersicon esculentum
MAKITSLIGSGIVAATNQVGPHVKHIPAVGNLQKQIVSDQIQVRWSSTETSLKNDISATDVRGYKGHDMLAPFTAGWHSTDLEPLVIQKSEGSYVYDVNGKKYLDALAGLWCTSLGGNEPRLVAAATKQLNELAFYHSFWNRSTKPSLDLAKELLDLFTANKMAKAFFTNSGSEANDTQVKLVWYYNNALGRPDKKKFIARTKSYHGSTLISASLSGLPALHQQFDLPAPFVLHTDCPHFWRFHQPGETEEEFSTRLANNLENLILKEGPETIAAFIAEPVMGAGGVIPPPATYFEKVQAILKKYDILFIADEVICGFGRLGTMFGCEKYNIKPDLVSVAKALSSGYMPIGAVLVSPEVSDVIYSQSNKLGTFSHGFTYSGHPVSCAVALETLKIYKERNIIEQVNRISPKFQEGLKAFSDSPIIGEIRGTGLLHGTEFTDNKSPNDPFPPEWGIGAYFGARCEKHGVLVRVAGDNIMMSPPYILSLEEIDELIIKYGKALKDTENRVEELKSQKKIKSS

SEQ ID NO: 7911 - protein, 437 aa, Brassica rapa
TFSVLLVFVVMFLFHPALSIYINTLSSTESLTISSNRTLVSPGDVFEFGFFKTNSSSRWYLGLWYKKLPYRTYVWIANRDNPLSNSIGTLKISDMNLVLLDHSNKSVWSTNLTRGNERSPVVAELLPNGNFVIRYFNNNDASGFLWQSFDYPTDTLLPEMKLGYDLKKGLNRFLTSWRSSDDPSSGEFSYKLEPRRLPEFYIFIEDIPVHRSGPWNGIRFSGILEDQKLSYMVYNFTENSEEVAYAFRMTNNSIYSRLTLSSEGYFQRLTWTPSSVVWNLFWSSPANVECDLYRVCGPNGYCDMNTSPSCNCIQGFNPRNMQQWDLRDPSSGCIRRTLLSCGGDGFTRMMKVKLPDTTMAIVDRSIGLKECKKRCLGDCNCTAFANADTRNGGTGCVTWTGELEDIRNYIRDGQDLYVRLAAADLVKKRNANGKIVS

SEQ ID NO: 7912 - protein, 289 aa, Prochlorococcus marinus str. MIT 9313
MSTPTIQWYPGHIAKAEQQLSKNLDKIDLVIEVRDARIPIATAHPQLQRWIKGKQHLLVINRRDMISSAARQSWDRWFRDQAQTPWWCDAKAGTGVKQVQQAAIRAGDQLNQRRRSRGMRPRPVRALTLGFPNVGKSALINRLVRQKVVESARRAGVTRTLRWVRLGQDLDLLDAPGVLPPRLDDQQAALHLALCDDIGQAAYDVELVALALLETLTVLEKQAAAGVVAGILKQRYGINLAGDQADAHAWLMTVAERHTSGDTERMAQRLLDDFRRALLGPIALELPLP

SEQ ID NO: 7913 - protein, 407 aa, Oryza sativa
  unsure (1)..(407): unsure at all Xaa locations
MAGDRLSWSGLLKWSLSYADGTRPSRAIRXGGCLRRVDCCWGNWNVAGSFFPSEEERRWLAEAVERQMVDVVSRMREIALLMSTPLSVLEAHGITPDDIEGLLAELQVHVESIDMANDLHSVGGLVPVIKYLRNSNARIRARAADVVTTVVQNNPTSQQLVMEASGFDPLLSNFTSDPDLTARIKALGALSSLIRNNKPGVSAFRLANGYAGLRDALTSESARFQRKALNLTNYLLSESHSGCSXVFAQLGFPRLMMHLVSSDDLGVXREAALGGLLELARDTTLGSRSLTPDHAPLVRLASARIERIRMMAPEDLDAAREERQLVDSLWITCYHEPSTLHVEGLLVLPGEECLPPDVAGRFFEPLRRSSARRAPSNERSDPGDGTGGGMMLLLGPSPGSRSNSGSN

SEQ ID NO: 7914 - protein, 243 aa, Mesorhizobium loti
MGAPAQSTEIRMHGSITARCRRLTLVSAAALALTIIPYRISLHGSAPGIDAASAQAAKGGNGGGNGGGNGGGNGGGNGGGNGGGNGGGNGGGNGGGNGGGNGGGNGGGNSGGNGGGDSGGNSGGNGGGNGGGNSDGNGGGDSGGNSGGNGGGNSGNSGGGNSGTEGGGETSGLGKGQVDKGVSHVNGTTGDKVEVSDNKITVTHPDGITEKIENGRFKMKDALGRTIIDRRATPADVSRLKAL

SEQ ID NO: 7915 - protein, 663 aa, Neurospora crassa
MPRDDLSIDFVRKMPPAAELDPALILDEWIHNTQNLPEEIRFMQDEIAEKDRQYDKLVKEIEKNDERIQKFIKANGSFQPNPKEEEYRATIIKNFDLAEQLSKEKLELTRKLQHTFDKHVRALDKQIKSLYDRGEPGFTDPDELPSLVRDSAANITSTPTLLRPVNGNHPISSALNGLANGTGSNAARSNQIRNIQASHHHSASAPATPAATIILNQRARESSAGPGGAVRKGAVRSNSGLSLQTSGIGRHASLGPGTPKSSTTSGGVQRAGSAGPRGIGKGSTSSTSRKSVPSGSSAASRKKGSSVPTAGSGSGSAGGVSASGVSGSGAGGGSSHKSNLSRVLKRAGTGTSGSGAKNSPNTTSRANSTGDSDLSDADSNLSGSESDHRRIGTGRNTPIGGGSHSRSASHHHTNSSFSHKGGADDLNHPHHPSHGHRPSSSLASNGGGGGGTGGGSGGPFQSRNPGGSGGGPLSNPSHPQSISSHNRSRSSTHHQLQEMHRSPSLSSNNRRRNNPGLTDEDDEDVDDDDMDLNVDQEDGMDLDDEEAGDDRKYCLCQNVSFGDMVACDNDECPYEWFHWSCVGLKSEPNGTWYCPVCAKNMERDNTSNSNNNINMNNNNSNNSSSSQGRSDNKKSGSGGSGGGGNSSSQGGGGNNSSQGGGGQ

SEQ ID NO: 7916 - protein, 389 aa, Gossypium hirsutum
MGFQRNILGFLFLILASLTSLSSSLPSEYSIVEHEIDAFLSEERVLEIFQQWKEKHRKVYRHAEEAEKRFENFKGNLKYILERNAKRKANKWEHHVGLNKFADMSNEEFRKAYLSKVKKPINKGITLSRNMRRKVQSCDAPSSLDWRNYGVVTAVKDQGSCGSCWAFSSTGAMEGINALVTGDLISLSEQELVECDTSNYGCEGGYMDYAFEWVINNGGIDSESDYPYTGVDGTCNTTKEETKVVSIDGYQDVEQSDSALLCAVAQQPVSVGIDGSAIDFQLYTGGIYDGSCSDDPDDIDHAVLIVGYGSEDSEEYWIVKNSWGTSWGIDGYFYLKRDTDLPYGVCAVNAMASYPTKQFSSPSPYPSPSVLHRTFFNFTTTTTFISFTK

SEQ ID NO: 7917 - protein, 514 aa, Catharanthus roseus
ARVNFSLTSPIFLLLSSLFLIILLNKLMRGNKIQKGKKLPPGPKKIAIIGNLPSNGRFTSLIVFLNNLAEKYGPIMHLRIGQLSAVIISSAEKAKEILNTHGVRVADRPQTTVAKIMLYNSLGVTFAPYGDYLKQLRQIYAMELLSPKTVKSFWTIMDDELSTMITSIKSEVGQPMILHDKMMTYLYAMLCRATVGSVCNGRETLIMAAKETSALSASIRIEDLFPSVKILPVISGLKSKLTNLLKELDIVLEDIISAREKKLLSQPQQPLMLDEEDMLGVLLKYKNGKGNDTKFRVTNNDIKAIVFELILAGTLSSAAIVEWCMSELMKNPELLKKAQDEVRQVLKGKKTISGSDVGKLEYVKMVVKESVRLHPPAPLLFPRECREEFEIDGMTIPKKSWVIINYWAIGRDPKIWPNADKFEPERFSNNNIDFYGSNFELIPFGAGRRVCPGILFGTTNVELLLAAFLFHFDWELPGGMKPEELDMNELFGAGCIRENPLCLIPSISTVVEGN

SEQ ID NO: 7918 - protein, 380 aa, Azotobacter vinelandii
MSNSPDSSTRPGPAHVSRTHRTPAKPSEQERPFMKALVLEKQHDLKIRDIDLPTPPVGPDDVRIRIHTVGVCGSDVHYYTHGRIGHFIVDRPLVLGHEAAGTVVEVGSGVTRLAVGDRVCMEPGIPDPKSKASRLGLYNVDPSVVFWATPPVHGCLTPEVVHPAAFVYKLPDNVGFAEGALVEPFAIGMQAAVKARIKPGDVAVVIGAGTIGMMTALAALAGGASRVLVSDLMVEKLAIAQRYEGITAVNVRERSLRDAVAEVTDGWGADVVFEASGSARAYGDALAAVCPGGALVLVGMPVEPVPFDVVAAQAKEIRIETVFRYANVYERAVNLIASGKVDLKPLVSATYPFERGVEAFERAASARPGDVKVQITFGDG

SEQ ID NO: 7919 - protein, 389 aa, Lactobacillus plantarum WCFS1
MTMQHVFPTYQRFPFAITDGQGVHLTDNHGKTYLDFTAGIGVCNFGYHQPQIQAAVTQQLTHIWHTSNLYENELQDAVAGLLANGEERLVYFANSGTEANEAALKLARKYTGKTGILAFQHSFHGRTYGAMSMTGNPHIQAGYAPLVPGITFATYNDDAALDKITPELAAVILEVVQGEGGVFAGQTAWLQAVNAKCQATGVLLIIDEVQTGIGRTGYRMAYEGYGLDPDIYTVAKGLANGLPVGAMVGRRQLATAFGPGSHGSTFAGNAVAMAAAKCVLPQLTPALLTTVRAHAKLVWQSLATQVEPIPVVKQITGKGLMIGIHLDEQIPVNQVITRLQVEGLLTLSAGDNTLRLLPPIVMQPADLLAGIALIAKVLTTLTTEVTTNE

SEQ ID NO: 7920 - protein, 873 aa, Zea mays
WCAIDYGLRLRPGGCVFLCIAEKEVGQKSKGLMDINESLRVLAKLREASWTPPESVHHARLSYDAPRFSYDGKEATSKLREVPRLSLDIKEGHLWNREIDSRLDPSLSSADRNSNTVTGSNAAFETQQEQPACKRLPSVVAKLMGLEELPEHNQSTASSHACNTVQENKQDAMLNSLSISYQYEHAPQQERNPDSTVRNLPNSKFPVQTAPWKQQERIVLPRKLPKGSKGAHGREPAAPWNQLKDLDFQQPNKDLRALKQILDSAKGLLENKKREEAFMPKLYNGNHDDQEMASANMRLNRNTNNMWMPEESNAESSFKSPIVIMKPSKSANLYSKVDSSVFPLGGSSDLPQPQTSNSTDRRKASTINRTAKGQYAKLSPRVPTSQPLVSCDRRSYGRNDDSSNNQKSSSLLVTESSTRRQQLPRNSSVSMQKNKNSTSPKLLQRKLDPERRARPPIPSAESNKSERQSGDRNNSETVSPRSKFRRKLVRPQGDDGMPIGLNNRTRSLYQHDNDMSIRSDGSISVASELDIISNDRSTGVNISNFEQGIGTPSGRNPQKVKTSYDANMDVPSVDPSAAISERPSPVSVLDSSFDQEDLFPTSRTPNSLAVDDERETLEEPWKPSVAIQSKNNKLANVASLLEKLQQLSVNKDEDAPPVDHIAFLCETESPDHRYVSEILLASGLLMKDLGSGQTGLQLHSSGYPINPDLFHVLEQRKAGWVSTPDGIHQSRSGTKSDPRRAHRKLMFDTVNELLLQKFEKETAVYALSSFTRAKDPPAKTFSGQQLPKFISSGIEELDMERSSISQKDSSVIPDAEILRRLQGWTSFSKELPGMVLEIERSIFKELVDEVVHGESADGPEMKAAGRRRRRLFA

SEQ ID NO: 7921 - protein, 439 aa, Methanosarcina acetivorans C2A
MFEVKYNSGNYMGRESELKRDLSLLEITLVGIGDILGAGIYVLMGKAAGLAGNMVWASFLFAGFTASLSALSYMELSSMYPRAGAEYVFARKAFGERIGLFVGLLVIYYVAITASAVALGFGRYFSNIFGGGILIGAISLYILLSLVMVYGIKESARLAILMTFIELSGLMIIIYVGIPYLGTVNYFETPSLSGVFEASALIIFAFLGFEDIVRLSQETKDAEKTTPKALLISIFFTIFLYICVAVASVSVLDFQVLGISEIPLAEVAAVAFGEKAFVLLSWIALFSTMNTVLVVMLGGSRIVYGMANSGSLPKILARVHQKLKTPWTAICGIAFFSSLFVFLGDIATVANIANFMIFIVFFIVNISLIKLRYTDPERKRPFRVPVSIGRFPIFPALGALSAVFLFSQIGKEVMLYGFFLAGISALLVLLKTRKRENEL

SEQ ID NO: 7922 - protein, 614 aa, Zea mays
MAVMAEVVSTTGAALRSPATQQPAAAGAAKGTDAEKLQFIEDMTSNVDAVQERVLGEILARNADTEYLSSRCGLAGATDRATFRAKVPMATYEDLQPYIRRIADGDRSPILSGHPVSEFLTSSGTSGGERKLMPTIEDELNRRQLLYSLQMPVMNLYVPGMDKGKALHFLFVKSETKTPGGLAARPVLTSYYKSNHFRNRPFDAYNNYTSPTAAILCADAFQSMYAQMVCGLCQRQDVLRVGAVFASGLLRAIRFLQLNWEQLAEDIEAGSLTPRVTDPSVREAVAGILRPDPAVAELVRSECSGGDWAGIVTRIWPNTKYLDVIVTGAMAQYIPTLKHYSGGLPMACTMYASSECYFGLNLRPMCDPSEVSYTLMPNMCYFEFLPMGGAVDASQLVDLGRVERGREYELVITTYAGLNRYRVGDVLQVTGFHNSAPQFRFVRRKNVLLSIESDKTDEAELQRAVERASALLRPHGAAVVEYTSQAYTKSIPGHYVVYWELLQAKGGAAVDGETLEGCCLEMEEALNAVYRQSRVADGSIGPLEIRVVRPGTFEELMDYAISRGASINQYKVPRCVTFPPIIELLDSRVVSSHLSPALPHWTAGQRSGSGSGSD

SEQ ID NO: 7923 - protein, 356 aa, Brassica rapa
ELGFFKPSGRSRWYLGIWYKKVPRRTYAWVANRDNPLPNCSGTLKISGNNLVLLGQSNNTVWSTNLTRCNLRSPVIAELLPNGNFVMRYSNNNNSSGFLWQSFDFPTDTLLPDMKLGYDLKTGRNRFLTSWRSYDDPSSGNTTYKLDIRRGLPEFILINQRVEIQRSGPWNGIEFSGIPEVQGLNYMVYNYTENNKEIAYSFHMTNQSIHSRLTVSDYTLNRFTWIPPSQGWSLFWALPTDVCDSLYLCGSYSYCDLTTSPNCNCIRGFAPKNSQQWDLKDGSQGCVRRTRLSGSGDGFLRLNNMKLPDTKTATVDRTIDVKKCEERCLSDCNCTSFAIADVRNGGLGCVFWTREL

SEQ ID NO: 7924 - protein, 348 aa, Glycine max; identical to SEQ ID NO: 5780

SEQ ID NO: 7925 - protein, 423 aa, Schizosaccharomyces pombe
VSWNYFINYFVTFPLELTTCAITFRYWTDINSAAWISIFLVVIIIVNLFGVRAYGEVEFILSTVKVVATFGFIILAIIINCGGVPTDHRGYIGGSIIKHKPFRHGFKGFCSVFTTAAFSFSGTEVIGLAAAEVDNPQKALPHAVKQVFWRIAIFYVVSLILIGLLISPDDPNLMGNGSTSVSPFVLAIKEANIKGLPSVFNAVIIISVVSVTNSSTYTAGRTLHGMANLKQAPSFFKYTDRLGRPLLAMIVVLLFGFFAYINEADKNGNDVSDTVFNWLLALSGLSNFFTWGSICLCHIIFRLAFKKQGHSLKELGFVSPMGIWGSCIGLFFNILCLMAQFYVSLFPIGGKPNANDFFQGYLAAPVTLAFFIGYKIYDRSHIPSLDKLDITTGLKTYENLDEEEDEPTTASKRIFKKISSVFC

SEQ ID NO: 7926 - protein, 213 aa, Glycine max
  unsure (1)..(213): unsure at all Xaa locations
VPVFTFTEVIHLGQESRRXCLISLDTRKHYMYEAIKSDDIATLVYTSGTTGNPKGVMLTHQNLLHQIKNLGDIVPAEVGDRFLSMLPSWHAYERACEYFIFSCGVEQVYTTVRNLKEDLGHYQPHYLISGPLVYETLYSGIQKQISTSSLVRKLGALTFIRVSLRYMECKRIYEGKCLTKDQKPPSYLHSILDWLWARVVATILFPVHLLAKI

SEQ ID NO: 7927 - protein, 245 aa, Paxistima myrsinites
ALSIAGAVQSQKLAVRAISQLQSLPGGDIKLLCDTVVESVRDLTGYDRVMVYKFHEDEHGEVVAESKRPDLEPYIGLHYPATDIPQASRFLFKQNRVRTIVDCHASPVRVIQDDGLMQPLCLVGSTLRAPHGCHAQYMENMGSIASLAMAVIINGNDEEIIGGRNATRLWGLVVCHNTSARCIPFPLRYACEYLLQLFGLQLNMELQLAAPLSKKHVLKTQTILYDMLLHDSPTGIVTQSPSIMD

SEQ ID NO: 7928 - protein, 394 aa, Zea mays subsp. mays
LGAERRARLPPGEMGWPLVGGMWAFLRAFKSGKPDAFIASFVRRFGRTGVYRSFMFSSPTVLVTTAEGCKQVLMDDDAFVTGWPKATVALVGPRSFVAMPHDEHRRIRKLTAAPINGFDALTGYLPFIDSTVTSSLRAWADHGGSVEFLTELRRMTFKIIVQIFLGGADQATTRALERSYTELNYGMRAMAINLPGFAYRGALRARRRLVAVLQGVLDERRAARAKGVSGGGVDMMDRLIEAQDERGRRLDDDEIIDVLVMYLNAGHESSGHITMWATVFLQENPDMFARAKAEQEAIMRSIPSSQRGLTLRDFRKMEYLSQVIDETLRLVNISFVSFRQATRDVFVNGYLIPKGWKVQLWYRSVHMDPQVYPDPTKFDPSRWEGHSPRAGTFL

SEQ ID NO: 7929 - protein, 739 aa, Listeria monocytogenes
KTVLGKTNVTDTVSQTDLDQVTTLQADRLGIKSIDGLEYLNNLTQINFSNNQLTDITPLKDLTKLVDILMNNNQIADITPLANLSNLTGLTLFNNQITDIDPLKNLTNLNRLELSSNTISDISALSGLTSLQQLSFGNQVTDLKPLANLTTLERLDISSNKLSDISVLAKLTNLESLIATNNQISDITPLGILTNLDELSLNGNQLKDIGTLASLTNLTDLDLANNQISNLAPLSGLTKLTELKLGANQISNISPLAGLTALTNLELNENQLEDISPISNLKNLTYLTLYFNNISDISPVSSLTKLQRLFFYNNKVSDVSSLANLTNINWLSAGHNQISDLTPLANLTRITQLGLNDQAWTNPPVNYKVNVSIPNTVKNVTGALIAPATISDGGSYAEPDITWSLPSYTNEVSYTFNQSVTIGKGTTTFSGTVKQPLKAIFNAKFHVDGKETTKEVEAGNLLTEPANPVKEGHTFIGWFDAQTGGTKWNFSTDKMPTNDIDLYAQFSINSYTATFDNDGVTTSQTVDYQGLLQEPTAPTKEGYTFKGWYNAKTGGDKWDFATSKMPAKNITLYAQYSANSYTATFDVDGKTTTQAVDYQGLLKEPKTPTKAGYTFKGWYDEKTDGKKWDFATDKMPANDITLYAQFTKNPVAPPTTGGNTPPTTNNGGNTTPPSANIPGSDTSNTSTGNSASTTSTMNAYDPYNSKDASLPTTGDSDNALYLLLGLLAVGTAVVLTKKN

SEQ ID NO: 7930 - protein, 142 aa, Triticum aestivum
MAGIGPIRQDWEPIVVRKKAQNAADKKDEKAVNAARRSGAEIDTTKKYNAGTNKAASSGTSLNTKRLDDDTENLSHERVSSDLKKNLMQARLDKKMTQAQLAQMINEKPQVIQEYESGKAIPNNQIIGKLERALGAKLRSKK

SEQ ID NO: 7931 - protein, 374 aa, Crossopetalum rhacoma
ALSIAGAVQSQKLAVRAISQLQSLPGGDIKLLCDTVVESVRHLTGYDRVMVYKFHEDEHGEVVAERKRPDLEPYIGPHYPATDIPQASRFLFKQNRVRTIVDCHASPVRVIQDDGLMQPLCLVGSTLRAPHGCHAQYMENMGSIASLAMAVIINGNDEEVIGGRNTTRLWGLVVCHHTSARCIPFPLRYACEFLMQAFGLQLNMELQLAAQLSEKHVWKTRTLLCDMLLRDSPTGIVTQSPSIMDLVKCDGAALYYQGNYYPLGVTPTEAQITDIVGWLLDFHGDSTGLSTDSLADAGYPGAALLGDAVCGMAVAYITNRDFLFWFRSHTAKEIKWGGAKHHPEDRDDGQRMHPRSSFQAFLEVVKSRSLPWEN

SEQ ID NO: 7932 - protein, 342 aa, Streptomyces avermitilis MA-4680
MTFKAEYIWIDGTEPTAKLRSKTKILADDAKGAELPIWGFDGSSTNQAEGHASDRVLKPVATYPDPIRGGDDVLVMCEVLNIDMTPHESNTRATLAEVEEKFGAQEPIFGIEQEYTFFKGSRPLGFPEGGFPAAQGGYYCGVGSDEIFGRDVVEAHLENCLKAGLGISGINAEVMPGQWEFQVGPLAPLEVSDQLWVARWLLYRTAEDFGVSATLDPKPVKGDWNGAGAHTNFSTKAMREGYDAIITACESLGEGSKPLDHVKNYGAGIDDRLTGLHETAPWNEYSYGVSNRGASVRIPWQVEKDGKGYIEDRRPNANVDPYVVTRLLVDTCCSALEKAGQV

SEQ ID NO: 7933 - protein, 250 aa, Glycine max
MAKTYPVVSAEYQEAVEKARQKLRALIAEKNCSPLMLRLAWHSAGTFDVSSKTGGPFGTMKKPAEQAHAANAGLDIAVRMLEPIKEEIPTISYADLYQLAGVVAVEVSGGPVIPFHPGREDKPQPPPEGRLPDATKGSDHLRQVFGKQMGLSDQDIVALSGGHTLGRCHKERSGFEGPWTRNPLKFDHSYFTELLSGDKEGLLQLPSDKTLLTDPVFRPLVEKYAADEKAFFEDYKEAHLRLSELGYAEA

SEQ ID NO: 7934 - protein, 157 aa, Glycine max
  unsure (1)..(157): unsure at all Xaa locations
MSSAKKITLKSSDGEAFEVEEAVAXLESQTIKHMIEDDCADSGIPLPNVTSKILAKVIEYCKKHVEAANPEDKPSEDDLKAWDAEFVKVDQATLFDLILAANYLNIKSLLDLTCQTVADMIKGKTPEEIRKTFNIKNDFTPEEXEEEVRRENQWAFE

SEQ ID NO: 7935 - protein, 463 aa, Yersinia pestis CO92
MADNAEKKGLHRGLEARHIELIALGGTIGVGLFMGSASTLKWAGPSVLLAYIIAGLFVFFIMRAMGEMLYLEPVAGSFAVYAHKYLSPYFGYLTAWGYWFMWIAVGISEITAIGVYVQFWFPEIPQWLPAIAGVAIVALANLAAVKLYGELEFWFAMIKVTTIIVMILVGLGVIFFGFGNHGQPIGFDNLTAHGGFFAGGWKGFLFALCIVVASYQGVELVGITAGEARNPQVTLRRAINNILWRILIFYVGAIFVIVTIFPWNGIGTEGSPFVLTFAKIGIVAAAGIINFVILTAALSGCNSGMYSGGRMLYALAKNRQLPAGLTKLSASGVPVYCIAITILCLLVGSSLNYIIPNPQQVFVYVYSASVLPGMVPWFVVLVCQLRFRQVHKAALQQHPFKSILFPYVNYLTIAFLICVLVGMGINPDTRLSLLVGAIFLALVTGCYFVLGMHKPKAMEAERL

SEQ ID NO: 7936 - protein, 254 aa, Zea mays; identical to SEQ ID NO: 6293

SEQ ID NO: 7937 - protein, 678 aa, Streptococcus pneumoniae
MFASKSERKVHYSIRKFSIGVASVAVASLVMGSVVHATEKEVTTQVPTYSNMAKTEHRKAAKQVVDEYIEKMLREIQLDRRKHTQNFAFNMKLSAIKTEYLYGLKEKSEAELPSEVKAKLDAAFEQFKKDTLKLGEKVAEAEKKVAEAEKKAKAQKEEDRRNYPTNTYKTLELEIAESDVEVKKAELELLKEEAKTRNEDTINQAKAKVESKKAEATKLEEIKTDRKKAEEEAKRKAGAEEDKVKDKLKRRAKRAVPGEPATPDKKENDAKSSDSSVGEETLPSPSLKSGKRSGAEKRCRAEKKAKDQKEEDRRNYPTNTYKTLDLEIAESDVKVKEAELELVKEEAKGSRNEEKINQAKAEVESKKAEATRLEKIKTDRKKAEEEAKRKAAEEDKVKEKPAEQPQPAPDPQPEKPTEEPENPAPAPKPEKPAEQPKAEKTDDQQAEEDYARRSEEEYNRLTQQQPPKTEKPAQPSTPKTGWKQENGMWYFYNTDGSMATGWLQNNGSWYYLNANGAMATGWLQYNGSWYYLNSNGAMATGWLQYNGSWYYLNSNGAMATGWLQYNGSWYYLNANGDMAIGWVQYNGSWYYLNANGDMATGWLQYNGSWYYLNANGSMATGWVKDGDTWYYLEASGAMKASQWFKVSDKWYYVNGSGALAVNTTVDGYGVNANGEWVN

SEQ ID NO: 7938 - protein, 315 aa, Enterococcus faecium
MAEIRIGHSQVYAEQLGLGANAVGGHNLFDGLEDETGKQVVRTALNSGINLIDTAYAYGNGRSEELIGEVLKEKEYDRSRVVIATKAAHVPNKGRTFDNSPEFLKQSVEDALKRLQTDYIDIFYIHFPDESTPKNESVATLHELKEAGKIRAVGVSNFTLEQLKEANADGYVDVVEDKYSLIHRQAEKELFPYLEKNKISFVPYFPLASGLLTGKYELGEEKQFGEGDPRKRNPDFQGERFREILTAVDVLRPIAKRYQATPAQLVLAWYMKNPRVSVVIPGAKRPEQVSDNVQALDLHLSNEDYQTIDEAFRGF

SEQ ID NO: 7939 - protein, 347 aa, Salmonella typhimurium LT2
MKSVVIHAEGDVRVEERPLPQLQAEDDVLVKVVSSGLCGSDIPRIFAQGAHYYPITLGHEFSGYVESYGTGVTDMQPGDAVACVPLLPCFHCPQCERGYFSLCKQYQFVGSRSEGGNAEYVVVKRANLFRLPSDMPIEDGAFIEPITVGLHAFHLAQGCEGKNVIIVGAGTIGLLALQCARELGARSVTAIDINPQKLELAKALGATHTCNSREMTADDIQTALSDIQFDQLVLETAGTPQTVSLAIDIAGPRAQLALVGTLHHDLTLTTRTFGLILRKELTLLGSWMNYSAPWPGEEWETAARLLAEKRLQLTPLIAHRGDAESFAEAVKALNGAPMQGKILLQLS

SEQ ID NO: 7940 - protein, 168 aa, Thermoanaerobacter tengcongensis
MKRVAILIENLYEEPELLYPYYRLKEEGYEVHLVGTEKDKVYTGKYGYPMKSTHASKEVKADDYDAVVIPGGYSPDHMRRCQDTVNFVKEMCQQQKIIAAICHGPWMMASSCDLKGKRVTSFFSIKDDLINAGAQYVDEEVVIDGNLITSRTPNDLVAFVKAIIEKLK

SEQ ID NO: 7941 - protein, 158 aa, Triticum aestivum
  unsure (1)..(158): unsure at all Xaa locations
MGSPSNDKPIPGLHQLPRPAMDRGKTKADPHAVAVAAEPDLQDESESESGSESIEIADLKKRMWKDQLLLMKLEGSPGHERRATGQRPGTDLAQAEKEAEMPESRYRRKAMLRAQDGVLRHMLRMMEACNARGFVYGIVDETGMPASGSSDSXRGWWK

SEQ ID NO: 7942 - protein, 252 aa, Oryza sativa
  unsure (1)..(252): unsure at all Xaa locations
SYGRLGPSRPAGAPXPFGSRLRLLRTAAVSPFSSSAPPPSPRSRPQPPHPPRYPCRCAXHPPRVSAAVSPLVRPVAAGFALFSMATAASSAASVHDFTVKDASGKDVDLSTFKGKVLLIVNVASQCGLTNSNYTELSQLYEKYKDQGFEILAFPCNQFGGQEPGTNEEIVQFACTRFKAEYPIFDKVDVNGDNTAPIYKFLKSSKGGLFGDNIKWNFSKFLVDKEGRVVERYAPTTSPLSMEKDIKKLLGSS

SEQ ID NO: 7943 - protein, 250 aa, Physcomitrella patens
MAKSYPNVSEKYAALIEKARRKIRGMVAEKNCAPIILRLAWHGSGTYDQESKTGGPLGTIRFGQELAHGANAGLDIAVNLLQPIKEQFPELSYADFYTLAGVVAVEVTGGPTIPFHPGRKDHETCPVEGRLPDATKGLDHLRCVFTKQMGLTDKDIVVLSGAHTLGRCHKDRSGFEGAWTPNPLRFDNSYFQVLLEGEKDGLIMLPSDKALLDEPKTRELVELYAKDEDKFFEDYAESHMKLSELGFAEA

SEQ ID NO: 7944 - protein, 54 aa, Zea mays
  unsure (1)..(54): unsure at all Xaa locations
MRGWLEAXLPLGIIGXMLCXMGNXKXXIHKXXXGRPXXXXNDMXEGAMERRDKK

SEQ ID NO: 7945 - protein, 381 aa, Triticum aestivum
RQDDGSGSSSRAQGGDEGPSADGFDPGAPPPFGLADIRAAIPKHCWVKDPWRSMGYVVRDVVVVHARAAPPGRLNSCLAWHGYWTAQRTMIWALFILGLVCGHGSFPNNDKTDRAVADILHYSIQLPYNGSRISHRTHDLNHGHEENDEARHPLAVMLYKSLDRPARKLRFALPFPMLAYPFYLWSRSPGKSGSHFHPSSDLFQPNEKKDILTSTTCWLAMAGLLAGLTVVMGPLQILKLYAVPYWIFVMWLDFVTYLHHHGHNDKLPWYRGKAWSYLRGGLTTLDRDYGWLNNIHHDIGTHVIHHLFPQIPHYHLVEATEAAKPVLGKYYREPDKSGPFPFHLFGALARSMKSDHYVSDTGDIIYYQTDPKLAAGAHASD

SEQ ID NO: 7946 - protein, 105 aa, Oryza sativa (japonica cultivar-group)
MAPGKLAVFALLASLLLLNTIKAADYPPAPPLGPPPHKIVDPGKDCVGACDARCSEHSHKKRCSRSCLTCCSACRCVPAGTAGNRETCGRCYTDWVSHNNMTKCP

SEQ ID NO: 7947 - protein, 751 aa, Geobacillus stearothermophilus
MENQNRQNAAQCPFHGSVTNQSSNRTTNKDWWPNQLNLSILHQHDRKTNPHDEEFNYAEEFQKLDYWALKEDLRKLMTESQDWWPADYGHYGPLFIRMAWHSAGTYRIGDGRGGASTGTQRFAPLNSWPDNANLDKARRLLWPIKKKYGNKISWADLFILAGNVAIESMGGKTIGFGGGRVDVWHPEEDVYWGSEKEWLASERYSGDRELENPLAAVQMGLIYVNPEGPDGKPDPKAAARDIRETFRRMGMNDEETVALIAGGHTFGKAHGAGPATHVGPEPEAAPIEAQGLGWISSYGKGKGSDTITSGIEGAWTPTPTQWDTSYFDMLFGYDWWLTKSPAGAWQWMAVDPDEKDLAPDAEDPSKKVPTMMMTTDLALRFDPEYEKIARRFHQNPEEFAEAFARAWFKLTHRDMGPKTRYLGPEVPKEDFIWQDPIPEVDYELTEAEIEEIKAKILNSGLTVSELVKTAWASASTFRNSDKRGGANGARIRLAPQKDWEVNEPERLAKVLSVYEDIQRELPKKVSIADLIVLGGSAAVEKAARDAGFDVKVPFFPGRGDATQEQTDVESFAVLEPFADGFRNYQKQEYSVPPEELLVDKAQLLGLTAPEMTVLVGGLRVLGANYRDLPHGVFTDRIGVLTNDFFVNLLDMNYEWVPTDSGIYEIRDRKTGEVRWTATRVDLIFGSNSILRSYAEFYAQDDNQEKFVRDFINAWVKVMNADRFDLVKKARESVTALQHVDYVRSGRVSALQ

SEQ ID NO: 7948 - protein, 466 aa, Listeria monocytogenes
GPLGSATITQDTPINQIFTDTALAEKMKTVLGKTNVTDTVSQTDLDQVTTLQADRLGIKSIDGVEYLNNLTQINFSNNQLTDITPLKNLTKLVDILMNNNQIADITPLANLTNLTGLTLFNNQITDIDPLKNLTNLNRLELSSNTISDISALSGLTSLQQLSFGNQVTDLKPLANLTTLERLDISSNKVSDISVLAKLTNLESLIATNNQISDITPLGILTNLDELSLNGNQLKDIGTLASLTNLTDLDLANNQISNLAPLSGLTKLTELKLGANQISNISPLAGLTALTNLELNENQLEDISPISNLKNLTYLTLYFNNISDISPVSSLTKLQRLFFYNNKVSDVSSLANLTNINWLSAGHNQISDLTPLANLTRITQLGLNDQAWTNAPVNYKANVSIPNTVKNVTGALIAPATISDGGSYTEPDITWNLPSYTNEVSYTFSQPVTIGKGTTTFSGTVTQPLKA

SEQ ID NO: 7949 - protein, 400 aa, Glycine max
  unsure (1)..(400): unsure at all Xaa locations
MSISLPVSMATTIHSLPYSLLKLKPPSLTPSLFRRTLFPNSTLNAAPKRTVSSTTFSLTLTNGTCKTRHVAAKSSEADTGNTSTSLTQTVFGVLHLAVSLGLILAVDKFLKQAFVAAAIKFPSALFGMFCIFSVLIILDSTVPAAATAFVSFFEPAFMFIQRWLPLFYVPSLVVLPLAVKDIPAASGAKIGLILVGGWLATLCVAGYTAIAVRKAVKTELVDAEPMGKPAPFSSLEVWTWTAVLLISFVSALFYPTALGTSARTCLPFLLAATVLGYMVGSGLPSNVKKVFHPIICCALSADLTAFAFGYXSKSGLEPVLGYYLTKASSNPGAGDILMGFLGSVILSFSFSMFKQRKLVKRHAAEIFTSVIISTVFSLYSTALXGRLVQLEPSLTVSILP

SEQ ID NO: 7950 - protein, 95 aa, Oxalis tuberosa
  unsure (1)..(95): unsure at all Xaa locations
LYAGINISGTNGXVMPGQWEYQVGPSVXIEAGDHIWASRYILERITEQAGVVLTLDPKPIDGDWNGAGCHTNYSTKSMRDEGGFEVIKKAILNLS

SEQ ID NO: 7951 - protein, 124 aa, Geobacillus stearothermophilus
MGNYRIAVLPGDGIGKEVTSGAVEVLKAVGIRFGHEFAFEYGLIGGVAIDEAGTPLPEETLRLCQQSDAVLLGAVGGPKWDDNPPHLRPEKGLLAIRKQLDLYANLRPVVCYDSLVSASPLKPD

SEQ ID NO: 7952 - protein, 151 aa, Enterococcus faecium
MMIILLHVEGRVDPLEDIDTINLELVLADLESINKRYTRVAKVAKTKDKDAVAELAVLDKIKPVLEEGKSARTIEFTEEEQKIVKSLFLLTTKPILYVANVSEDDVADADANHYVQEVRNFAAEENAEVIVVSARAEEEIAELDEEDKRNF

SEQ ID NO: 7953 - protein, 390 aa, Trochodendron aralioides
DLEPVNPADVPVTAAGALKSYTLAAKAISRLQSLPSGNLSLLCDVLVREVSELTGYDRVMVYKFHEHKHGEVVAECRISDLEPYLGLHYPATDIPQASRFLFMKNKIRTICDCLAPPVKVIQDKRLVQPLSLCGSTLRAPHGCHAQYMENMGSIASLVMSVMNHEDEDEIESDRKGRKLWGLVVCHHTSPRFVPFLLRYACEFLIQVFGIQLNKEVELAAQLREKHILRTQTVLCDMLLRDAPVGIVTQSPNVMDLVKCDGAALYYRNTIWLLGVTPTEAQIRDIAGWLLEYHNGSTGLSTDSLMEAGYSDALLLGDAVCGMAAVKITSKDFLFWFRSHTAKEIKWGGVKHDPVDKDDGRKMHPRSSFKAFLEVVKRRSLPWEDVEMDAI

SEQ ID NO: 7954 - protein, 164 aa, Dunaliella salina
MPPKGAEGSAVAPADQLTEDQIAEFKEAFALFDKDGDGTITTKELGTVMRSLDQNPTEAELQDTINEVDADGNGTIDFPEFLMLMARKMKETDQEEELREAFKVFDRDGNGFISAAELRHVMTNLGEKLSEQEVEEMIREADVDNDGQVNYDEFVNMMLAKPLV

SEQ ID NO: 7955 - protein, 189 aa, Saccharomyces cerevisiae
MANLRTQKRLAASVVGVGKRKVWLDPNETSEIAQANSRNAIRKLVKNGTIVKKAVTVHSKSRTRAHAQSKREGRHSGYGKRKGTREARLPSQVVWIRRLRVLRRLLAKYRDAGKIDKHLYHVLYKESKGNAFKHKRALVEHIIQAKADAQREKALNEEAEARRLKNRAARDRRAQRVAEKRDALLKEDA

SEQ ID NO: 7956 - protein, 315 aa, Hordeum vulgare subsp. spontaneum
MATAGKVIKCKAAVAWEAGKPLSIEEVEVAPPQAMEVRVKILYTALCHTDVYFWEAKGQTPVFPRILGHEAGGIVESVGEGVTELVPGDHVLPVFTGECKDCAHCKSEESNLCDLLRINVDRGVMIGDGQSRFTINGKPIFHFVGTSTFSEYTVIHVGCLAKINPEAPLDKVCVLSCGISTGLGATLNVAKPKKGSTVAIFGLGAVGLAAMEGARMAGASRIIGVDLNPAKYEQVKKFGCTDFVNPKDHTKPVQEVLVEMINGGVDRAVECTGHIDAMIAAFECVHDGWGVAVLVGVPHKEAVFKTHPMNFLNEK

SEQ ID NO: 7957 - protein, 765 aa, Escherichia coli O157:H7
MKWLCSVGIAVSLALQPALADDLFGNHPLTPEARDAFVTELLKKMTVDEKIGQLRLISVGPDNPKEAIREMIKDGQVGAIFNTVTRQDIRAMQDQVMELSRLKIPLFFAYDVLHGQRTVFPISLGLASSFNLDAVKTVGRVSAYEAADDGLNMTWAPMVDVSRDPRWGRASEGFGEDTYLTSIMGKTMVEAMQGKSPADRYSVMTSVKHFAAYGAVEGGKEYNTVDMSPQRLFNDYMPPYKAGLDAGSGAVMVALNSLNGTPATSDSWLLKDVLRDQWGFKGITVSDHGAIKELIKHGTAADPEDAVRVALKSGINMSMSDEYYSKYLPGLIKSGKVTMAELDDAARHVLNVKYDMGLFNDPYSHLGPKESDPVDTNAESRLHRKEAREVARESLVLLKNRLETLPLKKSATIAVVGPLADSKRDVMGSWSAAGVADQSVTVLTGIKNAVGENGKVLYAKGANVTSDKGIIDFLNQYEEAVKVDPRSPQEMIDEAVQTAKQSDVVVAVVGEAQGMAHEASSRTDITILQSQRDLIAALKATGKPLVLVLMNGRPLALVKEDQQADAILETWFAGTEGGNAIADVLFGDYNPSGKLPMSFPRSVGQIPVYYSHLNTGRPYNADKPNKYTSRYFDEANGALYPFGYGLSYTTFTVSDVKLSAPTMKRDGKVTASVQVTNTGKREGATVVQMYLQDVTASMSRPVKQLKGFEKITLKPGETQTVSFPIDIEALKFWNQQMKYDAEPGKFNVFIGTDSARVKKGEFELL

SEQ ID NO: 7958 - protein, 550 aa, Hebeloma cylindrosporum
MENEKTEHEKRESSSNLEKGDHVVAQTNPQFHFDVHDLDRVQRRLKQRHVQMIAIAGTIGTGLFLGSGGALEAAGPLGALIAYALVGTVAYSSLCAVGEMSTWAPISGTFPHFAARWVDPALGFATGWNYFYTNAISTPVEITAAVILLTFWDHNSKHISLYTAILCVLVCMINIFGVRYFGESEFIFAIIKLTLIIGLLLVGLIVDLGGGPQGDRIGFRYWKNPGAIAGSGLDRNIFGLDRFLAILSVIVQAAFSFQGMELVVIAASETESPRRNIAKAVRRVFYRILVFYILGILMIGMLVAYNDKDLLFLQGNNTAAKSPFVIAINRAGIKVLPHIVNGAIFTSAFSAGNSFLFCSSRVLYGLALRGQAPKVLTYCTKKGLPLYAVLVASAFSFLSFMSVSSGSNRVFGWFVNLSTTGGFTSWFVMNVTYIFFRRGLLAQGYDPTTNSYHNRFQPYIAYWGAGWTLFFILINGFSVFWKFTAAGFLTAYINIPIFLVLYFGYKIVFRTKFWKPLEMDFVTGIPTLEETETPEKPPKNLGERIANIIF

SEQ ID NO: 7959 - protein, 284 aa, Zea mays
LTNRLSSVDPRIGQLPHLRKLSFRQNLLDDDAVAPLTSWEAIAGLKEFVLRDNKLTRIPDAGIFKDLLVFDVSFNEISSLTGLSKVSIKLKELYVSKNEVAKMEELEHFHALEILELGSNRLRVMENLETLTNLQELWLGRNRIRAVNLCGLKLIKKISLQSNRLTSMHGFQECAALEELYLSHNGIQKMEGLSTLHNLRILDVSANKLTTIENIETLTRLEDLWLNDNQIPSLEGIETALAGSREKLTTIYLERNPCAKTPDYSSTLRKIFPNLEQIDSDIIA

SEQ ID NO: 7960 - protein, 114 aa, Triticum aestivum
  unsure (1)..(114): unsure at all Xaa locations
LECSPLHCAYKTVYYSFYLPGACALLVSSENFLYSRYVYNLPCHXMATFFLVQNDNLHWFLHSESIAEMVTDIPHYXCSCLSALALEHANDNRKERSIVDLYIAIPPSILLCAQ

SEQ ID NO: 7961 - protein, 222 aa, Hordeum vulgare subsp. vulgare
MAGEKGLVLLDFWVSPFGQRVRIALAEKGLPYEYVEEDLIAGKSDRLLRSNPVHKKIPVLLHDGRPVNESLIILNYLDDAFPDAPALLPSDPYARAQARFWADYVDKKVYDCGTRLWKVKGEPQAQARAEMLEILKTLDGALGDKPFFGGDKFGFVDAAFAPFTAWFHSYERYGEFSLAEVAPKIAAWAKRCGERESVAKSLYSPEKVYDFIGLLKKRYGIE

SEQ ID NO: 7962 - protein, 179 aa, Oryza sativa
  unsure (1)..(179): unsure at all Xaa locations
XRRLSRGPDSRRRGAGRRHRIQVLANSLIATILVIILATMTGGQDQCLDSHESKVITGIIGGIIGHYCCCNGDTWSSELGVLSDEQPRLITTLKPVRKGTNGGVTLQGLLAATAGGLIIGLTFVFVGLLTVECSFDVALRQLLVIPISATAGLLGSLIDSVLGATLQFSGYCSVRKKVX

SEQ ID NO: 7963 - protein, 427 aa, Coxiella burnetii
MTELTGVSIVTYQHIKVPSEGEKITVNKAVLEVPDRPIIPFIEGDGIGIDITPVMKNVVDAAVEKSYAGKRKIEWMEIYAGEKATKAYGKDNWLPDETLEAIKEYQVAIKGPLTTPVGGGIRSLNVALRQQLDLYVCLRPVRYFTGVPSPVKTPEKVNMVIFRENSEDIYAGIEWPAGSPEAVKLINFLQNEMGVKKIRFPETAGIGIKPVSKEGTSRLVRRAIQYAIDNDRDSVTLVHKGNIMKFTEGAFKDWGYEVAVKEFGAKPLDGGPWHVFENPKTGQKITIKDVIADAFLQQILLRPAEYSVIATLNLNGDYISDALAAEVGGIGIAPGANLSDTVGLFEATHGTAPKYAGQDKVNPGSLILSAEMMLRYLGWKEAADLVVQGIEGAIESKTVTYDFARLMTGAKEVSASQFAKAIIKHIL

SEQ ID NO: 7964 - protein, 126 aa, Glycine max
  unsure (1)..(126): unsure at all Xaa locations
QVPVRSSRGDPACAQLGQLPDMAGGVGEMCWGIAAXKFFFFCDPHRRGEACVKKVVRTDCVQELMGLHQEXEXERGGTXQXENWVSLTSAQRVWDMGLGLDKXTNGALSKRGLGEYADATLGGIFI

SEQ ID NO: 7965 - protein, 189 aa, Methanothermobacter thermautotrophicus str. Delta H
MVESPEYTVELKDGKFEIRRYPGYILAQVDVEASFRDAMVIGFSILANYIFGGNRRKEELPMTSPVTGVNLGSSERIPMKVPVTEEVPDDADSGKYRISFTMPSSYTLETLPEPLDDRIRFREEKDQRFAAYRFSGRVNSDMAAQRIAELKEWLERNSIEPRSNFIIAQYNHPAVPGFLRKNEVLVKID

SEQ ID NO: 7966 - protein, 349 aa, Streptococcus pyogenes M1 GAS
MKAATYLSTGNLQLIDKPKPVIIKPTDAIVQLVKTTICGTDLHILGGDVPACKEGTILGHEGIGIVKEVGDAVTNFKIGDKVIISCVTSCHTCYYCKRGLSSHCQDGGWILGHLINGTQAEYVHIPHADGSLYHAPDTIDDEALVMLSDILPTSYEIGVLPSHVKPGDNVCIVGAGPVGLAALLTVQFFSPANIIMVDLSQNRLEAAKTFGATHTICSGSSEEVKAIIDDITNGRGVDISMECVGYPATFDICQKIISVGGHIANVGVHGKPVDFNLDELWIKNITLNTGLVNANTTEMLLNVLKTGKIDATRLITHHFKLSEVEKAYETFKHAGANNALKVIIDNDIS

SEQ ID NO: 7967 - protein, 343 aa, Streptomyces viridochromogenes
MTFKAEYIWIDGTEPTAKLRSKTKIITGQPAGLDALPIWGFDGSSTNQAEGHSSDCVLKPVFTCPDPIRGGDDILVLCEVLNIDLTPHASNTRAALAEVAERFAAQEPIFGIEQEYTFFQDGYPLGFPKGGFPAPQGGYYCGVGADEIFGRDVVEAHLDNCLKAGLAISGINAEVMPGQWEFQVGPVSPLEVSDHLWVARWLLYRTAEDFDVAATLDPKPVKGDWNGAGAHTNFSTKAMRESYDAIITAAESLGEGSKPLDHVKNYGAGIDDRLTGLHETAPWNEYSYGVSDRGASVRIPWQVEKDGKGYIEDRRPNANVDPYVVTRLLVDTCCSALEKAGQV

SEQ ID NO: 7968 - protein, 492 aa, Candida albicans
MVALKREAEPRENGKSKKAKTSLATSSFVLHSYSKLPNINEYAKAKSTPLDVFVWGTGSMCELGLGPSAKNKEVKRPRLNPYLTEEKLGGTKIVDFAVGGMHTLALDGKNRIWSWGGNDSGVLGRDTSQAKEVLKDIDGKNGNDDDDDDDEDGDLNEAESTPALVENLPEGEIVQLAATDNLSAALLSNGDVYAWGCFRCNEGLLGFLRDEIKLQKTPLKIKELKNIVQLAAGKDHLLALDSKGIVYAWGNGQQYQLGRRILERHRYRSLEPQQFGLYNIKYIASGDFHCFAIDHSDNVYAWGLNQYGQCALTGDNGELEDGSVLMKPTLIPELSHKGIKEIAAGEHHTLALTEDGQVYAWGRYDMKEIGIPKDKLPKSTFKDQHGNPRSVPVPTKLEFAVKIKTIGVGSHHSFAVTEDGVVYAWGFAETYGPGLGPSIDDVEKPTRIVNTATKNEDILLIGAGGQFSVSGGVKIEDEEKAEVRLDKYEDLE

SEQ ID NO: 7969 - protein, 143 aa, Zea mays
MAMAYKMATEGMDVKEECQRWFMEMKWKKVHRFVVYRIDERSRAVLVDRVGGPGEGYEELVAALPGDDCRYAVFDFDFVTVDNCQKSKIFFIAWSPAASRIRAKILYATSKQGLRRLLDGVHYEVQATDPSEMGFDVIRGRAQ

SEQ ID NO: 7970 - protein, 393 aa, Chusquea oxylepis
EPARTEDPALPIAGAVQSQKLAVRAISRLQALPGGDVKLLCDTVVEHVRELTGYDRVMVYRFHDDEHGEVVAESRRADLEPYLGLHYPATDIPQAPRFLFKQNRVRMIADCHAASVRVIQGPALPQPLCLVGSTLRAPHGCHAQYMANMGSIASLVMAVIISSGGDDEHNMTRGGIPSAMKLWGLVVRHHTSARCIPFPLRYACEFLMQAFGLQLNMELQLAHQLSEKHILRTQTLLCDMLLRDSPAGIITQSPSIMDLVKCDGAALYYHGKYYPLGVTPTEAQIKDIIEWLTLCHGDSTGLSTDSLADAGYPGAALGDAVCGMAVAYITPSDYLFWFRSHTAKEIKWGGAKHHPEDKDDGQRMHPRSSFKAFLEVAKSRSLPWENAEMDAIH

SEQ ID NO: 7971 - protein, 373 aa, Pichia stipitis
MSTVTKTITVLPGDHVGTEICNEAIKVLEAIEQATPYQKIHFEFKHHLIGGAAIDSTGVPLPDDSLAAAKLSDAVLLGAVGGPKWGTGAVRPEQGLLKIRKELNLYANLRPCNFASDALLELSPLKSEIVKGTNFTVVRELVGGIYFGERQEQEESADGESAWDTEKYSVAEVTRITRMAAFMALQHNPPLPIWSLDKANVLASSRLWRKTVDKVMKEEFPQLTIQHQLIDSAAMILVQSPTKLNGIVITSNMFGYIISDEASVIPGSLGLLPSASLASLPDTNSAFGLYEPCHGSAPDLPENKVNPIATILSVAMMLRLSLDSLKEAEALEEAVRQVLDSGVRTADLRGTNSTKEVGEAVVAGVTKILKDAA

SEQ ID NO: 7972 - protein, 397 aa, Puelia ciliata
TGYDRVMVYRFHDDEHGEVVAESRHADLEPYLGLHYPATDIPQASRFLFRQNRVRMIADCHAAPVRVIQDPALPQPLCLVGSTLRAPHGCHAQYMANMGSIASLVMAVIITSGGDDEHNMARGGISSAMKLWGLVVCHHTSPRCIPFPLRYACEFLMQAFGLQLNMELQLAHQLSEKHILRTQTLLCDMLLRDSPTGIVTQSPSIMDLVKCDGAALYYHGKYYPLGVTPTEAQIKDIIEWLTLCHGDSTGLSTDSLADAGYHGAAALGDAVCGMAVAYITPSDYLFWFRSHTAREIKWGGAKHRPEDKDDGQRMHPRSSFKAFLEVVKSRSLPWEHAEMDAIHSLQLILRDSFRDAAEGTSNSKAIVNGQVQLGELELRGIDELSSVAREMVRLIET

SEQ ID NO: 7973 - protein, 986 aa, Thermobispora bispora
MPLPRPLRAMPLRRPLRRAPRVTLVLALTAAPARADADLPFRDPTLPLAQRIDDLLGRLTLDEKISLLHQYQPPIERLGIKSFKTGTEALHGVAWSTDVTDNGAVVTANGTVFPQAVGLASTWDPELNQRVGTVGEEARGFHAQNPVVWGLNLWAPVVNLLRDPRWGRNEEGYSEDPLLTGAIAIAYGSGIQGDDPDHLRAAPTLKHYLANNNEIRRDTTSSNLPPRVKHEYYEAPFRAAITAGAATGVMTAYNLVNGRPATVNPDLNDTVRTWTDRDLLNVTDAGAPNNLVGSQAYFATLAEADAAALKAGIDSFTTDETNSAPTITAIKTALSQGLLTEQDIDTAVRHILGIRFRLGEFDPDGGPYAKITPDVIDSPAHRRLARETAAKAMVLLKNERGTLPLDPGKKVAVVGPLADVLYTDWYSGRPTYQVTPLDGIRERAASVTSSEGVDRVAFKDLATGQVHHRGERPEGADLRLSATTIGETEQFDVFDWGQGIVTLRSVANGKYVSRANWSTLVNNADQPSGWFVQEQFKLEEQDDGSYLIRYAGYETAYDWFGPNTYVKAAPDGTLTLTTAGDATRFAKEVVRSGIDDAVAKAKEADVAVVVVGSMPFINGREDHDRTDMNLAEGQEALVKAVFNANPRTVVVLENSYPTTINWIDEHVPAILWTTHAGAETGNALADVLYGDVNPAGRLTQTWYLGGRLPDILDYDIVQRDRTYLYFKGTPLYPFGHGLSYTTFRYQGLRVAEKGDAYEVSVRVTNTGHRAGDEVVQVYTHQRTSRVKQPVKQLRAFQRITLAPGQSKTVTFTIRKADLALWDVTRNKWTVETSAHDVMVGASSADIRQRATIHVKGERIPDRDLSVPTRAIDFDGYSGVELVDETKARGDAVAGSTGDWIVFKDVDLKRRPSRVTAGVASTSGGSIELRLGSPKGKLIATVPVAATGDVYRYETAAARVTGPSGVKDLYLVFQGDVRIKDLSLTSG

SEQ ID NO: 7974 - protein, 164 aa, Triticum aestivum
AFRYLFGARPAAVQRAIPQPDRQLLGSLPADEFSAEATDRLRHMLHYNVLGGKLNRALTVFTAMKACLHPAQPTEQQIQDGLVLGWCMELIQAAFLMADDVMDNSDLRRLKPSWHKEVGPMAINDAFIIEGIVYHMIRKYFRSRSWYIDVLEMIQKITLVTELG

SEQ ID NO: 7975 - protein, 513 aa, Oryza sativa
AGAGGNSLASASCGDAQKRRVCYFYDPEVGNYYYGQGHPMKPHRVRMTHALLAHYGLLAQMQVLRPLPARDRDLCRFHSDDYVAFLRAVTPETQFDQIRSLRRFNVGEDCPVFDGLYAYCQTYAGASVGAAVKLNHGTHDIAINWSGGLHHAKKSEASGFCYVNDIVLAILELLKLHERVLYIDIDIHHGDGVEEAFYTTNRVMTVSFHKFGDYFPGTGDIRDIGYSEGKYYCLNVPLDDGIDDDSYQSIFKPIISKVMEMYRPGAVVLQCGADSLSGDRLGCFNLSGKGHAECVKFMRSFNVPLLLLGGGGYTIRNVARCWCYETGVALGEELREKLPYNEYYEYFGPEYSLYVAASNMENRNTNKQLEEIKCNILDNLSKLQHAPSVQFEERIPETKLPEVNEDQDDPDERHDPDSDMLLDDHKPMGHSARSLIHNIGVKREITETETKDQHGKRLTTEHKVPEPMADDLGSSKQVPTAEQIRWPSTRQATPRMNREAHYELTHFRPPALM

SEQ ID NO: 7976 - protein, 193 aa, Oryza sativa (japonica cultivar-group)
MDRSQEPPHAAAARGAVEVSLRRFDLADVDAMMVWASDPQVAAVCRWEPYESTEPLLAYLRDTVLPHPWFRAICVAAAFDGDGGGEDRPVGAVSVSPTADACRAELGYVVARAHWGKGVATAAVKRVVAAVFGEVEGLERVEALVDVRNAASQRVLEKAGFRREAVLRSYCVLKGEVRDMVIYSFISTDPLVS

SEQ ID NO: 7977 - protein, 57 aa, Brassica rapa
  unsure (1)..(57): unsure at all Xaa locations
MDPNLANNPQLIQFLSQEKERAMANEGVAKITSSCWDKCVXKPGSKFSSSETSCLSN

SEQ ID NO: 7978 - protein, 192 aa, Pseudomonas aeruginosa UCBPP-PA14
MLNTAKVEEGATVAIFGLGGIGLAAIIGAKMAKAARIIAVDINPGKFDIARELGATDFINPKDYDKPIQDVIVELTDGGVDYSFECVGNVQLMRAALECCHKGWGESVIIGVAGAGQEISTRPFQLVTGRVWRGSAFGGVRGRSELPSYVEKAQKGEIPLDTFITHTMGLEDINEAFELMHEGKSIRTVIHY

SEQ ID NO: 7979 - protein, 84 aa, Triticum aestivum; identical to SEQ ID NO: 2446

SEQ ID NO: 7980 - protein, 350 aa, Bacillus anthracis str. A2012
MKALLWHNQRDVRVEEVPEPTVKPGAVKIKVKWCGICGTDLHEYLAGPIFIPTEEHPLTHVKAPVILGHEFSGEVVEIGEGVTSHKVGDRVVVEPIYSCGKCEACKHGHYNVCEQLVFHGLGGEGGGFSEYTVVPEDMVHHIPDEMTYEQGALVEPAAVAVHAVRQSKLKEGEAVAVFGCGPIGLLVIQAAKAAGATPVIAVELSKERQELAKLAGADYVLNPATQDVLAEIRNLTNSLGVNVSFEVTGVEVVLRQAIESTSFEGQTVIVSVWEKDATITPNNLVLKEKEVVGILGYRHIFPAVIKLISSGQIQAEKLITKKITVDQVVEEGFEALVKDKTQVKILVSPK

SEQ ID NO: 7981 - protein, 453 aa, Atriplex hortensis
MSSYDPENAATNGVPPVKNDNSNHQQQHQQTVVVPETAHQISTDSWLQVGFVLTTGINSAYVLGYSGAIMVPLGWIPAVLGLIAATLISLYANSLVAKLHEYGGKRHIRYRDLAGFIYGPKAYSLTWALQYINLFMINTGFIILAGSSIKAAYHLFTDDPALKLPYCIIISGFVCALFAIGIPHLSALRIWLGVSTFFGLIYIIIAIALSLKDGINSPPRDYSVPTERGKVFTTIGAAANLVFAFNTGMLPEIQATVRKPVVGNMMKGLYFQFTAGVVPMYAIVFIGYWAYGNKTDSYLLNNVHGPVWLKALANISTFLQTVIALHIFASPMYEYLDTRFGITGSALNPKNLGSRVLIRGGYLAVNTFVAALLPFLGDFMSLTGAISTFPLTFILANHMYFKAKRNKLSMAMKIWLWINIVFFSCMAVASFIAALRLIATDSKQYHVFADLEG

SEQ ID NO: 7982 - protein, 350 aa, Triticum aestivum
MAAAANGGGGETKAAFARIYDALKAELLRDPAFEYTESSHQWIDRMLDYNVLGGKCNRGLSVVDSYKLLKGVDVLTEEEMFLASTLGWCIEWLQAFFLVLDDIMDDSHTRRGQPCWFRVPQVGLIAVNDGILLRNHISRMLRLHFKKKPYYADLLDLFNEVEFKTASGQMLDLITTHEGEKDLTKYNIGVHRRIVQFKTAYYSFYLPVACALLLSGESLENYGAVENILVEMGTYFQVQDDYLDCYGDPEFIGKIGTDIEDYKCSWLVVQALERADESQKSILFENYGKKDPACVAKVKDLYKELNLEAVFHEYESESYKKLIADIEAQPSVAVQKVLKSFLHKIYMRQK

SEQ ID NO: 7983 - protein, 436 aa, Raphanus sativus
MTCLRKTYVNSYTLSFLLVFFVLILFRPAFSINTLSSTESLTISSNRTLVSRGDVFELGFFRTNSSSSWYLGIWYKKLPDRTYVWVANRDNPLSSSIGTLKISNMNLVLLDHSNKSVWSTNVTRGNERSPVVAELLANGNFVMRNSNNNEACQFLWQSFDYPTDTLLPEMKLGYDLKTGLNRFLTSWRSSDDPASGDYSYELELRKFPEFYIFDTDTQVHRSGPWNGIKFSGIPEDQKLSYMVYNFTQNSEEVAYTFLMTNNSFYSRLRMSTSGYFQRLTWTPSSVVWNLFWSSPVNLQCDVYRVCGPNAYCDVNTSPVCNCIQGFMPFNVHQWDLGDGLGGCIRRTRLSCSGDGFTRMKNMKLPETTMATVDPSIGVKECEKRCLSDCNCTAFANADIRNGGTGCVIWTGRLDDMRNYVADGQDLYVRLAAADLV

SEQ ID NO: 7984 - protein, 310 aa, Amaranthus tricolor
  unsure (1)..(310): unsure at all Xaa locations
NEYIDYVGSWGPAIIGHADDEVLAALAETMKKGTSFGAPCLLENNLAEMVISAVPSIEMVRFVNSGTEACMGVLRLARAFTGKQKIIKFEGCYHGHADPFLVTAGSGVATLGLPDSPGVPKSATSDTLTSPYNDLETIKGLFEANKGEIAAVILEPVVGNSGFIPPNPGFLEFLREITKENDTLLIFDEVMTGFRLXYGGAQEYFKITPDLTTLGKVIGGGLPVGAYGGRRDIMEMVAPAGPMYQAGTLSGNPLAMTAGIHTLKRLMQPGSYEYLDKITSELTQGIIAAGKKTGHAICGGYISGMFGFFF

SEQ ID NO: 7985 - protein, 211 aa, Gossypium raimondii
AKGQTPLFPRIFGHEAGGIVDSVGEGVTHLKPGDHVLPVFTGECGNCRHCKSKESNMCDLLRINTDRGVMLSDGKTRFSINGKPIYHFVGTSTFSEYTVAHVGSVAKINPAAPLDKVCILSCGISTGLGATLNVAKPTKGSTVAIFGLGAVGLAAAEGARIAGASRIIGVDLNPNRFEEAKKFGCTEFVNPKDHNKPVQEVLAEMTDGGVD

SEQ ID NO: 7986 - protein, 365 aa, Bacillus subtilis subsp. subtilis str. 168
MKKRIALLPGDGIGPEVLESATDVLKSVAERFNHEFEFEYGLIGGAAIDEHHNPLPEETVAACKNADAILLGAVGGPKWDQNLSELRPEKGLLSIRKQLDLFANLRPVKVFESLSDRSPLKKEYIDNVDFVIVRELTGGLYFGQPSKRYVNTEGEQEAVDTLFYKRTEIERVIREGFKMAAARKGKVTSVDKANVLESSRLWREVAEDVAQEFPDVKLEHMLVDNAAMQLIYAPNQFDVVVTENMFGDILSDEASMLTGSLGMLPSASLSSSGLHLFEPVHGSAPDIAGKGMANPFAAILSAAMLLRTSFGLEEEAKAVEDAVNKVLASGKRTRDLARSEEFSSTQAITEEVKAAIMSENTISNV

SEQ ID NO: 7987 - protein, 362 aa, Triticum aestivum
MASPQKLRTPITDLFKIKHPVLLAGMNVAAGPKLAAAVSNAGGLGVIGGVGYTPDMLREQIAELKSFLDDKNAPFGVDLLLPQVGGSARKTNYDYTKGKLNELVDIIIEEGAKLFVSAVGVPPKAVVDKLHANGIVYMNMIGHVKHVQKCLDLGVDIICAQGGEGGGHTGDIPTTVLIPAVVDICKKHKSPLTGGPVQVIAAGGIHNGQLLAASLMMGAGAVWVGTRFILTDEAGAPKAHKGAVRTSGHDDNIRTIIWTGRPMRVRNNDYINDWETNRQAEIKELVSKGVIPYEADLDKLAESTSESENDDDEDILDKYRPYLMGKCAAVVNEQKPAKAVVDEFVDDAVAWLQRGNKMIAKL

SEQ ID NO: 7988 - protein, 360 aa, Glycine max
MESTEDSSTSSQQQPNLPPGFRFHPTDEELVVHYLKKKVDSVPLPVSIIADVDLYKFDPWELPAKASFGAEEWYFFSPRERKYPNGARPNRAATSGYWKATGTDKPICSGTQKVGVKKSLVFYGGKPPKGVKTDWIMHEYRVTENKPNNRPPGCDLGHKKNSLRLDDWVLCRIYKKGNTQRSHERDDSIDDMIGEVPPSINVGHMSARFHLSRMSTSYSGALLENDRNTLEGVVIGNGSVNGISNTNNITSVISSSHQFGTSNSKAELLPFVPSNNTSNSASKRTLSSLYWNVDDHKHFNLDSNGNVSVLRTDQENNNNNNGTSGSFATLLNQLPQTPSLPQIDGLLRTPYQIQGTNWYG

SEQ ID NO: 7989 - protein, 213 aa, Candida albicans
GTKSTAPKPSLNDAIKGIDERVGSLDVKLSKINSELSTYQQKISRMRDGPGKSALKQKAIKLLRQRKQIEAQKDQLENQSWNMTQASMTTDNLQNTMVTINAMKTANKSLKQTYGKINIDELEDLQDEMLDLIDKSNELQEALSTSYDVPDDISESELDAELEALGEEIDFENEMAESGIGAPSYLNDTEPTAADKLPTFIDEQPEEAQKIAN

SEQ ID NO: 7990 - protein, 115 aa, Triticum aestivum
MGEIAADERGLAGGKGSEEEEEETSPIEEVRLTVPPGDDPTLPVWTFRMWSIGLLSCALMSFLNQFFSYRTEPLIVTQITVQVASLPMGHFLARVLPRRKFRAPAPLGGGEWSLN

SEQ ID NO: 7991 - protein, 180 aa, Rhizobium gallicum bv. gallicum
EFDAFPALEQLPLWGFDGSSTMQAEGRSSDCVLKPVAVYPDPARSNGALVMCEVMMPDGVTPHPSNSRATILDDEDAWFGFEQEYFFYENGRPLGFPEQGYPAPQGPYYTGVGYKNVGSVAREIVEEHLDLCLAAGINHEGINAEVAKGQWEFQIFGKGSKRAADQIWMARYLLLRLCEK

SEQ ID NO: 7992 - protein, 393 aa, Zea mays
  unsure (1)..(393): unsure at all Xaa locations
EPASTEDPALSIAGAVQSQKLAVRAISRLQALPGGDVKLLCDTVVEHVRELTGYDRVMVYRFHEDEHGEVVAESRRDNLEPYLGLHYPATDIPQASRFLFRQNRVRMIADCHATPVRVIQDPGLSQPLCLVGSTLRAPHGCHAQYMANMGSIASLVMAVIISSGGDDEQTGRGGISSAMKLWGLVVCHHTSPRCIPFPLRYACEFLMQAFGLQLNMELXLAHQLSEKHILRTQTLLCDMLLRDSPTGIVTQSPSIMDLVKCDGAALYYHGKYYPLGVTPTESQIKDIIEWLTVFHGDSTGLSTDSLADAGYLGAAALGEAVCGMAVAYITPSDYLFWFRSHTAKEIKWGGAKHHPEDKDDGQRMHPRSSFKAFLEVVKSRSLPWENAEMDAIH

SEQ ID NO: 7993 - protein, 394 aa, Diarrhena obovata
EPARTEDPALSIAGAVQSQKLAVRAISRLQALPGGDVKLLCDTVVEHVRELTGYDRVMVYKFHDDEHGEVLAESRRADLEPYLGLHYPATDIPQASRFLFWQNRVRVIADCHAAPVRVIQDPAMPQPLCLVGSTLRSPHGCHAQYMANMGSIASLVMAVIISSGGEDEHNMARGAIPSAMKLWGLVVCHHTSPRCIPFPLRYACEFLMQAFGLQLNMELQLAHQLSEKHILRTQTLLCDMLLRDSPAGIVMQSPSIMDLVKCDGAALYYHGKYYPLGVTPTEAQIKDIIEWLTVCHGDSTGLSTDSLADAGYSGATALGDEVCGMAVAYITPSDYLFWFRSHTAKEIKWGGAKHHPEDKDDGQRMHPRSSFKAFLEVVKSRSLPWENAEMDAIH

SEQ ID NO: 7994 - protein, 445 aa, Sinorhizobium meliloti
MTRVAVIGAGPSGLAQLRAFQSAAQKGAEIPEIVCYEKQSDWGGLWNYTWRTGLDEYGEPVHGSMYRYLWSNGPKECLEFADYTFEEHFGKPIASYPPRAVLWDYIKGRVEKANVRDWVRFNTPVRMVHFDEETKKFTVTAHNRLEDRMYDEEFDYVVVASGHFSTPHVPYFEGVKTFNGRVLHAHDFRDALEFKGKDVLIVGRSYSAEDIGSQCWKYGAKSVTTSYRSKPMGFNWPENFEERPLLTKLENKTAHFADGSTKEVDALILCTGYQHHFPFLPDELRLKTANRLWADHLYKGVVFDKNPQLFYIGMQDQFYTFNMFDVQAWWARDVMMGRIALPPEEELKANFDMWRAREETLEHAEEMIWYQGDYVKELLAETDYPSFDIEGVNRTFMKWEHHKAENIMGFRDNAYRSLMTGNMSPKHHTPWVEALDDSLEEYLRA

SEQ ID NO: 7995 - protein, 242 aa, Betula pendula
MEFQNQSMSVSPQRKLGRGKIEIKRIENTTNRQVTFCKRRNGLLKKAYELSVLCDAEIALIVFSSRGRLYEYANNSSVKTTIERYKKACAESSNSGSVSEANTQFYQQEAAKLRGQIRSVQNSNRHLLGEALSELNFKELKNLEIKLEKGINKIRSKKNELLFAEIEYMQKREAELHNNNQILRAKIAENERNQQNLNVMPGGGNYELMQSQSYDSRTYFQVDALQPNHHYPRQDQIPLQLV

SEQ ID NO: 7996 - protein, 637 aa, Glycine max
MYPNQAFSLGSYAEMMSGTSLFPHDYSETVGGGQNEVKFITAMGETVTMHSINGHSNAASGDPACNSFAGDSHVVSRTQMGMVDSEQNINCQGLSLSLGTLMPSNASVSPFQYQYHDTGLLPLMNDFPNIKGTMSLKDDEANNLHGEFRSVECMASVSSGGFHDMIKKEGFYNPNHPSMCLKEVPSDLPGYSNSILNSQYLKAAQELLDEIVSVQKALKQSGMEKQENTGLDGSKDSDGKSTSQSMQMSSGPNGSTANASSELSSAERQNLLDKKTKLLSMLDEVDKRYRQYCHQMQIVVSSFDMVAGCGAAEPYTTLALRTISRHFRCLRDAISGQIQVTQRSLGEQEGIPRLRYVDQQLRQQKALQQLGVMRQAWRPQRGLPESSVSILRAWLFEHFLHPYPKDSEKIMLARQTGLTRNQVANWFINARVRLWKPMVEEMYKEEFGDSEMNCNLSSENNTVKCKKDDLVQESDNINNNNKWEETQDNLVTVDSVQVQPQAELDRGVNVENVVMDSGTGKLQGDQNQQRLGMNNNNNFYSISTNQNDGGLMGCSTHATYDLSELGNFTVGSHVSLALELRNCESDGFAMSDDAIRKRRNQALASSPETDLLDYHFTDSGKQQHRFGNPHLLHEFVV

SEQ ID NO: 7997 - protein, 230 aa, Glycine max
MGKSYPTVSADYQKAVEKAKKKLRGFIAEKRCAPLMLRLAWHSAGTYDVSSKTGGPFGTIKHPSELAHGANNGLDIAVRLLEPLKAEFPILSYTDFYQLAGVVAVEVTGGPEVPFHPGREDKPEPPPEGRLPDATKGSDHLRDVFGKAMGLSDRDIVALSGGHTIGAAHKERSGFEGPWTSNPLIFDNSYFKELLSGEKEGLLQLPSDKALLSDPVFRPLVEKYASVCIS

SEQ ID NO: 7998 - protein, 105 aa, Zea mays
  unsure (1)..(105): unsure at all Xaa locations
ALAGWGYANCDIRGYLGALDIMQSYYPERLARVFLVHVPXVFMAAWKMVYPFMDDNPKKKFVFVPAKDLDRTLREAIDDSQLPEIYGGKLKLKLVTPPANKFPSP

SEQ ID NO: 7999 - protein, 264 aa, Rhodospirillum rubrum
MACQPLGMWWPQGAPTPQGKDTTPMPNHRFPRRVPFATLAVCGALALSACAQGKGAGHPPPPPADPMMGAAPGTPVAPPPPGMGGPPAYSPLGGPPITSTRPAPQAVAMLINTKGETIGHIQVTEMASGGVGIGLVATGLTPGVHSFHIHDKGVCDRAVTFETAGGHFNPTGKAHGWNNAAGPHAGDLPNILADGRGKATAGVLTHDVTLRPGVANSLFDADGSSFVIHSGPDDYISQPAGNAGSRVACGVLVHHVALKPQPKP

SEQ ID NO: 8000 - protein, 531 aa, Yarrowia lipolytica
MLQLFGVLVLALTTALLAQLAYNKYEYNRKVKQFGCGELTVAKNGFLGWKGIRAVLHVLKTKKGPAALKERIDAYGRTYVFHIGPAPVISTMEPENIKAMLATQFKDFSLGTRYRSLAPTLGDGIFTLDGHGWTHSRALLRPQFAREQVSRLDSLEAHFQILKMCVDKEMREKGNDPRGFDIQNLFFLFTLDSATEFLFGSSVDSLVDFLDDPSVRTGDHGGVDEAARKGFNNSFNHAQELCALRSRLHTLYWIVGSVVKKEPFERYNKEIKTFVDFFAAKALKARKEKDMSLMDNDQYIFMYELVKETTNPVTLRDQMLNILLAGRDTTASMLSWIYFRLARDPKLYAKLRSAILEDFGTTPEAITFESLKQCDYLRYVLNEALRLYPVVPINGRTATRDTTLPRGGGPDQSQPIFIPKGQTVSYSVYWTHRDPRFWGEDAEEFIPERWDPRNGNIGRGWEYLPFNGGPRICLGQQFALTEVGYVLSRLVQTYETLETCDHKPLPPLYNHALTMCHEEGVWVKMYKGEKA

SEQ ID NO: 8001 - protein, 240 aa, Triticum aestivum
MATAATISATPLAPLPSSRHAFASPKMLRSLPFLRRRLPSLAAAAVKQDAAVWNAAPVASIGAASADGSLFHLRVDLSDAADLASSFTAPGQYLLVRVPGEDDLKPAFMAIASPPGGGAFEFLVKAVPGATAEKLCGLRDGDVVELGAIMGKGFRVEKGDPGRNAAKNPAPFSPTGNGDQAGSASLLSSSGFGAKKKNLNKRALTIGAGKSGKKGRILGRNFEEGEGHPGLKKKVPGPGK

SEQ ID NO: 8002 - protein, 355 aa, Aspergillus oryzae
MGAPPKTAQNLSFVLEGIHKVKFEDRPIPQLRDAHDVLVDVRFTGICGSDVHYWEHGSIGQFVVKDPMVLGHESSGVISKVGSAVTTLKVGDHVAMEPGIPCRRCEPCKEGKYNLCEKMAFAATPPYDGTLAKYYVLPEDFCYKLPENINLQEAAVMEPLSVAVIVKQANVAPGQSVVVFGAGPVGLLCCAVARAFGSPKVIAVDIQKGRLEFKKYAATAIFEPSKVSALENAERIVNENDLGRGADIVIDASGAEPSVHTGHVLRPGGTYVQGGMGRNEITFPIMAACTKELNVRGSFRYGSGDYKLAVNLVASGKVSVKELITGVVSFEDAEQAFHEVKAGKGIKTLIAGVDV

SEQ ID NO: 8003 - protein, 230 aa, Triticum aestivum
GTRLLGNKWTEIAKVVSGRTDNAVKNRFSTLCKRRAKDDELFEENGTVCSNASAKRVLTQSGGVTCAAPGSSPPIKNMSSCKPDFKENIAPNMKSFAQQKSIQQDSRQPLASICPDNQSVNIVKTQSLVTKTSTKQLHGEEQSCVKHEGNFLKRNDPKLATLLQQADLLSSLATKVNTENTSQSMDEAWQKLQHHLVKKDDNDMSESSMSGTASLLDDLDDLIVDPYENE

SEQ ID NO: 8004 - protein, 73 aa, ACHIMENES ADMIRABILIS
ISGTNGEVMPGQWEFQVGPSVGIEAGDHIWCARYLLERITEQAGVVLSLDPKPIEGDWNGAGCHTNYSTKSMR

SEQ ID NO: 8005 - protein, 366 aa, Escherichia coli
MLPLHLLPVNRWKSLKLTLHHRKKGEVLIKVTHTGVCHTDAFTLSGDDPEGVFPVVLGHEGAGVVVEVGEGVTSVKPGDHVIPLYTAECGECEFCRSGKTNLCVAVRETQGKGLMPDGTTRFSYNGQPLYHYMGCSTFSEYTVVAEVSLAKINPEANHEHVCLLGCGVTTGIGAVHNTAKVQPGDSVAVFGLGAIGLAVVQGARQAKAGRIIAIDTNPKKFDLARRFGATDCINPNDYDKPIKDVLLDINKWGIDHTFECIGNVNVMRAALESAHRGWGQSVIIGVAVAGQEISTRPFQLVTGRVWKGSAFGGVKGRSQLPGMVEDAMKGDIDLEPFVTHTMSLDEINDAFDLMHEGKSIRTVIRY

SEQ ID NO: 8006 - protein, 703 aa, Rhodospirillum rubrum
MESHHCRHHLCHWRRHRPHRPDPGGDQRGDRLRPHRVQRYAPGDGLRERGFGRVQPAAGGNGGADRGAGPRPGSGAHLPHPLPRHEARAGRARRENDDEAGGRCPHRSGAWLPHGWRRRPRDHPGAGGGLEMRGDQGPVRCHHRHPSDRRRGIRDHARPGARAGFRPARRLRRPLKPLGPFRWAAGDQRQAGEGAVFSGQDERASLYRNQAVSPDPPLAGHDRTLGHPPVPGATMIQQGMRTMATPWTPESWRAKPIDQVPDYPDAARLTDVEAELAKYPPLVFAGEARSLRAALAQVSQGKGFLLQGGDCAESFAEFSANTIRDTFRVMLQMAVVLTYGAALPVVKVGRMAGQFAKPRSAPLETIDGVALPSYRGDMVNGMEFEEGVRIPDPERLLRVYNQSASTLNLLRAFAQGGYADLTQVHQWNLDFVEGSPQSERYRAFADRIAETIEFMRACGITPESVPQMRETDFYTSHEALLLNYEQALTRIDSTTGKWYDCSAHLLWIGDRTRDPQGAHVEFLRGVANPVGVKAGPSMSPDGLLELCDLLNPLNEPGRLSVIVRMGAGKVEAGLPPLIRAIEREGRKVVWSCDPMHGNTMKAGSGFKTRDFKKILQEVTEFFAVHRAEGTHAGGVHFEMTGADVTECIGGARAVTEASLGDRYHTHCDPRLNAHQALELAFLIAESLKTERMRIQAATVARAS

SEQ ID NO: 8007 - protein, 463 aa, Enterococcus faecalis V583
MSIFRKKEITVPVNDSGGMKKNLKTMDLIFLGIGAVVGTGIFVVTGVAAERYAGPGLVLSFLVAAAAIILSGLCYAEFASRIPVIGGPYAYMYVVFGEIVAWMTGWMIICEFFLAVSSVASGWSGYVHGFLDSLGFSLPQALSGAYNPTNGTYIDLIAMLVVVAVTFWVSLEAKTALRLNNLMVFVKFGIILLFVLVGIFYVKPTNWQPFIPYGFSGVFSGAALVFFAFLGFDAVSMAAEEVKNPKKDIPKGIIGSIIISTLLYIVVTLVLTGIVPFTDLGVKDPVAFAMRFINHGAIATIISVGAILTLLTVTIAMMYSLARVIYAISKDGLLPQFMSKIDEKRHTPKNATYVAGFLAMVFAGIVPMEMLAELTNIVTLFYLMFLALGIIKLRTMKGEPQAGEFKVPLVPVLPLISIVVCAALMFQLSLATWQVFGVAVVIGLAIYFFYGRHHSIVRFETKE

SEQ ID NO: 8008 - protein, 80 aa, Glycine max
GGTSRNIITIMPTCTGTDDIITSRADYSSDTVTFKSESPTEARRFLTFDMKLMDIHNEHIAIPEAQYQATVNMRSSEFAT

SEQ ID NO: 8009 - protein, 425 aa, Shewanella oneidensis MR-1
MSTTNDSLMARRQAAVAGGVGQIHPIFTARAENASVWDVEGREFIDFAGGIAVLNTGHLHPKVKAAVAAQLEDFSHTCFMVLGYESYIQVCEKLNQLVPGDFAKKTALFTSGSEAVENAVKVARAYTKRAGVIAFTSGYHGRTMAALALTGKVAPYSKGMGLMSANVFRAEFPCALHGVSDDDAMASIERIFKNDAEPSDIAAIILEPVQGEGGFYAVSPAFMQRLRALCDREGIMLIADEVQTGAGRTGTFFAMEQMGVSADITTFAKSIAGGFPLSGITGRAQVMDAIGPGGLGGTYGGNPLACAAALAVLEVFEEEKLLERANAIGDRIKSALNTMQVEHPQIADVRGLGAMNAIELMEDGKPAPQYCAQILAEARNRGLILLSCGTYGNVLRILVPLTVSDTQLDAGLGILKTSFNAVLKG

SEQ ID NO: 8010 - protein, 423 aa, Zea mays
MLEDQSCLISRSLPGSCEQESRLAYMTYHLLEITRSKRPPGTLSIEHDVVAALTKRTKSSEHQNSEALDCQGSNGQGDSDSSTLISSIGRDNSINCLARCSRSDYGSIASLNRSFRSLVRSGELYKERRQQGISEHWVYFSCNVQEWEAYDPYRSRWMTLPRMPRNECFMHSDKESLAVGTELLVFGKEILSHIILSYSILTHSWSRGVEMNAPRCLFGSASFGEKAIIAGGMDADGRVLRSVELYNSETKRWTTLPSMNKARRKCSGVFMDGKFYVIGGMASNTEVLTCGEEYDLDRGTWRVIENMSEGLNGASGAPPLVAVVENELYAAQYAGKLVRKYNKRDNSWTTLGELPERPEAVDGWGIAFRGCGERLLVIGGPRVLGGGMIELHSWIPSEGPLQWNMIGSKPSGNFVYNCAVMGC

SEQ ID NO: 8011 - protein, 334 aa, Oryza sativa (japonica cultivar-group)
MEERYEALKELGAGNFGVARLVRDKRSKELVAVKYIERGKKIDENVQREIINHRSLRHPNIIRFKEVCLTPTHLAIVMEYAAGGELFEQICTAGRFSEDEARYFFQQLISGVSYCHSLEICHRDLKLENTLLDGSPTPRVKICDFGYSKSALLHSKPKSTVGTPAYIAPEVLSRKEYDGKVADVWSCGVTLYVMLVGSYPFEDPGDPRNFRKTISRILGVQYSIPDYVRVSSDCRRLLSQIFVADPSKRITIPEIKKHTWFLKNLPKEISEREKADYKDTDAAPPTQAVEEIMRIIQEAKVPGDMAAADPALLAELAELKSDDEEEAADEYDTY

SEQ ID NO: 8012 - protein, 201 aa, Brassica rapa subsp. pekinensis
PGTDTAAAVVVWAMTYLIKYPEAMKKAQDEVRNVVGDKGYVSEEDIPNLPYLKAVIKESLRLEPVIPILLHRETIADAKIGGYDIPAKTIIQVNAWAVSRDTAAWGDNPNEFIPERFMNEQKGVDFKGQDFELLPFGSGRRMCPAMHLGVAMVEIPFANLLYRFDWSLPKGIKPEDIKMDVMTGLAMHKKDHLVLAPRTHI

SEQ ID NO: 8013 - protein, 225 aa, Oryza sativa
  unsure (1)..(225): unsure at all Xaa locations
MAAPDVEYRCFVGGLAWATDDRSLEAAFSTYGEILDSKIINDRETGRSRGFGFVTFSSEQSMRDAIEGMNGKELDGRNITVNEAQSRRSGGGGGGYGGGGGGYGGGRGGGRYGGDGGGGYRXALRAVSVAVAATVVVEILVVVYFYCALYLPSSXSFFYIGDSGRIMFLDKFFSFPIIXSITYISTLIRDPDNLVYFCASTCVYTPVCRLYCYTTFVCSPTYRLC

SEQ ID NO: 8014 - protein, 375 aa, Thermoplasma volcanium
MGLFVLVNYFGVVIFSKIINAITALKLVVPTITMVTLFLVSFKLRNFSAYGVAPYGPFSVVSAIVTSGIVYSYLGFQAVINLAGESRNPKRDGPLSLILVIIFSVVFYVVLQIAFIGSVPASDISKGWAFLSLPSPFADIAVSFNMFWLYTLIIADSIYSPSGSSMAAVASNSRNLYALSKNGTLPSFFLRVDNNTGIPRRALLFNFVISLIVLVTLKSWHQIIETLGILLLISFIGSAVSSGVIGSIKRYSSIKMPFIVIVSAIVFVFSGLIISISSFSKVLVVSLLLVPSLLLFAVSSGRGNRVIADVKAGLWFIIYVMEIAILSFIYNEHYVSGYIFLGAYLLSSTITFILARRSGVKFMHQAGEYDIAEIP

SEQ ID NO: 8015 - protein, 213 aa, Frankia sp. ACN14a
MSKAEFIQAEYIWIDGTEPEPLMRSKTRIIKKGKEPEIWGFDGSSTNQAPGSNSDCVLRPVFVTPDPIRGGDNILVLCEVELTDFTPHPTNTRAATRAVAEKYADMSPMFGIEQEYTFFKDGRPYGWPEVGYPAPQGPYYCGVGGSKMPGREIVERHTQACLDAGLAIEGTNAEVMMGQWEFQIGVLPAPAIGDQIWLGRWLLHRIAEDYGVE

SEQ ID NO: 8016 - protein, 286 aa, Zea mays; identical to SEQ ID NO: 2885

SEQ ID NO: 8017 - protein, 130 aa, Glycine max
NSARGVVLGYAAAAEAIMVILLTIPGLEALRKGLIAVTRNLLKPFLSVVPFCLFLFMDIYWKYETRPSCEGDSCTPSEHLRHQKSIMKSQRNALLIAAALLFYWLLYSVTNLVVRIDHLNQRLERLKNRD

SEQ ID NO: 8018 - protein, 324 aa, Escherichia coli [sequence omitted]

SEQ ID NO: 8019 - protein, 765 aa, Escherichia coli CFT073
  unsure (1)..(765): unsure at all Xaa locations
MKWLCSVGIAVSLALQPALADDLFGNHPLTPEARDAFVTELLKKMTVDEKIGQLRLISVGPDNPKEAIREMIKDGQVGAIFNTVTRQDIRAMQDQVMELSRLKIPLFFAYDVLHGQRTVFPISLGLASSFNLDAVKTVGRVSAYEAADDGLNMTWAPMVDVSRDPRWGRASEGFGEDTYLTSIMGKTMVQAMQGKSPADRYSVMTSVKHFAAYGAVEGGKEYNTVDMSPQRLFNDYMPPYKAGLDAGSGAVMVALNSLNGTPATSDSWLLKDVLRDQWGFKGITVSDHGAIKELIKHGTAADPEDAVRVALKSGINMSMSDEYYSKYLPGLIKSGKVTMEELDDAARHVLNVKYDMGLFNDPYSHLGPKESDPVDTNAESRLHRKEAREVARESLVLLKNRLETLPLKKSATIAVVGPLADSKRDVMGSWSAAGVADQSVTVLTGIKNAVGENGKVLYAKGANVTSDKGIIDFLNQYEEAVKVDPRSPQEMIDEAVQTAKQSDVVVAVVGEAQGMAHEASSRTDITIPQSQRDLIAALKATGKPLVLVLMNGRPLALVKEDQQADAILETWFAGTEGGNAIADVLFGDYNPSGKLPMSFPRSVGQIPVYYSHLNTGRPYNADKPNKYTSRYFDEANGALYPFGYGLSYTTFTVSDVKLSAPTMKRDGKVTASVQVTNTGKREGATVVQMYLQDVTASMSRPVKQLKGFEKITLKPGETQTVSFXIDIEALKFWNQQMKYDAEPGKFNVFIGTDSARVKKAEFELL

SEQ ID NO: 8020 - protein, 543 aa, Candida tropicalis
MSSSPSIAQEFLATITPYVEYCQENYTKWYYFIPLVILSLNLISMLHTKYLERKFKAKPLAVYVQDYTFGLITPLVLIYYKSKGTVMQFACDLWDKKLIVSDPKAKTIGLKILGIPLIETKDPENVKAILATQFNDFSLGTRHDFLYSLLGDGIFTLDGAGWKHSRTMLRPQFAREQVSHVKLLEPHMQVLFKHIRKHHGQTFDIQELFFRLTVDSATEFLLGESAESLRDESVGLTPTTKDFDGRNEFADAFNYSQTNQAYRFLLQQMYWILNGSEFRKSIAIVHKFADHYVQKALELTDEDLEKKEGYVFLFELAKQTRDPKVLRDQLLNILVAGRDTTAGLLSFLFFELSRNPEIFAKLREEIENKFGLGQDARVEEISFETLKSCEYLKAVINETLRIYPSVPHNFRVATRNTTLPRGGGEGGLSPIAIKKGQVVMYTILATHRDKDIYGEDAYVFRPERWFEPETRKLGWAYVPFNGGPRICLGQQFALTEASYVTVRLLQEFGNLKQDPNTEYPPKLQNTLTLSLFEGAEVQMYLIL

SEQ ID NO: 8021 - protein, 459 aa, Streptococcus pyogenes M1 GAS
MSIKEQTDNNELENGMVRGLENRHVQLIAIAGTIGTGLFLGAGRSIALTGPSIIFVYMITGAFMFMMMRAIGEMLYYDPDQHTFINFISKYIGPGWGYFSGLSYWISLIFIGMAEITAVGAYVQFWFPSWPAWLIQLVFLVLLSSINLIAVRVFGETEFWFAMIKILAILALIATAIFMVLTGFETHTGHASLSNIFDHFSMFPNGKLKFFMAFQMVFFAYQAIEFVGITTSETANPRKVLPKAIQEIPTRIVIFYVGALVSIMAIVPWHQLPVDESPFVMVFKLIGIKWAAALINFVVLTSAASALNSTLYSTGRHLYQIANETPNALTNRLKINTLSRQGVPSRAIIASAVVVGISALINILPGVADAFSLITASSSGVYIAIYALTMIAHWKYRQSKDFMADGYLMPKYKVTTPLTLAFFAFVFISLFLQESTYIGAIGATIWIIIFGIYSNVKFK

SEQ ID NO: 8022 - protein, 139 aa, Geitlerinema sp. PCC 9228
VYKFNHEEHGVVVGEDCGQDIPSYLGLHYPSTDIPPQARALYLKNWLRIIPDANYAAVSVVPERHAHTGQPLDLSYSVLRSVSPRHVRYLQNMGVSASMSISIIKDGQLWGLVACHHYQRKYIPYEIRTACEFLAQVLS

SEQ ID NO: 8023 - protein, 923 aa, Lotus japonicus
MMELPATRILSQAVTCFLCLYIFIGSASATEGFESIACCADLNYTDPLTTLNYTTDYTWFSDKRSCRKIPETELRNRSNENVRLFDIDEGKRCYNLPTIKNGVYLIRGTFPFDSLNSSFNASIGVTQLGAVRSSRLQDLEIEGVFRATKDYIDFCLLKGEVYPFISQLELRPSPEEYLQDFPTSVLKLISRNNLGDTKDDIRFPVDQSDRIWKASSISSSAVPLSSNVSNVDLNANVTPPLTVLQTALTDPERLEFIHTDLETEDYGYRVFLYFLELDRTLQAGQRVFDIYVNSEIKKESFDVLAGGSNYRYDVLDISASGSLNVTLVKASKSEFGPLLNAYEILQVRPWIEETNQTDVGVIQKMREELLLQNSGNRALESWSGDPCILLPWKGIACDGSNGSSVITKLDLSSSNLKGLIPSSIAEMTNLETLNISHNSFDGSVPSFPLSSLLISVDLSYNDLMGKLPESIVKLPHLKSLYFGCNEHMSPEDPANMNSSLINTDYGRCKGKESRFGQVIVIGAITCGSLLITLAFGVLFVCRYRQKLIPWEGFAGKKYPMETNIIFSLPSKDDFFIKSVSIQAFTLEYIEVATERYKTLIGEGGFGSVYRGTLNDGQEVAVKVRSATSTQGTREFDNELNLLSAIQHENLVPLLGYCNESDQQILVYPFMSNGSLQDRLYGEPAKRKILDWPTRLSIALGAARGLAYLHTFPGRSVIHRDIKSSNILLDHSMCAKVADFGFSKYAPQEGDSYVSLEVRGTAGYLDPEYYKTQQLSEKSDVFSFGVVLLEIVSGREPLNIKRPRTEWSLVEWATPYIRGSKVDEIVDPGIKGGYHAEAMWRVVEVALQCLEPFSTYRPSMVAIVRELEDALIIENNASEYMKSIDSLGGSNRYSIVIEKRVLPSTTSTAESTITTQSLSHPQPR

SEQ ID NO: 8024 - protein, 502 aa, Anthurium andraeanum
MGNGRITVLLLSVVLLSVAPSGSCSAGEWPSSGQGPEDVGAGGVEGGQELFERWMEKHRKVYAHPGEKARRYANFLSNLAFVRKRNAEGRRAPSSGQGVGMNVFADLSNEEFREVYSSRVLRKKAAEGRGARRRAGEGRVVAGCDAPASLDWRKRGAVTAVKNQGDCGSCWAFSSTGAMEGINAITTGELISLSEQELVDCDTTNEGCDGGYMDYAFEWVINNGGIDSEANYPYTGQADSVCNTTKEEIKVVSIDGYEDVATSESALLCAAVQQPVSVGIDGSSLDFQLYAGGIYDGDCSGNPDDIDHAVLVVGYGQQGGTDYWIVKNSWGTDWGMQGYIYIRRNTGLPYGVCAIDAMASYPTKQFAPAATPPSPAPPPPSPPPPPTPPSPSPSQCGDYSYCPSDETCCCLVELGGFCLIYGCCAYQNAVCCTGTVYCCPQDYPICDVPDGLCLQHLGDVVGVAARKRKLAKHKFPWTKAGDTPQQYYQPLLWKRDGVAALR

SEQ ID NO: 8025 - protein, 293 aa, Zea luxurians
IIESVGEGVTDVAPGDHVLPVFTGECKECAHCKSAESNMCDLLRINTDRGVMIGDGKSRFSINGKPIYHFVGTSTFSEYTVMHVGCVAKINPQAPLDKVCVLSCGISTGLGASINVAKPPKGSTVAVFGLGAVGLAAAEGARIAGASRIIGVDLNPSRFEEARKFGCTEFVNPKDHNKPVQEVLAEMTNGGVDRSVECTGNINAMIQAFECVHDGWGVAVLVGVPHKDAEFKTHPMNFLNERTLKGTFFGNYKPRTDLPNVVELYMKKELEVEKFITHSVPFAEINKAFDLMA

SEQ ID NO: 8026 - protein, 368 aa, Ralstonia solanacearum
MKTKAAIAWKAGAPLTVEEVDLQGPRAGEVLVEIKATGICHTDYYTLSGADPEGIFPAILGHEGAGVVLEVGAGVTSLKAGDHVIPIYTPECRQCKFCLSRKTNLCQAIRATQGKGLMPDGTSRFSLDGKPLFHYMGTSTFANHIVVPEIALAKIRPDAPFDKVCYIGCGVTTGVGAVVYTAKVEAGANVVVFGLGGIGLNVIQGAKMVGADKIIGVDLNPAREAMARKFGMTHFINPKDVGNVVDHIIQLTDGGADYSFECIGNTQVMRQALECTHKGWGQSIIIGVAEAGAEISTRPFQLVTGREWKGSAFGGARGRTDVPKIVDWYMEGKLNIDDLITHTLPLERINEGFDLMKRGESIRSVVLY

SEQ ID NO: 8027 - protein, 155 aa, Glycine max
  unsure (1)..(155): unsure at all Xaa locations
MGMVPDERCVKNRYWIERTTDLAVXPMVLDSHTFVLNEEDRPKDLYLLPTYEGQXFVNLGARVARFTVELAKKAGPVLAVXLLRVLLKRSDSIIGHHMNVKVMCADLTFPNLYIAEGSADLLFCYWVFMCASXTEVANSAARMIVWYKGDAYVLF

SEQ ID NO: 8028 - protein, 191 aa, Pseudomonas aeruginosa UCBPP-PA14
MQGETLAVSAAAGAVGSIVGQIARIRGCRTVGIAGGASKCAWLVRELGFDAALDYKTGTLADDLRRTCPDGIDAYFDNTGGAILDACLPNMAEHGRVACCGAISQYDLDRPAAGPAGIPGLLIIKRLTLRGFLLGDFLESRERALSDLKAWVDSGQIKVYEDVLYGLESLPAALVGLLNGENFGKRIVKVA

SEQ ID NO: 8029 - protein, 247 aa, Mycobacterium tuberculosis H37Rv
MASLLNARTAVITGGAQGLGLAIGQRFVAEGARVVLGDVNLEATEVAAKRLGGDDVALAVRCDVTQADDVDILIRTAVERFGGLDVMVNNAGITRDATMRTMTEEQFDQVIAVHLKGTWNGTRLAAAIMRERKRGAIVNMSSVSGKVGMVGQTNYSAAKAGIVGMTKAAAKELAHLGIRVNAIAPGLIRSAMTEAMPQRIWDQKLAEVPMGRAGEPSEVASVAVFLASDLSSYMTGTVLDVTGGRFI

SEQ ID NO: 8030 - protein, 634 aa, Xanthomonas campestris pv. campestris str. ATCC 33913
MSTATNPLDLDVCAREPIHIPGLIQPYGVLLVIDPADGRIVQASTTAADLLGVPMAALLGMPYTQVLTLPEAQPFAVDDQPQHLMHAEVRFPQRATPPDSAWVAAWHLYPQQWLVEMEPRDARLLDVTLREAMPLLRSVERDPGIAEAAVRVAKGLRSLIGFDRVMIYRFDEEWNGDIIAEARKPELEAYLGLHYPASDIPAQARALYLRNRVRQIADVGYQPSPIQPTVHPQLGTPVDLSDVSLRSVSPVHLEYLANMGVTATLVASIVVNDALWGLISCHHYSPHFTNHAMRDVTDAVARTLAGRIGALQAVARARLESVLLTVREKLITDFNDAEHMTVELLDDMAPDLMDVVDADGVAIFHGNDISRHGTTPDVAALRRIRDHIESEHHDALREDAVGALHVDAIGEVFPELADLAPLAAGFIFVPLMPQSRSALLWTRREQIQQIKWAGNPQLAKLEDIPNSRLSPRKSFDLWQQTVRGRARRWSPLHLESARSLRVLIELMERKRFQQDFTLLEASLSRLRDGVAIIERGTANAAHRLLFVNTAFADVCGSDVAELIGRELQTLYASDAPRANVELLQDALRNGRAAYVTLPLQVSDGAPVYRQFHLEPLPSPSGVTAHWLLQLRDPE

SEQ ID NO: 8031 - protein, 421 aa, Pyrobaculum aerophilum str. IM2
MAKIYIATDVLGFFAVDEANNIVDKELYERKLDLIASRLIELEKSNYVPELVALIERVKAKGDKIVLEDPELARKLVSVVRGVEIVGESPSPVLVAFRQNFEKYLPSLGLTWEEYRKLLFDVSDLITRLKLRQAVERRDLFIAQAISALDDVDKILNLIASRIREWYGLHFPELEELVRDNREYVSIVYHLGHRSRITEDSLKKAVANIPDDRAKKIVESAKKSIGAEMSEWDLDQLRAYADIFLRLDSYREKLATYIDEAMKEVAPNVRELVGPLLGARLIKLAGGLTRMAFLPASTIQVLGAEKALFRALRTGGKPPKHGVIFQYPEIFRSPRWQRGKIARALAAKLAIAAKADAFTGNFIAPRLKEELMKRIQEIKTLYAKPPPKAPAQPSARAPPPPPPPPRGGERRPPPRRERGRR

SEQ ID NO: 8032 - protein, 335 aa, Streptomyces antibioticus
MNLLVTGAAGFIGSRYVHHLLEAARAGGEPAPVITVLDKLTYAGVLGNVPDDPAVTFVRGDIADAPLVDSLMAEADQVVHFAAESHVDRSITSPGTFVRTNVLGTQMLLDACLRHGVGPFVHVSTDEVYGSIEHGSWPEHQPLCPNSPYSASKASSDLLALSYHRTHGLDVRVTRCSNNYGPHQFPEKLVPLFVTNLLDGLRVPLYGDGLNVREWLHVDDHCLGVDLVRTQGRPGEVYHIGGGTELTNRDLTGLLLDAFGVGWDVVDPVADRKGHDRRYALDCAKAADELGYRPRRDFAEGIARTIDWYRDNRAWWEPLKKRPAGPAAPRGAAAP

SEQ ID NO: 8033 - protein, 364 aa, Saccharomyces cerevisiae
MSAPKKIVVLPGDHVGQEITAEAIKVLKAISDVRSNVKFDFENHLIGGAAIDATGVPLPDEALEASKKVDAVLLGAVGGPKWGTGSVRPEQGLLKIRKELQLYANLRPCNFASDSLLDLSPIKPQFAKGTDFVVVRELVGGIYFGKRKEDDGDGVAWDSEQYTVPEVQRITRMAAFMALQHEPPLPIWSLDKANVLASSRLWRKTVEETIKNEFPTLKVQHQLIDSAAMILVKNPTHLNGIIITSNMFGDIISDEASVIPGSLGLLPSASLASLPDKNTAFGLYEPCHGSAPDLPKNKVNPIATILSAAMMLKLSLNLPEEGKAIEDAVKKVLDAGIRTGDLGGSNSTTEVGDAVAEEVKKILA

SEQ ID NO: 8034 - protein, 365 aa, Bacteroides thetaiotaomicron VPI-5482
MAKHRIKYMKSFFIGNIEIKVPVIQGGMGVGISLSGLASAVANEGGVGVISCAGLGLLYPKEKGTYTEKCISGLKEEIRKSRMKTKGIIGVNVMVALSNYADMVRTAINEKIDVIFSGAGLPLDLPSYLTTGSITKLVPIVSSSRAAKIICDKWQKNYNYLPDAIVVEGPKAGGHLGFKKEQLQDQNYALDVLIPEVVAIAASYKEQKHIPVIAAGGISTGEDIAHFMELGASGVQMGSIFVTTLECDASETFKEVYIHSKSEDVLIIESPVGMPGRAIDGEFIHSVNNGLEKPRKCSFHCIKTCDYTKSPYCIIKALYNAAKGNMKKGYAFAGSNAFLADKISSVKEVMNTLEREFFLATHKLV

SEQ ID NO: 8035 - protein, 521 aa, Candida maltosa
MIDEILPKLVQYWYIVLPTLLIIKHVVSYINTQRLMRKFRAKPVTNVLNDGFFGIPNGIKAIKEKNKGRAQEYNDEKFAAGPKPKVGTYLFKLFTKDVLVTKDPENIKAILATQFEDFSLGKRLDFFKPLLGYGIFTLDGEGWKHSRAMLRPQFAREQVGHVKLIEPHFQSLKKHIIKNKGQFFDIQELFFRFTVDSATEFLFGESVESLKDESIGYDQQDFDFDGRKNFAEAFNKAQEYLGTRAILQLFYWLVNGADFKKSVAEVHKFTDYYVQKALDATPEELEKHSGYIFLYELVQQTRDPKVLRDQSLNILLAGRDTTAGLLSFALFELARNPEVWSRLREEIGDKFGLDEDATIEGISFESLKQCEYLKAVVNECLRMYPSVPRNFRIATKHTTLPRGGGPDGKDPIFIKKGAVVSYGINSTHLDPMYYGPDARLFNPDRWSKPETKKLGWAFLPFNGGPRICLGQQFALTEASYVLVRMIQNFKELELTPNTVYPPRRLTNLTMSLYDGAYIKVN

SEQ ID NO: 8036 - protein, 435 aa, Oryza sativa (japonica cultivar-group)
MAPPSMDYWLGFFRGAGDSIFDAIDAAIAVAASDHPAALRSRRDAIAERLYTAHLVPGAPPAGPPAGGGAAAADAPTAQLLLHPEGAASVPSLCSSDRAEVITDDGAVPRRDDDPVAAETERIKAILLNDQEKSEATLLELLRRLQQLELTVDTLTVTEIGKAVSSYRKHNSKQIRHLVRLLIEGWKRIVDEWMSSRDAIDERGLSSPSMDEGALFATPSTSIRLSEENQGSKFFDGMDDDGNTRSNGGRDNGRLYTRNQEPARRPLPPMAQQYDPDQSWKQEQSAMRQSRPQELSNGQTREQFIAAMLARPSNPESGPGRPQPRTKQHQDASPAQGRSQPMPSDKSASHHDENSVRAKLELAKNAKLELTNSAKLEVTKRKLQEGYQEFDNAKKQRTIQMVDPQNLPKQANRNWQPNGRPRNNSNFNNNRNWSR

SEQ ID NO: 8037 - protein, 250 aa, Nicotiana tabacum
MGKCYPTVSEEYLKAVDKCKRKLRGLIAEKNCAPLMLRLAWHSAGTYDVCSKTGGPFGTMRFKAEQGHGANNGIDIAIRLLEPIKEQFPILSYGDFYQLAGVVAVEVTGGPDVPFHPGREDKTEPPVEGRLPDATKGSDHLRDVFVKQMGLSDKDIVALSGGHTLGRCHKERSGFEGPWTTNPLIFDNSYFTELLSGEKEGLLQLPSDKALLSDPAFRPLVEKYAADEDAFFADYAEAHLKLSELGFAEV

SEQ ID NO: 8038 - protein, 369 aa, Anabaena azollae
MQVKAAVAYSVVQPLTIETVELEGPQAGEVLVEIKASGVCHTDAYTVSGADPEGLFPAILGHEGAGVVVEVGADVKSVKPGDHVIPLYTPECRQCEYCLSFKTNLCQAIRVTQGRGLMPNATSRFSIVGKMIHHYMGTSTFANYTVLPEKAVAKIREDAPFDKVCYIGCGVTTGIGAVIYTAKVEAGANVVISGLGGIGLNIIQAAKMVGANMIVGVDINPKKRALAEKLGMTHFVNPHEIEGDLVSYLIDLTKGGADYPFECIGNINVMRQALECCHKGWGVSVIIGVAGAGQEISTRPFQLVTGRVWKGSAFGGARGRTDVPKIVDLYMNGQINIDDLITHVMPIEQINHAFDLMYRGESIRSVVTF

SEQ ID NO: 8039 - protein, 390 aa, Lactoris fernandeziana
PYEVPMTAGALQSYKLAAKAISRLQSLPSGSMERLVDTVVQEVFELTGYDRIMAYKFHEDDHGEVISEVTKPDLEPYLGLHYPATDIPQASRFLFMKNKVRMICDCRAKPVKVYQDEKLSFDLTLCGSTLKAPHSCHLQYMENMGFIASLVMAVVVNEGEEEVDSQESSQQQAPKRKRLWGLVVCHNTTPRFVPFPLRYACEFLMQVFAIHVNKEFELENQILEKNILRTQTLLCDMLFRDAPMGIVTQSPNIMDLVKCDGAVLLYQNKVYRLGLAPTESQIHDIAQWLSEYHKDSTGLSTDSFHDAGYTRARSLGDIVCGMAAVRINSGDMLFWFRSHTAAEVRWGGAKHDPDEKDDGRRMHPRSSFKAFLEVVKYRSFPWKDYEMDAI

SEQ ID NO: 8040 - protein, 791 aa, Schizosaccharomyces pombe
MKTPKFITYVTRGFKGLESKSVENNKDHIVENSSPIASKFHEFDEQKKSFEIINYAGHEKFVDDITERESSVPGNAVYDITVRDIDAIVPVTDDVDIPASTFRMWILAFGLATVIAGVDAFFLMRYPSVSIAAIVALLVAYPLGQLWYYIIPQWEIKLPRGIRVSLNPGRFNRKEHACLYIFVNICVSAKLVNTLIIEQIKFFGVNIGIGRAILFNLCSYLSSFGWSGLALPILVYPPTLIWPSVLSSCALFKIFHDNDNTKACNWTISRLRYFFIVFVASFIWYWFPDLIFPALSSLGAWISWCKPSSAVLSQIFGVKTGLGLFPLTLDWAQISSLSNPLITPWWATCCIFTSFVFWIWIVLPGLYYQNYWQVAHFPIMTNSIYTVSGKSYDAQKVVDSKWELVTQKYQEYSPVMLPIAFIINIALSLGAFSSMMISFFLRFPTDVIQPICHVFKYSDIHTKLLKKYKRVHWGFYLASIIVSLGLGFAFTEGWHDIQIRSYGFVVSMVIGAALYIPLSLIESRSSFTISMQAFFEIVAAFWFNGQPMALLYFYSFGFGTLQHAMHMTQSAKIGHYMKVPPRLVAALLFTSGIWSSLVNSAVTGWIMYHVRDVCTSNAENNMTCRSPKTQFNSHLIWGLVGNHIFSSDGRYSFVMWFFLVGAVVSVVVYLLQISFPKSSWKHVNPALLLGGAAQIPSVTGINYSTWAAVAFCFNYLIRRGYYSWWKKYNLITAAAMDCGVAIAGLFIYFCVVYTGGSSNFSWWGTTVSSAGCDKKGCAHLSVSDISKPSGW

SEQ ID NO: 8041 - protein, 353 aa, Pseudomonas stutzeri
MSYTVTIEPIGEQIEVEDGQTILAAALRQGVWLPFACGHGTCATCKVQVLEGDVEIGNASPFALMDIERDEGKVLACCATVESDVTIEVDIDVDPDFEGYPVEDYAAIATDIVELSPTIKGIHLKLDRPMTFQAGQYINIELPGVEGARAFSLANPPSKADEVELHVRLVEGGAATTYIHEQLKTGDALNLSGPYGQFFVRSSQPGDLIFIAGGSGLSSPQSMILDLLEQNDERKIVLFQGARNLAELYNRELFEALDRDHDNFTYVPALSQADEDPDWKGFRGYVHEAANAHFDGRFAGNKAYLCGPPPMIDAAITALMQGRLFERDIFMEKFLTAADGAEDTQRSALFKKI

SEQ ID NO: 8042 - protein, 556 aa, Mycobacterium tuberculosis H37Rv
MPDDIAAADPTDTQPHLRRDLANRHIQLIAIGGAIGTGLFMGSGRTISLAGPAVMVVYGIIGFFVFFVLRAMGELLLSNLNYKSFVDFAADLRGPAAGFFVGWSYWFAWVVTGIADLVAITGYARFWWPGLPIWVPALVTVALILAVNLFSVRHFGELEFWFALIKVAAIVCLIAVGAILVATNFVSPHGVHATIENLWNDNGFFPTGFLGVVSGFQIAFFAYIGVELVGTAAAETADPRRTLPRAINAVPLRVAVFYIGALLAILAVVPWRQFASGESPFVTMFSLAGLAAAASVVNFVVVTAAASSANSGFFSTGRMLFGLADEGHAPAAFHQLNRGGVPAPALLLTAPLLLTSIPLLYAGRSVIGAFTLVTTVSSLLFMFVWAMIIISYLVYRRRHPQRHTDSVYKMPGGVVMCWAVLVFFAFVIWTLTTETETATALAWFPLWFVLLAVGWLVTQRRQSRRSFGFHCQVVGVRQQLGRGMARLAMKIHARPKLRSAVVVEPVSAGEPGARRSAKSVRKLASDDSQSAHCPVAVVGLADGGRDPQYHHDGPDR

SEQ ID NO: 8043 - protein, 147 aa, Glycine max
MAASGPRPPRTRTTRGPSIRPVYETFEPKSEMKEKEEAYFLHIYLPGFVKEKIKINFVGSSRVVRVAGERPLGGNRISNFEQAYPVPENCEVGKLQGKYELGTLIITMPKKPIISQVSPKAKVETTPRIGPTPLISPPKKSVPDQSP

SEQ ID NO: 8044 - protein, 398 aa, Zea mays; identical to SEQ ID NO: 1516

SEQ ID NO: 8045 - protein, 184 aa, Glycine max
  unsure (1)..(184): unsure at all Xaa locations
MAASSSEKQVVVIGIDDSEQSTYALNWALDNFFPSPIFKLVLIHSRPTATSAVGFAGPGRFILLRSSFSRFLRXLRIPFLVFAGAAEVLPIVDSDLRKIGARVLETAKQLCINKSVNDVTAEVVEGDPRNVLCDAVDKYRAAMLVVGSHGYGAIKRAVLGSVSDYCAHHAHCTVMIVKKPKIKH

SEQ ID NO: 8046 - protein, 177 aa, Oryza sativa (japonica cultivar-group)
MEVTLRRFELSDVDAMMAWASDPAVAAFCRWEPYQSTEPLLAYLRDTVLPHPWFRAICLATGAGAGDGDGRPVGAVSLAPTADACRGELGYVVARAHWGKGVATAAVRRAVAAVLGGEVSGLARVEALVDVDNRASQRVVEKAGFRREGVLRRHYWHKGRVRDLVMYSFVSSDQLAE

SEQ ID NO: 8047 - protein, 364 aa, Bifidobacterium longum DJO10A
MSLTIGIVGLPNVGKSTMFNALTRNNVLAENYPFATIEPNTGIVPLPDKRLPVLAKLVHTEKVVPATVTFVDIAGIVKGASEGEGLGNKFLANIREADAICEVVRAFEDDDIVHVNGKVDPADDIDTINTELILADLQTIENALPKLEKDLRGKKIEPAYMDAVKQAKTILEAGETLDKAAREGRFDKDSVYDLHLMTAKPFIYVFNVDDNELANKDLQAKLAASVAPAPAVFLNAQFEADLTELDEADAREMLADAGLSESGLDQLARVGFDILGLQTFLTAGVKEVRAWQIHKGWTAPQAAGVIHTDFEKGFIKADIVSYDDFVAADGSMAKIKEEGKLRQEGRDYVMADGDIVEFKFNVSK

SEQ ID NO: 8048 - protein, 190 aa, Pirellula sp.
MAKILMLVGDFVEDYEAMVPYQMLLMLEHDVATVCPGKSAGDSVATAIHDFEGHQTYSEKPGHRFAITADFDGLQPETFDALVIPGGRAPEYLRLNEKVLDIVRHFADQNKPIAAVCHGPQVLAAAGVLKNRECSCYPAVAPEVQIGGGTYMTPGEGMDTAHVDGNLVTAPAWPAHPAWMREFCRLLPTD

SEQ ID NO: 8049 - protein, 711 aa, Schizosaccharomyces pombe
MLHLLSKDEFNSTLKSFEEQTESVSWIIDLRLHSKYAVSHIKNAINVSLPTALLRRPSFDIGKVFACIKCNVKVSLDEINAIFLYDSSMAGMNRIYDLVQKFRRGGYSKKIYLLSNGFEAFASSHPDAIVSTEMVKESVPYKIDINENCKLDILHLSDPSAVSTPISPDYSFPLRVPINIPPPLCTPSVVSDTFSEFASHAEYPGFSGLTPFSIHSPTASSVRSCQSIYGSPLSPPNSAFQAEMPYFPISPAISCASSCPSTPDEQKNFFNRRQCPQQTPARPSLRSVPSYPSSNNQRRPSASRVRSFSNYVKSSNVVNPSLSQASLEIIPRKSMKRDSNAQNDGTSTMTSKLKPSVGLSNTRDAPKPGGLRRANKPCFNKETKGSIFSKENKGPFTCNPWGAKKVSPPPCEVLADLNTASIFYKFKRLEEMEMTRSLAFNDSKSDWCCLASSRSTSISRKNRYTDIVPYDKTRVRLAVPKGCSDYINASHIDVGNKKYIACQAPKPGTLLDFWEMVWHNSGTNGVIVMLTNLYEAGSEKCSQYWPDNKDHALCLEGGLRISVQKYETFEDLKVNTHLFRLDKPNGPPKYIHHFWVHTWFDKTHPDIESITGIIRCIDKVPNDGPMFVHCSAGVGPTGTFIAVDQILQVPKNILPKTTNLEDSKDFIIQLVNSLDTQRMKMVQNFEQFKFLYDVVDYLNSGVNQASKPLMT

SEQ ID NO: 8050 - protein, 338 aa, Vibrio vulnificus CMCP6
MKVLVTGGCGYIGSHACVALVRAGHQPIVLDNFSNSHPNVVARIETLIGQPLVVYQGDIRDRLVLDAIFDQHEIGAVMHFAGLKAVGESVEKPLEYYDNNLAGTLNLLAAMRVAHVYRLIFSSSATVYGDPKTVPITEAAPTGATTNPYGTSKHMVERCLSDFSAANPDWSITLLRYFNPIGAHPSGLIGEDPSGIPNNLMPFITQVAIGRRERLSIFGDDYPTADGTGVRDYIHVQDLVEGHVAALEKRGNVRGLHTYNLGTGNGVSVLQMVAAMNRVLGRELPVRIEPRRAGDIAQCFAQADKAAQELGWKAQHDLTDMVEHSWHWQQRNPNGYQS

SEQ ID NO: 8051 - protein, 216 aa, Escherichia coli O157:H7 EDL933
MLDLFADAEPWQEPLAAGAVILRRFAFNAAEQLIRDINDVASQSPFRQMVTPGGYTMSVAMTNCGHLGWTTHRQGYLYSPIDPQTNKPWPAMPQSFHNLCQRAATAAGYPDFQPDACLINRYAPGAKLSLHQDKDEPDLRAPIVSVSLGLPAIFQFGGLKRNDPLKRLLLEHGDVVVWGGESRLFYHGIQPLKAGFHPLTTDCRYNLTFRQAGKKE

SEQ ID NO: 8052 - protein, 333 aa, Glycine max; identical to SEQ ID NO: 4388

SEQ ID NO: 8053 - protein, 278 aa, Oryza sativa
  unsure (1)..(278): unsure at all Xaa locations
MSYYVDPCTSVPQYPLYPVYGYHPSTIVIKKVLRQRYVDRKLGQYCHVGTARRHISKTASQNGKKPAAAAAMVSLKLQKRLASSVLKCGKGKVWLDPNEVNEISMANSRQNIRKLVKDGFIIKKPQKIHSRSRARRAHEAKQKGRHSGYGKRRGTREARLPTKILWMRRMRVLRRLLRKYREAKKIDKHMYHDMYMKVKGNMFKNKRVLMESIHKSKAEKAREKTLSDQFEAKRAKSKASRERKIARRDERLAQGPXXEPAAPAVPAQTAAAPKKYKK

SEQ ID NO: 8054 - protein, 168 aa, Triticum aestivum; identical to SEQ ID NO: 971

SEQ ID NO: 8055 - protein, 373 aa, Bacteroides thetaiotaomicron VPI-5482
MKLFDVYPLYDINIVKGQGCKVWDENGTEYLDLYGGHAVISIGHAHPHYVEMISNQVATLGFYSNSVINKLQQQVAERLGKISGYEDYSLFLINSGAEANENALKLASFYNGRTKVISFSKAFHGRTSLAVEATNNPTIIAPINNNGHVTYLPLNDIEAMKQELAKGDVCAVIIEGIQGVGGIKIPTTEFMQELRKVCTETGTILILDEIQSGYGRSGKFFAHQYNHIQPDIITVAKGIGNGFPMAGVLISPMFKPVYGQLGTTFGGNHLACSAALAVMDVIEQDNLVENAKAVGDYLLEELKKFPQIKEVRGRGLMIGLEFEEPIKELRSRLIYDEHVFTGASGTNVLRLLPPLCLSMEEADEFLARFKRVL

SEQ ID NO: 8056 - protein, 123 aa, Zea mays
  unsure (1)..(123): unsure at all Xaa locations
WHLHEEFDTHDPKDNTLLLPYLRKRPNIIEIGAARDIVFALSPIGVCAAFSRDTNQRICFLNGSLHEVIRYFFHXKTNDSFKTASVFGSEIFSALRCSITRIXYVRRGPXNPDAGFPLFDSPC

SEQ ID NO: 8057 - protein, 377 aa, Mycobacterium smegmatis
MVENQYRFFTTLQANGRRRLLSNTVLITGGAGFIGSALAQRLTHEGYEVAVMDLLHPQVHARGSKVDLPRSVRLFTGDVTHAPDWDAVLRLFQPAQVVHLAAETGTAQSLSEATRHSSVNVVGTTQLLDALSRADLVPDQIVLASSRAVYGEGEWRTATDSTFYPLPRSHAQLAAGRWDPVGPNGEHAVPLPSCASRTEPRPTNVYAATKLAQEHVLTAWTAAHDTKLSVLRLQNVYGPGQSLTNSYTGIVALFARLAREQQTLEVYEDGNILRDFVFIEDVVEALYAAIRRPADQRRCLDIGSGVGSSIHALAQKVAGICGAPTPKVVGKFRDGDVRAASCDIEPARMELDWRPKWTLDDGLPALLDWIAKSDVSH

SEQ ID NO: 8058 - protein, 122 aa, Citrullus lanatus
LSRLPGGPEVPFHPGREDKPEPPPEGRLPDATKGSDHLRDVFYTMGLSDQDIVALSGGHTLGRAHKERSGFEGPWTSNPLIFDNSYFTELLSGEKEGLLQLASDKALLSDPVFRPLVEKYAR

SEQ ID NO: 8059 - protein, 886 aa, Xanthomonas axonopodis pv. citri str. 306
MSSVFVSRLAMAVGLGLTLPCLALATPAKPAGSPEQRAAALVAQMSREEKVAQAMNDAPAIPRLGIPAYEWWSEGLHGIARNGYATVFPQSIGLAASWNTSLMQQVGTVVSTEARAKFNQAGGPGKDHQRYAGLTIWSPNINIFRDPRWGRGMETYGEDPFLTGQMAVGFIRGLQGEDLNHPRTIATPKHIAVHSGPEPGRHGFDVDVSPHDVEATYTPAFRAALVEGQAGSVMCAYNALHGTPVCAADWLLNGRVRGDWGFKGFVVSDCDAVDDMTQFHYFRPDNAGSSAAALKAGHDLNCGHAYRELGTAIARGEVDEALLDQSLVRLFAARYRLGELEAPRKDPYARLGAKDVDNAAHRALALQAAAESIVLLKNDANTLPLRAGTRLAVIGPNADALAALEANYQGTSSAPVTPLLGLRQRFGAQQVSYAQGAPLAAGVPGMIPETALRSDGKPGLRGEYFDNVDMSGAARVVRQDRTVSFNWDQVAPAKGVPADRYAVRWSGELLPPSAGDYTLAVRVARCFDCSGHDPVRLYIDDKLVVAGNAEDKHVPAGMHNADGRSVETVLHFDDTRPRKIRLEMEHRGQDQGVRLEWLAPAAAQLAEAAQAVAQADAVVAFVGLSPDVEGEELRIDVPGFDGGDRNDIALPAPQQALLERAKASGKPLVVVLMSGSAVALNWAKMHADAIVAAWYPGQSGGTAIARMLAGDDNPGGRLPVTFYRSTKDLPPYVSYDMKGRTYRYFKGEPLFPFGYGLSYTRFAYDAPQLSTTTLQAGNPLQVTATVRNTGARAGDEVAQVYLQYPDRPQSPLRSLVGFQRVHLAAGEQRTLTFHLDARALSDVDRSGQRAVEAGDYTLFVGGGQPGTGAAGNAASFSIQGRSPLPK

SEQ ID NO: 8060 - protein, 228 aa, Gossypium australe
FTSLCHTDVYFWEAKGQTPLFPRIFGHEAGGIVESVGEGVTHLKPGDHVLPVFTGECGNCRHCKSKESNMCDLLRINTDRGVMLSDGKTRFSINGKPIYHFVGTSTFSEYTVAHVGSVAKINPAAPLDKVCILSCGISTGLGAALNVAKPTKGSTVAIFGLGAVGLAAAEGARIAGASRIIGVDLNPNRFEEAKKFGCTEFVNPNDHNKPVQEVLAEMTNGGVDRSVE

SEQ ID NO: 8061 - protein, 138 aa, Zea mays
  unsure (1)..(138): unsure at all Xaa locations
GGGGDYTCVGGRGGSFFGSGYGPAGSDVLTGDWYCSCRAHNFASRCSCFKCSAYKEEAAANRGAGGFDGYITRSRSYSLRNGAAGAXAGSDRTTKRTGWKYRNWICTRXSGCSEHNIXSMMEWFMCQRTGDFGSAVIT

SEQ ID NO: 8062 - protein, 380 aa, Vigna radiata var. radiata
MIQAQTLQHFGNGAREGDQSYFDPGAPPPFKIADIRAAIPKHCWEKSTLRSLSYVLRDVLVVTALAASAISFNSWFFWPLYWPAQGTMFWALFVLGHDCGHGSFSNSSKLNSFVGHILHSLILVPYNGWRISHRTHHQNHGHVEKDESWVPLTEKVYKNLDDMTRMLRYSFPFPIFAYPFYLWNRSPGKEGSHFNPYSNLFSPGERKGVVTSTLCWGIVLSVLLYLSLTIGPIFMLKLYGVPYLIFVMWLDFVTYLHHHGYTHKLPWYRGQEWSYLRGGLTTVDRDYGWINNVHHDIGTHVIHHLFPQIPHYHLVEATKSAKSVLGKYYREPQKSGPLPFHLLKYLLQSISQDHFVSDTGDIVYYQTDPKLHQDSWTKSK

SEQ ID NO: 8063 - protein, 246 aa, Vibrio cholerae
MRKIALITGSKGGIGSAISTQLVSEGYRVIATYYTGNYQCALDWFNEKQFTEDQVRLLELDVTNTEECAERLAKLLEEEGTIDVVVNNAGITRDSVFKKMPHQAWKEVIDTNLNSVFNVTQPLFAAMCEKGFGRIINISSVNGLKGQFGQTNYSAAKAGMIGFSKALAAEGARYGVTVNVIAPGYTLTPMVEQMRAEVLQSIVDQVPMKRLAKPEEIANAVSYLASDAAAYITGETLSVNGGLYMR

SEQ ID NO: 8064 - protein, 305 aa, Miscanthus sinensis var. formosanus
IESVGEGVTDVAPGDHVLPVFTGECKECAHCRSAESNMCDLLMINTDRGVMIGDGKSRFSINGKPIYHFVGTSTFSEYTVMHVGCVAKINPEAPLDKVCVLSCGISTGLGASINVAKPPKGSTVAIFGLGAVGLAAAEGARIAGASRIIGVDLNPSRFEEARKFGCTEFVNPKDHKKPVQEVLAEMTNGGVDRSVECTGNINAMIQAFVCVHDGWGVAVLVGVPHKDAEFKTHPMNFLNERTLKGTFFGNFKPRTDLPNVVELYMKKELEVEKFITHSVPFAEINKAFDLMAKGEGIRCIIRMEN

SEQ ID NO: 8065 - protein, 152 aa, Ananas comosus
MVKAVAVLGSSEGVKGTIYFTQEGDGPTTVTGSISGLKPGLHGFHVHALGDTTNGCMSTGPHFNPAGNEHGAPEDETRHAGDLGNVTVGEDGTVNVNIVDSQIPLSGSNSIIGRAVVVHADPDDLGKGGHELSKTTGNAGGRVACGIIGLQG

SEQ ID NO: 8066 - protein, 221 aa, Gossypium herbaceum
DVYYWECKGYTPLFPRILGHEASGIVESVGEGVNDLKPGDHVLPIFTGECKECRHCLSEESNNMCELLRINCDRGVMLADGKTRFSINGKPIYHFVGTSTFSQYTVVHVGQVAKISPTAPLDKVCPISCGICTGFGATVNVAKPKKGQTVALFGLGAVGLAAAEGARVCGASRIIAVDVNPRRFEEAKRFGITEFVNPKDYDKPVQEVIVEMTGGGVDRSV

SEQ ID NO: 8067 - protein, 467 aa, Yersinia pestis CO92
MKNDSSTLKRGLSARHIRFMALGSAIGTGLFYGSAEAIRLAGPAVLLAYLIGGAAVFMVMRALGEMAVHDPVAGSFGHYASRYLGPLAGFLTGWTYTFEMVVVALADVTAFGIYMGLWFPDAPQWVWVLSIIFFIGALNLCSVKVFGEMEFWLSLLKVAAIIAMIAAGLGIMMFGFGAGHDSTGVSNLWAHQGFMPNGITGVIASFAVVMFAFGGIEIIGVTASEAKDPGKVLPRAINTVPIRILLFYVLTLFVLMAIYPWNSIGQNGSPFVEIFSSLGINSAANILNLVVITAAISAINSDIYGAGRMMYGLAQEGLAPKSFSRLTRNGVPYMTILVMAITLLCGVVLNYLIPKNVFLVIASIATFATVWVWLMILVSQVAMRRSMSKAQVARLAFPVPFWPLAPILTILFMAFIIAVLGYFPATRIAMYVGLAWVALMTLAWWIWLRKAPSCVIQERAKSSEMPS

SEQ ID NO: 8068 - protein, 343 aa, Nostoc punctiforme
MTRAINRQFLLAARPVGDIKESDFEYREEPIPSPKDDEVLVRTIYLSLDPTNRIWMSDMEQYMPPVEIGEVMRGGIIGVVEESKNPNFKKGDLVSGLLGWQDYAIALGSSGFSLTRLPNPLPCPLNAFTGPLGATGFTAYFGLLDIGQPKVGETVVVSAAGGAVGSIVGQIAKIKGCRVVGITGSDEKCRWLTEELGFDAAINYKTGDLEKALAQACPNGIDVYFDNVGGIILDAVLTKINLRARLPLCGLISTYNASKPVPGPYNYSQILMKRALVQGFIILDYIPRFHEAIAEIGKWLNQGQIKYALEIVEGLENAPKAILKLFDGNKKGKLVIKVSNEPT

SEQ ID NO: 8069 - protein, 149 aa, Triticum aestivum
MEHAKSGPSSWPELADVVPVPQDDGPSPVVPIAYRDDFREVMDYFRALYFTGERSPRALRLTAEAIELNPGNYTVWHFRRLILEALDFDLLEEMKFVGKIAECNPKNYQIWHHKRWLAEKLGPDIANKEHEFTKKILAIDAKNYHAWSH

SEQ ID NO: 8070 - protein, 332 aa, Streptococcus agalactiae 2603V/R
MSETKVMALREAINVAMSEEMRKDEKVFLMGEDVGVYGGDFGTSVGMLEEFGAKRVRDTPISEAAIAGSAIGAAQTGLRPIVDLTFMDFVTIAMDAIVNQGAKTNYMFGGGLSTPVTFRVASGSGIGSAAQHSQSLEAWLTHIPGLKVVAPGTVNESKALLKSSILDNNPVIFLEPKALYGKKEEVNMDPDFYIPLGKGDIKREGTDLTIVSYGRMLERVMQAAEEVAEEGINVEVVDPRTLIPLDKELIIDSVKKTGKLILVNDAYKTGGFTGEIATMVAESEAFDYLDHPIVRLASEDVPVPYSRVLEQGILPDVAKIKDAIYKVVNKGK

SEQ ID NO: 8071 - protein, 320 aa, Zea mays
MACSLPLHAPFSSSPRILSYRPAPRTLPLFRRGLRVPYHRSPSPPRALPDVAAGAVAGIRDALADAFLTSPPTWRSAAASNLAVFVSGSPFLLSGLSASGFAAAYLLGTLTWRAFGAQGFLLVVAYFVVGTAVTKLRIRQKEALGVAEKRGGRRGPGSVIGSSAAGCVCALLSVYHAGGTASSELWRLGFVASFCTKLSDTVSSEIGKAFGRTTYLVTTLKVVPRGTEGAISIEGTIAGILASVFLAGAGYLLGQVDVSQVVLCVLASQIANYVESYIGATLQDKEGFEWLNNDIVNVLNISIGAILAVLTQQLLVSWRS

SEQ ID NO: 8072 - protein, 118 aa, Betula pendula
GNSQGVSGTIHFTQEADGPTTVTGNISGLKPGLHGFHVHALGDTTNGCMSTGPHFNPAGKEHGAPEDENRHAGDLGNVTVGDDGTASFTIVDKQIPLSGPHSIIGRAVVVHGDPDDLG

SEQ ID NO: 8073 - protein, 1137 aa, Oryza sativa (indica cultivar-group); identical to SEQ ID NO: 3651

SEQ ID NO: 8074 - protein, 183 aa, Zea mays
RRGGGRHRPLRAFSEAGWLLLPHRFVFRFWFVGEREEMAASDVEYRCFVGGLAWATDDHSLNNAFSTYGEVLESKIILDRETQRSRGFGFVTFSTEDAMRSAIEGMNGKELDGRNITVNEAQSRGGRGGGGGGYGGGRRDGGGYGGGGGGYGGGRGGYGGGGGGYGGGNRGGGYGNNDGNWRN

SEQ ID NO: 8075 - protein, 590 aa, Zea mays
MHLKNESSVLKTKPSPRILTEAAPWRQQERSATNICREAEGRPRIASVYADIERRVGGFDFLECNNKDFRALRILGALNARDAKNKNDSSGRPMATHRTGYDLTTSGSFQAPIVVMKPAGTTEKHGVSLASVAPIAGLRSLRKLPARYSSFTGTNETSTNENIHLRMSRAQLKSEETVSSANSPRPTSSSSPRNVLKNAEPERRSRPPVSPKSPSKKSNEVVSPKGRTRSKPSQVKSHRDEVLQSTGNRISLAKQVDVSIIDCPKLPGGNSTFVPPSNAAATASHKAPSILDSDQNIHSLDNIPSPVSVLDTSFYHKRISDSFKDGETHSSEECWNPNSLPDTPQSKASSEANQIKPENLEVLIQKLEQLQSMNEEDASIKEVMASVTANKDHQYIYEILLASGLLHKEHSITALPAQLQPSNYPINPELFLILEQTKPDLVFAFQTVSGTKKSCKPYTGKLHRRLVFDLVNETIAQKMIICRSGSQPVKFLQSRKLSGWQLFKDLCTEVDRQIKCTGEEENGNMILDEDTVNGTKDWMSFDTMLHGMVWEIERSIFKGLIDEVIGGETIEKMQFGQRKLQRQLSFSSIN

SEQ ID NO: 8076 - protein, 158 aa, Clostridium perfringens str. 13
MEIYDISVKDINGENVSLERYRGKVLLIVNTASKCGFTKQFDGLEELYEKYKDEGFEVLGFPCNQFKEQDPGSNSEIMNFCKLNFGVTFPMFEKIDVNGENESLLYSYLKEQKSGMFGSKIKWNFTKFLVDREGNVIKRFSPQTTPKSIEKDIEELLA

SEQ ID NO: 8077 - protein, 232 aa, Triticum aestivum
  unsure (1)..(232): unsure at all Xaa locations
MTSKEEKVDIGTHTPPSHEVAPGHQKDVFTGDIEGVREDFREDDFMTRNGLNLKSFQRRDYGTGVVELDRSMKKRHLHMIAIGGSIGAGFFVGSGGAFTKGGPGAVLICFMIAGVMIFNVVHALGELAVMYPVSGGFYTYSTRFIDPSWGFAMGWNYVFQWVIVLPLELTVASFTVQYWNPNINEGIWITRLLAVXIIFINVFGTLGYXRXREFWSSCFKLAAIIIFMIVAV

SEQ ID NO: 8078 - protein, 313 aa, Lactobacillus plantarum WCFS1
MKALVTGGAGFIGSHLVDHLVESGFEVVVVDDLSMGAISNIKHWEQITIYVADVCDDKFMQQLLADERPDYIYFLAAIASVADSIERPAETHAVNHTAVFNLLEHIRQIRLPIKQFLFTSSAAVYGNLPELPKREDSRVAPVSPYAIDKYATERFVLAYGELYDLPTVCVRFFNVYGPRQNPSSPYSGVLSILTDCLKTQRPFTLFGDGTQTRDFVYVSDVIKALWLITEHQVQHEVINIANGLETSLNGIIQMYQEIAGQQLEIKRAEQRGGEVDHSVASIGKLARLNYESEWPLRRGLTKYWEGECEHARS

SEQ ID NO: 8079 - protein, 311 aa, Xanthomonas campestris pv. campestris str. ATCC 33913
MLVIHGGAGVEKSSLSPEEQAQAREAMQRALRAGHAVLTRGGSAVDAVAATITVLEDAPQFNAGRGAVFTHDGKNELDAAIMDGASGKAGAIAGVHTVKNPILLARSVMDRSKHVMLVGDGAEQFAREQGIALVDPSYFRTDKRWQQLQKALKAEAGDRQAQAELDLETAKHFGTVGALALDRDGHLAAGTSTGGMTNKRYGRVGDAPIIGAGTYANTQCAVSGTGWGEFYIRAVAAYDICARMKYAGQSLQQAAEAVIDQQIPKAGGDGGAIALDAQGNAAFPFNTEGMYRGWIGADGTAHVAIFKDEAL

SEQ ID NO: 8080 - protein, 485 aa, Zea mays
MAARKKKPLLIACQATSARITRSQAAANSTRSGLAPSVPVPLKTEHNHAAKKKMKREASDENASADAGASAPLPKRRTVLKNVTNISCAKISKRCTAVTGLKLGPSQKAGQSINKQCTNKISMLLPLAVGGSSLVDDSNNAEETQMVDLLAQKEKQIVLLKEAQPLQNTEQNKGGACDEASVEERNAMNVHETAALKAGVSNGLNIVDIDKNNGDPQMCVTYVAEIYRNLMASELIRRPRSNYMETLQQDITASMRGVLIDWLVEVSDEYKLVADTLYLTVYLIDQFLSQNCIQTHKLQLLGITSMLIASKYEEYSAPSAEEFCNITAGTYAKAEVLEMEQQVLNDLGFHLSVPTTNTFLRRFLRAAQASRTAHLTTLNYLASYLAELTLISYDFMKFLPSEVAASSIFLAKWTLDQSDHPWNPTLEHYTSYKSFDIRTCVRALQELQHNTSNCPLNAIREKYGQQKFECVANLRSPELLRSLFS

SEQ ID NO: 8081 - protein, 180 aa, Zea mays
PTAKMVNLRTQKRLASAVAGCGKRKIWLDPNEVNEISNANSRATVRKLISDGLIIRKPVTMHSRSRARELTAARRIGRHRGTGKRKGTADARMPSQVMWMRRLRVLRRLLVKYRAAGKIDKHLYHELYHLSKGNTFKHKRALVEHIHKGKAEAARESKLKEEMDGKRAKTKAARERRQER

SEQ ID NO: 8082 - protein, 157 aa, Gossypium raimondii
NKGSWTAEEDRRLAKYIEIHGAKRWKTIAIKSGLNRCGKSCRLRWLNYLRPNIKRGNISDEEEDLIIRLHKLLGNRWSLIAGRLPGRTDNEIKNYWNSHLSKKMINHDVRTEQTSSLEQIVPYKAWETVQMEEEEVVKGSDEIENSEFSIDVDEFFD

SEQ ID NO: 8083 - protein, 315 aa, Methanosarcina acetivorans C2A
MKKNSQNSVGSDGKSMSESSGNQDAQTGKEVAATKKWLSVKEAEALGYYDFMSYLGVPYYHTGGLVSTGKLAELCRIDSNKKVLMVGCGTGFSACYLARKIGCEVVGIDIAEVSIEEAKERARRQRVSDKAKFRVGDAYALPFEAGTFDAVVTESVSQFLDRKKAFKEFSRVLKPGGYIGINEMYKEEKIPPKTAEEIAHAEEVFREITGLPFSLPTPEEWKKGLEEVGLKEINVRKFRPSPSLGEIKTFIEGMEGIWNFTFHFAELMLKIGKYSLFSRKIRYRFKRLGEGKKILLRKKSTSKYAGYVLATGIKE

SEQ ID NO: 8084 - protein, 304 aa, Streptococcus agalactiae 2603V/R
MLQNIGQTGIQATRIALGCMRMSDLKGKQAEEVVGTALDLGINFFDHADIYGGGLSELRFRDAIKHLNVNRDKMIIQSKCGIREGYFDFSKEYILSSVDGILERLGTEYLDFLILHRPDVLVEPEEVAEAFTKLRAEGKVKHFGVSNQNRFQMELLQSYLDEPLAVNQLQLSPAHTPMFDAGLNVNMLNKASIEHDDGIVDYCRLKRVTIQAWSPFQIDLSRGLFVNHPDYKELNETIAKLAKNYNVSSEAIVIAWILRHPAKMQAIVGSMNPSRLKAIDKANDIALTRKEWYDIYRSAGNILP

SEQ ID NO: 8085 - protein, 151 aa, Photobacterium leiognathi
QDLTVKMTDLQTGKPVGTIELSQNKYGVVFIPELADLTPGMHGFHIHQNGSCASSEKDGKVVLGGAAGGHYDPEHTNKHGFPWTDDNHKGDLPALFVSANGLATNPVLAPRLTLKELKGHAIMIHAGGDNHSDMPKALGGGGARVACGVIQ

SEQ ID NO: 8086 - protein, 217 aa, Chelidonium majus
  unsure (1)..(217): unsure at all Xaa locations
VKKAHEISVLCDAEVGLIVFSTKGKLFEFSSESSMDNILERYERQCFVEEELKATHPESEGNWSLEHTKLKARIEILQKNQRHFMGEDLDPLSLKELQNLEHQLDIALKHVRSRKNQLLYASIAELRKKEKALHEQNILLGKKIKQKEEQIAQWSAQQNDAQNSSSFLTQAPQNSQSFLTQALPSLTLRTGYYQTARVVVCEEDGARSNMXMPPWML

SEQ ID NO: 8087 - protein, 203 aa, Glycine max
MDYFFFTTLGICLHASRPMIERRLRPPHDQALKCPRCDSTHTKFCYYNNYSLSQPRYFCKTCRRYWTKGGTLRNIPVGGGCRKNKKVSAKKSNDHQLVNNNNINQKRPPHHHHPKDLQLSSFPDVQFSHLSNLLGTNANPSFMEGKYGIGMIENPRPIDFMMESKLEGIIGSGSSSRNFDFFGNNDMSMGMASVGLGDMNGAT

SEQ ID NO: 8088 - protein, 365 aa, Bacillus subtilis
MKKRIALLPGDGIGPEVLESATDVLKSVAERFNHEFEFEYGLIGGAAIDEHHNPLPEETVAACKNADAILLGAVGGPKWDQNLSELRPEKGLLSIRKQLDLFANLRPVKVFESLSDRSPLKKEYIDNVDFVIVRELTGGLYFGQPSKRYVNTEGEQEAVDTLFYKRTEIERVIREGFKMAATRKGKVTSVDKANVLESSRLWREVAEDVAQEFPDVKLEHMLVDNAAMQLIYAPNQFDVVVTENMFGDILSDEASMLTGSLGMLPSASLSSSGLHLFEPVHGSAPDIAGKGMANPFAAILSAAMLLRTSFGLEEEAKAVEDAVNKVLASGKRTRDLARSEEFSSTQAITEEVKAAIMSENTISNV

SEQ ID NO: 8089 - protein, 79 aa, Glycine max
EKLLVKQENENQLFLTFINGTVSVWSFCGELVTQFEDHQLWHPDCYTNNTYITKDQDLIISYCKADSDDQWMEGNGNHL

SEQ ID NO: 8090 - protein, 330 aa, Oryza sativa
  unsure (1)..(330): unsure at all Xaa locations
MDAAAVAASLVPSWSAVLVLFSYLGYLAAAGAVLPGKLVPGAVLPDSSRLHYRCNGLLSLLLLLVLSALGVYMGWMSPTVIADRGIELLSTTFIFSVIVTFLLYYSGLRSHHKSSSLKPHITGNFIQDWWLGVQLNPHFMGVDLKFFFVRAGMMAWLFINLSLFAKSYLAGSANLSVILYQFFXCAWYIVDYFVHEEFMTSTWVFFAGXRWGPCLVFGDLVVIPFNLNIXGWGLMKKKVELSLFGCGSKRLMFHMDYLVVRXDPQQNIIXENPXAFIWVNSHIVGGTFCLAMGNSGLAXIWNSQLLLTTWERVARSSPIPLFXXAARLLX

SEQ ID NO: 8091 - protein, 222 aa, Oryza sativa
  unsure (1)..(222): unsure at all Xaa locations
TASLSPEKRLASPPTASVLRCRSGKXVWLNPSPLXARPLSRCTRSSAGRALMRHGFXXRRSVFLGADLRSLVWYRAKQKGCHSGYGNHRGSREGGXPTKILWMRRMXXSVLRRLLHRCREAKKIDKHTMXLYHDMXMKVKGNMLNNKRGXLMESIHKXQAEKARKRTLSDQFEAKLAKSMASQERKISRRXERLAQGPVTCTSCCSSSICTLKLLFSLSRLL

SEQ ID NO: 8092 - protein, 346 aa, Zea mays
  unsure (1)..(346): unsure at all Xaa locations
RRCRTNTTPRTIFRPLGNTGLRVSLLSYGGWLTTGGTVKGDPVVEIIKTALDHGVNFFDNAEVYSNGESEREMGRAFKELDVDRSQIVVTTKIFFGTGKSDPNQRGSSRKHIIEGLKASLERLQMDYVDVMFLHRPDYGTPVEETIRAVNTLIQQNKIFYWATSEWSAAQVAEANGICDKLGLIRPIAEQCQYNMLHRERFEVEYDILFKNYGYGTTVWSPLAGGMLTGKYNDGIPEDSRFKTSSMYADTVKELETEKGKAKIAKMRKLGDVAKRLGASNXAALALAWCAKNPNVSTVILGATKPEQLVQNFEALDLLPKLTDDVIQEIEEILDNKPTPLPTYGRA

SEQ ID NO: 8093 - protein, 352 aa, Triticum aestivum
MRHARPGGDGPRRLPLPLAPGLLARPAGTGGLGHHSLLATRIAPLGLLQACQRRIPAACSTWAAFLASSCTFAGASSGQCLLLFFGHGILCGFRWPRGLRRLSTRPGGPPDVRITGIDLPQPGFRPRERIEETGRRLKKYANEFNVPFEYRAIATAKMESLRKEDLKIDPDEVLIVNSLFQFKNLMDESVVLESPRDVVLKNIRKMRPHTFIHAIVNGSFSAPFFVTRFREVLFYYSALFDVLDTTTPRDNEQRMLIEQNILGRAALNVIACEGTDRVERPETYKQWQVRNQRAGLKLLPLNPEVIELARDKVKNCYHKDFVIDIDQHWLLQGWKGRILYAISTWTANDASS

SEQ ID NO: 8094 - protein, 209 aa, Zea mays
  unsure (1)..(209): unsure at all Xaa locations
MVSLKPQKRLAAGVLKCGKGKVWLDPNEVYEISMANSRQNIRKLVKDGFIIKKPQKIHSRSRARRAHEAKQKGRHSGYGKRRGTREARLPTKILWMRRMRVLRRLLRKYREAKKIDKHMYHDMYMKVKGNMFKNKRVLMESIHKSKAEKAREKTLSDQFEAKRAKSKASRERKIARREERLAQGPXREPAAAPVSATAPAAAAPKKAKK

SEQ ID NO: 8095 - protein, 464 aa, Pseudomonas aeruginosa PAO1
MASERNNGILIGGKRPEYVHSAQGTGLRRILGLPALVFFGLVYMVPLTMFTTYGVVTEITGGRTASAYLITLAAMLFTAFSYSFMVKKYPIAGSAYSYTSLSFGPCVGFLAGWSLLLDYLFLPMINYLLIGLFLNIAFPMVPAWVFVLAAIGLVTVLNVIGISSVAGMSNVIVGAQFVFAVVFVAMAVKHLAGIPSLDLSLPFVGDGSQPGFAPLMAGAAVLCLSFLGFDAVSTLAEETRDPQRDIPRAIVITTVGAGLLFTVLAVFSQLVFPGSVFQDAESAANEVMLAAGGKFLASFFTAAYVAGAAGSALASQASVSRILYSMGRDGILPRRVFGSLSERFKTPVIAILVVSVISLLAVVIDLTTLASMISFGALVAFSAVNLAVIRSYLLLDGRRAPRDLLRYGLVPAIGLGLTLWLWTSLSALTLVIGLTWFAAGLAYLALHTGGFRRKAPTVTFSEQN

SEQ ID NO: 8096 - protein, 106 aa, Oryza sativa (japonica cultivar-group)
MDTSGPAAFVNGEILKMFVGRRVRTVVQAQREEGGLLIGQSTDGHQLTIKGASGAPMSHYVEIIGIAEPNQAIRAEVCTDFGENFDPAPFNGLCKLANGQMKDLFL

SEQ ID NO: 8097 - protein, 427 aa, Oryza sativa; identical to SEQ ID NO: 887

SEQ ID NO: 8098 - protein, 387 aa, Gaeumannomyces graminis var. avenae
MLRSSAFALLAWASLSEAQFGIKHTQYGTSEPVYPSPEISGSGGWEAGLAKAKDFVAQLTPEEKANMVTGTPGPCVGNIAPVPRLNFTGLCLQDGPATLRQATYVTVFPGGVSAASSWDKDLIYKHGVLMAEEFRDKGSHVILGPVIGPRGRSPYAGRNWEGFSPTSYLAGVMAEQTVKGMQSVGVQACTKHFIGNEQEEQRNPTAVDGKTVEAISSNIDDRTMHEAYLWPFYNAVRAGTASIMCSYQRINGSYGCQNSKTLNGLLKTELGFQGFVVSDWAATHSGVASIEAGLDMNMPGSLDFFAPTFESYFGKNITTAVNNGTLSSRRVDEMIERIMTPYFALGQDKNYPPVDGSTVSVGFSRPGFWNHEFPLGPMVDVRRNHHE

SEQ ID NO: 8099 - protein, 860 aa, Aspergillus aculeatus
MKLSWLEAAALTAASVVSADELAFSPPFYPSPWANGQGEWAEAYQRAVAIVSQMTLDEKVNLTTGTGWELEKCVGQTGGVPRLNIGGMCLQDSPLGIRDSDYNSAFPAGVNVAATWDKNLAYLRGQAMGQEFSDKGIDVQLGPAAGPLGRSPDGGRNWEGFSPDPALTGVLFAETIKGIQDAGVVATAKHYILNEQEHFRQVAEAAGYGFNISDTISSNVDDKTIHEMYLWPFADAVRAGVGAIMCSYNQINNSYGCQNSYTLNKLLKAELGFQGFVMSDWGAHHSGVGSALAGLDMSMPGDITFDSATSFWGTNLTIAVLNGTVPQWRVDDMAVRIMAAYYKVGRDRLYQPPNFSSWTRDEYGFKYFYPQEGPYEKVNHFVNVQRNHSEVIRKLGADSTVLLKNNNALPLTGKERKVAILGEDAGSNSYGANGCSDRGCDNGTLAMAWGSGTAEFPYLVTPEQAIQAEVLKHKGSVYAITDNWALSQVETLAKQASVSLVFVNSDAGEGYISVDGNEGDRNNLTLWKNGDNLIKAAANNCNNTIVVIHSVGPVLVDEWYDHPNVTAILWAGLPGQESGNSLADVLYGRVNPGAKSPFTWGKTREAYGDYLVRELNNGNGAPQDDFSEGVFIDYRGFDKRNETPIYEFGHGLSYTTFNYSGLHIQVLNASSNAQVATETGAAPTFGQVGNASDYVYPEGLTRISKFIYPWLNSTDLKASSGDPYYGVDTAEHVPEGATDGSPQPVLPAGGGSGGNPRLYDELIRVSVTVKNTGRVAGDAVPQLYVSLGGPNEPKVVLRKFDRLTLKPSEETVWTTTLTRRDLSNWDVAAQDWVITSYPKKVHVGSSSRQLPLHAALPKVQ

SEQ ID NO: 8100 - protein, 258 aa, Glycine max
  unsure (1)..(258): unsure at all Xaa locations
MASQNPNQRNSLYPQVIDSNPDAPPPLLNPNRSSSSQPSLYPSVDYNDLVQNLFPEDATAAGSPSAPLEATEEALLRIPGAILNLIDKDYSVELACGDFSVIRLRQGDNAVAVYARVADEIQWPLAKDATTVKVDDSHYFFSFRVPKGSDPGEEEEDMLSYGLTIASKGQEGLLKELDVVLENCSCFSVQSVSENVKKKGEALDGSVAREVSPKDLESGKKKEMMEGXAPAYWTTLAPNVEDYSGKTAKMIAAGSGHV

SEQ ID NO: 8101 - protein, 174 aa, Paeonia peregrina
  unsure (1)..(174): unsure at all Xaa locations
DLLRINTDRGVMLNDGKSRFSINGQPIFHFVGTSTFSEYTVLHVGCLAKINEEAPLDKVCVLSCGISTGLGATLNVXKPKKGSTVAIFGLGAVGLAAAEGARIAGASRIIGVDLNPKRFDEARKFGVTEFVNPKDYNKPVQEVIAEMTGGGVDRSVECTGSIMAMMSAFECVHD

SEQ ID NO: 8102 - protein, 196 aa, Triticum aestivum
HASDENEGYVDGILRGYYSGILNSSQYLNFTQCETLEDLRLQLGATDYGSLLQNEPSPIATSTITEKLTQSLVDEFQYIRSNAVQPLSKFLDYITYQYMIDNVILIITGTLHERDTHELLERCHPLGVFDTMPALCVATTVAELYNTVLVETPLAPYFANCLSAHDLDELNIEIIRNTLYKAYLEDFYQFCQSIGG

SEQ ID NO: 8103 - protein, 666 aa, Leuconostoc mesenteroides subsp. mesenteroides ATCC 8293
MSTEFNLSFVQGLTVREKAELVTGKDFWFTAENIENDIPKIMVTDGPSGLRKQASSADALGLNQSVEAIAFPSSALMASSFNVDMLYQLGQNLGTASRAENVSVLLGPGINIKRSPLAGRNFEYFSEDPYLTGELGSAYVKGVQSQGVGVSVKHFAANNREDQRFTSSSNVDERALREIYLLAFEKIVKEAHPATLMCSYNAINGVLNSQNYRLLTEILRNEWGYTGVVMSDWGAVADNIASLKAGLDLEMPGNGAYSIDRIVSAVQNGQLEESKLDISVLRVLALVEKFRVSEDDSTDYDKNNQHEFARKAAEDSIALLKNDDDVLPIKQTEKIALIGELAQNPRYQGGGSSHVNAYKVVTPHEVASNSDYNVTYTAGYSLSEEKGNLDLEQQAESIAELSDKIIFFAGVPEQDESEGFDKKTIDLPENQVNLIQKLSAINPNIIVVLQNGSAVATPWRNKVKAIVETYLAGEAVGEATWNILTGQTNPSGKLAETFPEKIEDTPAYGTFNASVDEENYHEGIFVGYRHYDLKRKEVAFPFGHGLSYTDFKYDDLEIVANTKKHVTGKIKITNVGSIYGKETAQIYIQNLESRVEKPRQELKAFVKVGLNPGESKTVEFFLDRRSFAWYNVKKSIWQVDQGDYNLKIGSSSRDIRLEKTVSLEMG

SEQ ID NO: 8104 - protein, 517 aa, Oryza sativa
  unsure (1)..(517): unsure at all Xaa locations
LLLLLLLPIASLLLVIGRNTGGRRRRRXXLRLPPGPARLPVLGNLLQLGALPHRSLRDLARRHGPVMMLRLGAVPAVVVSSPEAAQEVLRTHDADCCSRPSSPGPMRLSYGYKDVAFAPYDAYGRAARRLFVAELFSAPRVQAAWRARQDQVEKLIGKLTRPEPEXXVELNDHIFALTDGIIGAVAFGSIYGTERFAGGERFHHLLDDVMDMLASFSAEDFFPNAAAARLFDHLTGLVAHRERVFQQLDAFFEMVIEQHLDSDSSNAGGGGDLVGALIGLWKQGNGDRRFTRENVKAIIFDAFIGGIGTSSVTILWAMAELMRSPRVMRKVQAEIRATVGDRDGGGMVQPDDLPRLAYLKMVVKETLRLHPPATLLMPRETMRDVRIGGYEVAARTRVMVNAWAIGRDAARWEEAEVFDPDRFEAKRVEFNGGHFELLPFGSGRRICPGIAMGAAXNVEFTLANLLHCFDWALPVGMAPEELSMEESGGLVLHRKAPLVLVPTRYNNYRSTNEMEFS

SEQ ID NO: 8105 - protein, 611 aa, Oryza sativa
  unsure (1)..(611): unsure at all Xaa locations
MGLASDSPASFPFSAAKLAASPRFYPISRRCGRIRRMVAESKDXXDLSKLELVNVPGGALAFELAAKFCYGSNFEINTVNVAHLRCIAEYLEMTEEYQEENLIVRTETYLNEIVVKNLDKSLEVLCACDGLDPTVEDVGLVDMCVDAIAMNASKEQLVSGLAHLECDVGSGKLRMHCQDWWVEDLSALRIDYYQRVIVAMRRTGVRPESIGTSIVHYAQTALKGIXXRRHVWDSGPLVGDNQRVIVETLIDLLATEKITSVTLSFLFGMLRMAIEVDAGLDYRIEVEKRIGLQLEMASLDDLLIPATQTSDSMFDVDTVHRILVNFLQRIEEDDSGNLSPCGYESDDGLKSPSHSSVLKVGRLMDGYLAEIAPDPYLKLQKFMALIELLPDYARIVDDGLYRAIDIYLKAHPSLTESECKKMCKLIDCQKLSQDASSHAAQNDRLPIQTVVRVLYFEQLRLKSTVSSTTPHTTSLGGDGCGGSLSQRMMMTRDNYACLRRENRELKLEIARMRVRLTELEREQGVMRQGMRDGRGGGEHGRALLASISRGIGRIAMLGVGAQGGAERRRKTKTKKSSHSQSQWSSDGGGKTMMMSSRRRHKASSVTYAAAS

SEQ ID NO: 8106 - protein, 305 aa, Miscanthus transmorrisonensis
IESVGEGVTDVAPGDHVLPVFTGECKECPHCKSAESNMCDLLRINTDRGVMIGDGKSRFSINGKPIYHFVGTSTFSEYTVMHVGCVAKINPQAPLDKVCVLSCGISTGLGASINVAKPPKGSTVAIFGLGAVGLAAAEGARIAGASRIIGVDLNPSRFEEARKFGCTEFVNPKDHKKPVQEVLAEMTNGGVDRSVECTGNINAMIQAFECVHDGWGVAVLVGVPHKDAEFKTHPMNFLNERTLKGTFFGNFKPRTDLPNVMELYMKKELEVEKFITHSVPFAEINKAFDLMAKGEGIRCIIRMEN

SEQ ID NO: 8107 - protein, 225 aa, Triticum aestivum
  unsure (1)..(225): unsure at all Xaa locations
MDAAGESAVTCVDFWANGFGMRARIALRELGVAFEYVEEDLRVGVRSDLVRRMNPVHRSVPILIHRGRPVCGSLNILEYIDEVWSAPGETRRLLPGDPAGRADARFWADFIDHKVFPTQTRFLKSKGEEKKAAKEELLEQLKRLEEVLGDKVFFSGEEFGFLDIVLIPFSSMFRGYEQHGXLTLEVECPNLMRWVKRCKERESVGAVLPDETKMYQLHKEWYGIE

SEQ ID NO: 8108 - protein, 358 aa, Canotia holacantha
ESQKLAVRAISHLQSLPGGDIKLLCATVVESVRDLTGYDRVMVYKFHEDEHGEVVAESKRPDLEPYIGLHYPATDIPQASRFLFKQNRVRMIVDCCASPVGVIQDDGLMQPLCLVGSTLRAPHGCHAQYMENMGSKASLAMAVIINGKDEEIVGGRNATRLWGLVVCHHTSARCIPFPLRYACEFLMQAFGLQLNMELQLAAQLSERHVLKTQTLLCDMLLRDSPTGIVTQSPSIMDLVKCDGAALYYQGKYYPSGVTPSEAQIKDIVEWLLAFHGDSTGLSTDSLADAGYPGAAFLGDAVCGMAVAYITNRDFLFWFRSHTTKEIKWGGAKHHPEDKDDGQRMHPRSSFKAFLEVVK

SEQ ID NO: 8109 - protein, 272 aa, Gossypium barbadense
LSVEEIEVAPPQKNEVRVKIHFTSLCHTDVYFWEAKGQNPLFPRILGHEAGGVVESVGEGVTDVEPGDHVLPIFTGECKECPHCLSEASNMCDLLRINTERGGMLHDGQTRFSKDGKPIYHFLGTSTFSEYTVVHVGQVAKINPEAPLDKVCVLSCGMTYSSSLLAGFGATVNVAKPKKGGSVAVFGLGAVGLAAAEGARVCEASRIIGIDLNPNRFEEAKKFGCTEFVNPKDHNKPVQEVISEMTGGGVDCSIECTGSTQAMVSAFECVHD

SEQ ID NO: 8110 - protein, 379 aa, Arabis gemmifera
MSTTGQIIRCKAAVAWEAGKPLVMEEVEVAPPQKHEVRIKILFTSLCHTDVYFWEAKGQTPLFPRIFGHEAGGIVESVGEGVTDLQPGDHVLPIFTGECGDCPHCHSEESNMCDLLRINTERGGMIHDGESRFSINGKPIHHFLGTSTFSEYTVVHSGQVAKINPDAPLDKVCIVSCGLSTGLGATLNVAKPKKGQSVAIFGLGAVGLAAAEGARIAGASRIIGVDLNSQRFDQAKEFGVTEFVNPRDHDKPVQQVIAEMTNGGVDRSVECTGSVQAMIQAFECVHDGWGVAVLVGVPSKDDAFKTHPMNFLNERTLKGTFSGNYKPKTDMPGVVEKYMNKELELEKFITHTVPFSEINKAFDYMLKGESIRCIITMGA

SEQ ID NO: 8111 - protein, 134 aa, Zea mays
  unsure (1)..(134): unsure at all Xaa locations
TLPRPLGTRKRFLFLNRRAITXTGVLNAWAGYFGNKGIKVVFSNGQLALVPMKLGGMAKSVPFVATPKGRGRGLFPRPVRAGIVGFPNVGKFSLINRLLKRKMCPAEPXRPGLTGKLKWFRFGTDLKLLDSPGI

SEQ ID NO: 8112 - protein, 80 aa, Zea mays; identical to SEQ ID NO: 2575

SEQ ID NO: 8113 - protein, 278 aa, Triticum aestivum; identical to SEQ ID NO: 4275

SEQ ID NO: 8114 - protein, 245 aa, Brucella suis 1330
MKFEFENRTLVLTGANGGIGRAIAELFHASGANLVLTDLDREGLDAFAASLGSPERIATIKADASSADDAEKTVALAMERFGGIDFLVPSAGIYQAKPFAEMSDADWYRTISINLDGVFYLCKRALPALKEDSSIVTLASLAAYRGAYVNAHYGATKGAMVSMTRALSRELAPKTRVNGVAPGIIETPMTSELLKTRMDETMTQTPLKRLGKPSEIASVIAFLCSPAASFVTGETIQVNGGIYMA

SEQ ID NO: 8115 - protein, 189 aa, Desulfitobacterium hafniense
ALAEGQVLVRHHYLSLDPYMRGRMNDSKSYAQPQPLGEVMIGGTVGEVVESRHPKFAVGDKVVGMGGWQEYSVVDGDAPGMLRKVDTTHVPLSHYLGAVGMPGVTAWYGLVKIIAPKAGETVVVSAATGAVGSAFAALAKARGCRVVGIAGGPEKCRYATEELGFDACIDYREHPDTKTMAKALKDACP

SEQ ID NO: 8116 - protein, 434 aa, Zea mays
  unsure (1)..(434): unsure at all Xaa locations
MAETVHSPIVTYASMLSLLAFCPPFVILLWYTMVHQDGSVTQTFGFFWXENGVQGLINIWPRPTLIAWKIIFCYGAFEAILQLLLPGXRGEGPISPAGNRPVYKAMGLGGXTFVTLATYLGLWWFGIFNPAIVYDHLGEIFSALIFGSFIFCVLLYIKGHVAPSSSDSGSCGNLIIDFYWGMELYPRIGKSFDIKVFTNCRFGMMSWAVLAVTYCIKQYEINGKVSDSMLVNTILMLVYVTKFFWWEAGYWNTMDIAHDRAGFYICWGCLVWVPSVYTSPGMYLVNHPVELGTQLAIYILVAGILCIYINYDCDRQRQEFRRTNGKCLVWGRAPSKIVASYTTTSGETKTSLLLTSGWWGLARHFHYVPEILSAFFWTVPALFDNFLAYFYVIFLTLLLFDRAKRDDDRCRSKYGKYWKLYCEKVKYRIIPGIY

SEQ ID NO: 8117 - protein, 366 aa, Zea mays
MRWRLQPAPAPALLLVLATIAAVVVVRAEPQVPCYFVFGDSLVDNGNNNDIASLARANYPPYGIDFAAGPTGRFSNGLTTVDAISRLLGFDDYIPAYAGASGDQLLTGVNFASAAAGIRDETGQQLGQRISFGGQLQNYQAAVQQLVSILGDEDSAASHLSQCIFTVGMGSNDYLNNYFMPAVYSTSQQYTPEQYADVLINQYSQQLRTLYSYGARKVALMGVGQVGCSPNELAQRSTDGTTCVPQINGAIDIFNRKLVALVDQFNALPGAHFTYINVYGIFQDILRAPGSHGLTVTNQGCCGVGRNNGQVTCLPFQTPCANRNEYLFWDAFHPTEAANILVGRRAYSAALPSDVHPMDLRTLARI

SEQ ID NO: 8118 - protein, 459 aa, Neurospora crassa
MSSTSSSRVDLRDHVQDQDLSEEYLSSSSRDYSAGSSPLTTPALSDEEFDFDVPSEDALFAPTQAPADGSEKYIMVIGGLGYIGSHTTLELLREGHNVIVVDNLSNSYKTVLKNVRMLAAHHCKVNNTPMPRLRFFRIDYRSKAMHVLLERYSNLVMTVDATSGKQVVSYQSRIAGVIHFAAYKSVVESIQQPLRYYRNNVCGLVNLLQELERFNIRNFIFSSSATVYGSKANAGLPLKEEDLIHHQVKTQNEAGETTIVEPTIEGLSCPYARTKYFGEAILADVAEADPDWRIVALRYFNPVGCDPSGVLGESPRGEPTNLFPVLTQVLKGDRSNLNVFGSDWPTRDGTAIRDFIHVLDVARGHIAALNWNSKKGNGFSTFNLGSGTGTTVLEAVRSLEQAAGREIPLALVDRRPGDVGMCVASTERAAKELGWSTRESITKCAADLWNYVSKVALRS

SEQ ID NO: 8119 - protein, 355 aa, Staphylococcus aureus subsp. aureus Mu50
MWNKNRLTQMLSIEYPIIQAGMAGSTTPKLVASVSNSGGLGTIGAGYFNTQQLEDEIDYVRQLTSNSFGVNVFVPSQQSYTSSQIENMNAWLKPYRRALHLEEPVVKIIEEQQFKCHIDTIIKKQVPVCCFTFGIQNESIIERLKEANIKLIGTATSVDEAIANEKAGMDAIVAQGSEAGGHRGSFLKPKNQLPMVGTISLVPQIVDVVSIPVIAAGGIMDGRGVLASIVLGAEGVQMGTAFLTSQDSNASELLRDAIINSKETDTVVTKAFSGKLARGINNRFIEEMSQYEGDIPDYPIQNELTSSIRKAAANIGDKELTHMWSGQSPRLATTHPANTIMSNIINQINQIMQYK

SEQ ID NO: 8120 - protein, 447 aa, Zea mays
  unsure (1)..(447): unsure at all Xaa locations
MSNYYDDYDDIDGMEDDYDMDDPIDDMVDEQQGIRDSDVEDNDYGQPNDKIPDTSSADARKGRDIQGIPWEQINITRKKYRQSRLEQYKNYENVPNSGEEAMKDCKPTEKGGIYYEFRRNTRSVKSTILHFQLRNLVWATSKHDIYLVSXYSIRHWSALRGVDTXVAPSEKHSGSLSEGSIYXYKISTLAVKXDLLTAWAGLHGAVMCKNLAGECYFILXEINFCCRSTYDYNAITNXVGVFNSSRGAVHFMASINYSGVRYYDMERFQLFKHFQFEWPVNHASLSPDRKVVVIVGDDPDGLLIDANSGKTVHSIKGHRDYSFASAWSPDGRTFATGNQDKTCRIWDVRNLSKSVHVLRGNLGAIRSIRFTSDGQFMSMAEPADFVHIYDVKSDYNKRQELDFFGEISGTSFSPDTDTLFVGVWDRMYGSLLQFGRLYNYSYLDSLF

SEQ ID NO: 8121 - protein, 238 aa, Ralstonia solanacearum
MRALVTGGSGAIGQAVSEALARAGHEVWVHANRNLEQAEAVAQRIVAAGGTAHAIAFDVTDAQATEAALAPVLDGAPVQILVNNAGVHDDAPMAGMTQQQWRRVIDVSLNGFFNVTQPLLMPMIRTRWGRIINMASVAGVMGNRGQANYAAAKAGLIGATKSLAQELASRGITVNAVAPGIIASPMAGEAFPAERIKQLVPAGRAGQPDEVAGMVAYLASDAAAYVTGQVLSINGGLA

SEQ ID NO: 8122 - protein, 173 aa, Oryza sativa
MAAPDVDYRCFVGGLAWATDNRSLEAAFSTYGEILESKIINDRETGRSRGFGFVTFSSEQAMRDAIEGMNGKELDGRNITVNEAQSRRSGGGGGGGYGQRGGGGGYGGGGYGGGGGGGGYGQRREGGYGGGGGYGGGRGGGGFGGGFGGGYGGGYGGGYGSRGGGNSDGNWRN

SEQ ID NO: 8123 - protein, 152 aa, Oryza sativa
  unsure (1)..(152): unsure at all Xaa locations
VHFGRFLKKNGFGGGSEAEMLPMQMQGTCTTVAPEVRLDKQLQAWKNNPIWSDEPPEIKVTVPQGSLCNLNLKFKAGLPPDAVYNIIIDPENKRVFKNIKEVISRKVVLDEGQRQIVEVEQAAIWRFLWWSGVLSVHVFVDQNRTNHTVKTX

SEQ ID NO: 8124 - protein, 461 aa, Escherichia coli K12
MADNKPELQRGLEARHIELIALGGTIGVGLFMGAASTLKWAGPSVLLAYIIAGLFVFFIMRSMGEMLSLEPVTGSFAVYAHRYMSPFFGYLTAWSYWFMWMAVGISEITAIGVYVQFWFPEMAQWIPALIAVALVALANLAAVRLYGEIEFWFAMIKVTTIIVMIVIGLGVIFFGFGNGGQSIGFSNLTEHGGFFAGGWKGFLTALCIVVASYQGVELIGITAGEAKNPQVTLRSAVGKVLWRILIFYVGAIFVIVTIFPWNEIGSNGSPFVLTFAKIGITAAAGIINFVVLTAALSGCNSGMYSCGRMLYALAKNRQLPAAMAKVSRHGVPVAGVAVSIAILLIAHAWNYIIPNPQRVFVYVYSASVLPGMVPWFVILISQLRFRRAHKAAIASHPFRSILFPWANYVTMAFLICVLIGMYFNEDTRMSLFVGIIFMLAVTAIYKVFGLNRHGKAHKLEE

SEQ ID NO: 8125 - protein, 439 aa, Escherichia coli K12
MSQAKSNKMGVVQLTILTMVNMMGSGIIMLPTKLAEVGTISIISWLVTAVGSMALAWAFAKCGMFSRKSGGMGGYAEYAFGKSGNFMANYTYGVSLLIANVAIAISAVGYGTELLGASLSPVQIGLATIGVLWICTVANFGGARITGQISSITVWGVIIPVVGLCIIGWFWFSPTLYVDSWNPHHAPFFSAVGSSIAMTLWAFLGLESACANTDVVENPERNVPIAVLGGTLGAAVIYIVSTNVIAGIVPNMELANSTAPFGLAFAQMFTPEVGKVIMALMVMSCCGSLLGWQFTIAQVFKSSSDEGYFPKIFSRVTKVDAPVQGMLTIVIIQSGLALMTISPSLNSQFNVLVNLAVVTNIIPYILSMAALVIIQKVANVPPSKAKVANFVAFVGAMYSFYALYSSGEEAMLYGSIVTFLGWTLYGLVSPRFELKNKHG

SEQ ID NO: 8126 - protein, 380 aa, Saccharomyces cerevisiae
MNCIPSPISERKIQINNEDCIGKENAFHTIPRESSINLTPHSTNEKKVLSEVNSNKIDSLQLPRGKLQRDSTHLEKSRKRQLSNDSTDPIESKTVKKIKCHQWKNLDSMEMDDPFMVAEYTDSIFSHLYEKEIQMLPTHNYLMDTQSPYHLKSSMRALLIDWLVEVHEKFHCLPETLFLAINLLDRFLSQNVVKLNKLQLLCITCLFIACKFEEVKLPKITNFAYVTDGAATVEGIRKAELFVLSSLGYNISLPNPLNFIRRISKADNYCIETRNMAKFIMEYSICCNKFIHLKPSYLAAMSMYIARKIKNENSKWDETFIHYSGGIDIESDPAFKDFISELVEDIAVPDTNLDSLRLKYKKPKHGMVYFKVFDWCKQKR

SEQ ID NO: 8127 - protein, 628 aa, Petunia x hybrida
MAMGCKDHNGVPDNLREQLAFAVRGIQWSYAILWSTTVSQPGELEWSDSNYNGDIKTRKTVQAGEVDEDQLGLQRTEQLRDLYSSLLIGEGEEDLQPQAKRPSAALSPEDLTDTVWYFLVCMSFVFNVGQGLPGKSLARHETIWLCNAHQAESSVFSRSLIAKSASIQTVVCFPYLGGVIELGVTELVVEDPNLIQQIKISILKVDHSIIPKRPNYVSSDAKNDAIGLCPKPDHNVLENDAYTVEINNSSPHDSSNGFGANQEVEVSLMVVGVIGETSQAQSWKFTDDNMSNGVHNSLNSSDCTSQNYANCEKLSPLSSGEKETKPAPLDHQEHNQRKLHLLDHQGDETQYQSVLSTLLKSSDQLTLGPYFRNTNKRSCFSGWKNDAHIPSRGTAQKLLKKVLVEVPRMHGSVIHKFSRENRKRNGLWRPEVDDTDRSRVISERRRREKINERFMLLASMLPAGGKVDKISLLDETIEYLKELERRVQDLEAKSGRRPNDVAEQTSDNCGTSKFNAIEESLPNKRKACEIVDLEPESRNGLLKGSSTDSIVINMIDKEVSIKMRCLSSEGLLFKIMEALTGLQMDCHTVQSSNIDGILSISIESKTNVSKTVSVGTIREALQRVVWKS

SEQ ID NO: 8128 - protein, 323 aa, Streptococcus pyogenes M1 GAS
MKTRITELLNIDYPIFQGGMAWVADGDLAGAVSNAGGLGIIGGGNAPKEVVKANIDRVKAITDRPFGVNIMLLSPFADDIVDLVIEEGVKVVTTGAGNPGKYMERLHQAGIIVVPVVPSVALAKRMEKLGVDAVIAEGMEAGGHIGKLTTMSLVRQVVEAVSIPVIAAGGIADGHGAAAAFMLGAEAVQIGTRFVVAKESNAHQNFKDKILAAKDIDTVISAQVVGHPVRSIKNKLTSAYAKAEKAFLIGQKTATDIEEMGAGSLRHAVIEGDVVNGSVMAGQIAGLVRKEESCETILKDIYYGAARVIQNEAKRWQSVSIEK

SEQ ID NO: 8129 - protein, 339 aa, Sinorhizobium meliloti
MRAIVLHAPGDIRLETRPKPVAGPGEVLLRVASVGVCGSDLPRMLVKGAWKMPLITGHEFSGHIHALGENVEGWEIGELTAIAPLMPCNQCIECKTGNFSRCRDYDYFGSRRDGAYAEFVAVPVENLIKTPQHVDPRAIAMTDPASIALHAIWKAGGITAGQTGAVVGCGPIGLFAIQWMRIMGTSRVIAVDVTEEKLALARQAGADLCILSADFADNKERADLVIEAVGIDSTINAAVMLAAPGGHVTFIGIPVPDVKLSNATFQRFLRQEVSLHGSWNSFGAPFPGPQWTTTVQKFATGELKWEFMISHDLDLAELPGIFQRFAAKDLHFSKVLFRP

SEQ ID NO: 8130 - protein, 326 aa, Glycine max
MGGWAIAVHGGAGVDPNLPLERQEEAKQLLTHCLNLGISALNSNLPAIDVVELVVRELETDPLFNSGRGSALTEKGTVEMEASIMDGPKRRCGAVSGLTTVKNPISLARLVMDKSPHSYLAFSGAEEFARQQGVEVVDNEYFITPDNVGMLKLAKEANTILFDYRIPTSGYETCGSNVESPLQMNGLPISVYAPETVGCVVVDREGRCAAATSTGGLMNKMTGRIGDSPLIGAGTYACDVCGVSCTGEGEAIIRGTLAREVATVMEYKGLKLQEAVDFVIKHRLEEGMAGLIAVSNAGEVAYGFNCNGMFRGCATENGFMEVGIWE

SEQ ID NO: 8131 - protein, 467 aa, Rhizobium sp. NGR234
MTIDIKDISEKDRNTVLHPFTQLKDFATGKLREPTIVETGKGIRIQDARGNQLIDGFAGLYCVNVGYGRTEVAEAISRQAYRLAYYHSYAAHTTDELAILSDRLVKMAPGKMSKVFYGMSGSDANETQAKLVWYYNNLRGKPTKKKIISRERGYHGCSVVSGSMTGMSFYHDHMDLPLPQICHTGVPHHYWGANPGETEREFSARRAAELDEMIETLGPDNVGAFIAEPVLGTGGITPPPEGYWEAIQAVLKKHDVLLIADEVITGFGRTGSMFGSQHYGIEPDLITVAKGLTSAYFPLSASIVGEKVYKVLEDGADRVGAFSHGYTYSGHPIGAAAANAVLDIVEKEDLPGNAREVGGYFQAQLKEKFAQLPIVGEVRGVGLMGAIEFVGDRENKKRFDPLLKVGARVSKAARDRGLIARAMPHGDILGFAPPLVTTKEEVDEIVAMAEKAVRSVMDELVRDGQKL

SEQ ID NO: 8132 - protein, 394 aa, Medicago truncatula
MGAEKPRSCATYFENSKPYFAMILLQFGYAGMNIITKLSLNGGMSHYVLVVYRHAFATIAIAPFAIIFEWKDQPKITFSVFMQILLLALLGPVIDQNFYYAGLKLTSPTFSCAMSNMLPAMTFVMAVLCRMEIVNLKKLRCQAKVIGTILTVAGAMLMTLYKGPVLELMWTKYIPHSNANITSSSSKDNWFLGSILLIIATLAWSSLFVLQAKAIETYKNHQLTLTSLICFFGTILAFATTLIMENKDSVWTIGWDMNLLAAAYAGIVTSSISYYIQGLVIKKKGPVFATSFSPLMMIIVAIMGFFILAEQLFLGSVIGSILVVIGLYSVLWGKHKEQVECKVSPDDIPLPIKSARINGNMGAFSASFDKHSEVKLDQKEESNISLVIINYNRS

SEQ ID NO: 8133 - protein, 501 aa, Zea mays
MDTVGVPVVAVANGIGEVERKVQKSYWEEHSKCLTVESMMLDSRAADLDKEERPEILSLLPSYKGKSVLELGAGIGRFTGDLAKEAGHVLALDFIESVIKKNQSINGHHKNITFRCADVTSNDLKIEDNSVDLIFSNWLLMYLSDEEVQKLVGKMVKWLKVGGHIFFRESCFHQSGDSKRKVNPTHYREPRFYTKVFKEGHSFDQDGGSFELSLVTCKCIGAYVKNKKNQNQICWLWEKVKSTEDRDFQRFLDNVQYKTSGILRYERVFGEGFVSTGGIETTKEFVGMLDLKPGQKVLDVGCGIGGGDFYMAANYDVHVLGIDLSVNMVSFAIERAIGRKCSVEFEVADCTTKDYPENSFDVIYSRDTILHIQDKPALFRSFFKWLKPGGKVLISDYCKNPGKPSEEFAAYIKQRGYDLHDVKAYGQMLKDAGFHNVIAEDRTEQFLNVLQREIGEVEKNKDAFLADFTQEDYDDIVNGWNAKLKRSSAGEQRWGLFIATK

SEQ ID NO: 8134 - protein, 517 aa, Zea mays
MENPAPPTNPASATPSPSRQLPDFQQSVRLKYVKLGYHYLITHGMYLLLTPLMVLVAVYLSTLSPRDVADLWAHLRLNLISVLACSTLLVFLGTAYFLTRPRPVYLVDFACYKPGPERRCTRDTFMRCSRLTGCFTDASLEFQRKILERSGLGEDTYLPPAVTRVPPNPSMDEARAEAREVMFGAVDELLAKTGVKPKDIGILVVNCSLFNPTPSLSAMVVNHYKLRGNVVSYNLGGMGCSAGLLSVDLAKDLLQTHPGSYALVISTENITLNWYSGNDRSKLVSNCLFRMGGAAVLLSNRRSDRRRAKYELVHTVRTHKGADDRCFGCVTQEEDGEGVVGVSLSRDLMAVAGDALKTNITTLGPLVLPLSEQLLFMATLVAKKLLKMKKVKPYIPDFKLAFEHFCIHAGGRAVLDELESNLALTDWHMEPSRMTLHRFGNTSSSSLWYELAYSEAKGRIRRRHRVWQIAFGSGFKCNSAVWRALRSVNPAEETNPWMDEIDRFPVDVPKVSKVSSD

SEQ ID NO: 8135 - protein, 513 aa, Saccharomyces cerevisiae
MSLSTKREHSGDVTDSSFKRQQRSNKPSSEYTCLGHLVNLIPGKEQKVEITNRNVTTIGRSRSCDVILSEPDISTFHAEFHLLQMDVDNFQRNLINVIDKSRNGTFINGNRLVKKDYILKNGDRIVFGKSCSFLFKYASSSSTDIENDDEKVSSESRSYKNDDEVFKKPQISATSSQNATTSAAIRKLNKTRPVSFFDKYLLGKELGAGHYALVKEAKNKKTGQQVAVKIFHAQQNDDQKKNKQFREETNILMRVQHPNIVNLLDSFVEPISKSQIQKYLVLEKIDDGELFERIVRKTCLRQDESKALFKQLLTGLKYLHEQNIIHRDIKPENILLNITRRENPSQVQLGPWDEDEIDIQVKIADFGLAKFTGEMQFTNTLCGTPSYVAPEVLTKKGYTSKVDLWSAGVILYVCLCGFPPFSDQLGPPSLKEQILQAKYAFYSPYWDKIDDSVLHLISNLLVLNPDERYNIDEALNHPWFNDIQQQSSVSLELQRLQITDNKIPKTYSELSCL

SEQ ID NO: 8136 - protein, 296 aa, Bacillus cereus ATCC 14579
MVIQWFPGHMAKARRQVTEKLKLIDVVIELVDARLPLSSRNPMIDEIITHKPRLVVLNKADMADDRLTKQWIAYFKEKGHMAISINAQAGQGMKEIAAACKVLVKEKFDKMVAKGIRPRAIRALIVGIPNVGKSTLINKLAKKNIAKTGDRPGVTTAQQWIKVGKEMELLDTPGILWPKFEDQLVGLRLATTGAIKDSILNLQDVAVYALRFMEKHYPERLKERYNLNEIPEDIVELFDAIGKNRGCLMGGGMIDYDKTSELVLRELRGGKLGKMTFETPEEFGEQVEDVEKIEEV

SEQ ID NO: 8137 - protein, 429 aa, Escherichia coli
MKALNREVIEYFKEHVNPGFLEYRKSVTAGGDYGAVEWQAGSLNTLVDTQGQEFIDCLGGFGIFNVGHRNPVVVSAVQNQLAKQPLHSQELLDPLRAMLAKTLAALTPGKLKYSFFCNSGTESVEAALKLAKAYQSPRGKFTFIATSGAFHGKSLGALSATAKSTFRKPFMPLLPGFRHVPFGNIEAMRTALNECKKTGDDVAAVILEPIQGEGGVILPPPGYLTAVRKLCDEFGALMILDEVQTGMGRTGKMFACEHENVQPDILCLAKALGGGVMPIGATIATEEVFSVLFDNPFLHTTTFGGNPLACAAALATINVLLEQNLPAQAEQKGDMLLDGFRQLAREYPDLVQEARGKGMLMAIEFVDNEIGYNFASEMFRQRVLVAGTLNNAKTIRIEPPLTLTIEQCELVIKAARKALAAMRVSVEEA

SEQ ID NO: 8138 - protein, 296 aa, Rhizobium sp. WSM870
  unsure (1)..(296): unsure at all Xaa locations
RGKTQIKEFDAFPTLEQLPLWGFDGSSTQQAEGRSSDCVLKPVAVYPDPVRTNGALVMCEVMMPDGKTPHPSNTRATVLDDESAWFGFEQEYFFYKNGRPLGFPEXGYPAPQGPYYTGVGYKNVGDIARQIVEEHLDICLAAGINHEGINAEVAKGQWEFQVFGKGSKKAADEVWLARYLLLRLTEKYGIDVEFHCKPLGDTDWNGSGMHANFSTAYLREVGGKDYFEALMAAFEKNLHDHINVYGPDNHLRLTGKHETAPWDKFSYGVADRGASIRVPHXFVNNGYRGYLEDRRP

SEQ ID NO: 8139 - protein, 188 aa, Chloroflexus aurantiacus
MIRRVRTYLATQWQRFFGLNISLVTPMLFVGGQFSAQQWPAIHQLGVRAVLSLQAERADPFREPLPARSLRLLVPDFHPPTIEQLDEGVHFIAQAISDGLPVFVHCHAGVGRAPLMTAAYLMAHHGIGHRAALATLRMARPIIRPNRRQLRQLQAYEQILARRRRSSQFTPPADDRGYWPPAPDTQTP

SEQ ID NO: 8140 - protein, 473 aa, Oryza sativa
MALKVVSFPGDLAAVSFLDSNRGGAFNQLKVDLPFQTRDRRAVSLRRTCCSMQQAPPPAWPGRAVVEPGRRSWDGPKPISIVGSTGSIGTQTLDIVAENPDKFRVVALAAGSNVTLLADQVKTFKPKHVAVRNESLVDELKEALADCDWKPEIIPGEQGVIEVARHPDAVTVVTGIVGCAGLKPTVAAIEAGKDIALANKETLIAGGPFVLPLAQKHKVKILPADSEHSAIFQCIQGLPEGALRRIILTASGGAFRDWPVDKLKEVKVADALKHPNWNMGKKITVDSATLFNKGLEVIEAHYLFGAEYDDIEIVIHPQSIIHSMIETQDSSVLAQLGWPDMRIPILYTMSWPDRIYCSEVTWPRLDLCKLGSLTFKAPDNVKYPSMDLAYAAGRAGGTMTGVLSAANEKAVELFIDEKIGYLDIFKVVELTCDAHRNELVTRPSLEEIIHYDLWAREYAASLQPSTGLSPVPV

SEQ ID NO: 8141 - protein, 429 aa, Zea mays
MMLEGKSYLVSRSVPSSCEPETEWEYLAHAVLSGKRPAPEDDVEVEDPDETGSGGKRSKPASPQPHTPDISEGRGSSRIASGSGEQRITGSNPMNSIGRDLTLNCLLRLSRSDYGSVASLSRDFRSMVRSGEIYRLRRQNGVAEHWVYFSCNVLEWDAYDPYRERWIQVPKMPPDECFKCSDKESLAVGTELLVFGMARIVFRYSILTNSWTRAHPMNSPRCLFGSTSVGEKAFVAGGTDSIGNILSSAEMYDSETHTWTPLPSMNRARKMCSGVFMDGKFYVIGGVANNNKLLTCGEEYDLKRRSWRIIENMSEGLNGVTGAPPLIAVVSNELYAADYSENDLKKYDKKNNRWITLGKLPERSVSMNGWGLAFRACGDCLIVIGGPRTYTGRTIELNSWTPNERPPVWNLIARRPSGNFVYNCAVMGC

SEQ ID NO: 8142 - protein, 436 aa, Helicobacter pylori 26695
MNFQENLAALDLEYLWHPCSQMQEHQNFPIIPIKKAQGIYLYDFNDNAYMDLISSWWVNLFGHNNAYISQQLKNQIDDLEHVLLASFSHKPIITLSQRLCQLTHMDKCFYADNGSSCVEIALKMSYHAHFLKNQTRRKKLFLSLSNSYHGETLGALSVGDVKLYKDTYTPLLLKNLTTPVPKNDHEIENSLNALKRLLDKHSEEICAFIAEPLLQCAGNMHIYSARYLKQAVLLCKQKNIHIIFDEIATGFGRTGSMFAYEQCEIKPDFLCLSKGISGGYLPLSALLTHNEIYNQFYAPYEENKAFLHSHSYTGNALACACANATLDIFEKENVIEKNKALSGFIFNTLQNALKPLMEQQVVSDLRHLGMVFAFEVFIQTKERLSLAVFKKTLKKGLLLRPLNNTIYLMPPYIITHEEVKKAVAGLVEILDELRKG

SEQ ID NO: 8143 - protein, 170 aa, Bacteroides thetaiotaomicron VPI-5482
MALIKSVRGFTPEIGENCFLADNATIIGDVKIGNDCSIWFCTVLRGDVNSIRIGNGVNIQDGSVLHTLYEKSTIEIGDHVSVGHNVTIHGATVKDYALIGMGSTILDHAVVGEGSIVAAGSLVLSNTVIEPGSIWGGVPAKFIKKVDPEQAKELNQKIAHNYLMYSQWYK

SEQ ID NO: 8144 - protein, 216 aa, Oryza sativa (japonica cultivar-group)
MGMVLGKITVETPKHEVLHTGAGYEVRKYPPCVVAEVTYDPAEMKGDRDGGFTVLGNYIGALGNPQNTKPEKIDMTAPVITSGEPESIAMTAPVITSGEPEPVAMTAPVITAEERSQGKGQMTMQFLLPSKYSKVEEAPRPTDERVVLRQVGERKYGVVRFSGLTGDKVVKEKAEWLKAALEKDGFTVKGPFVLARYNPPFTLPPLRTNEVMVPVE

SEQ ID NO: 8145 - protein, 434 aa, Medicago sativa subsp. X varia
MVNTSEENNSNAVMPRKFQGGMNQVGHGGGRIVGQNRRALGGINQNFVHGRPYPCVVHKRVLSEKHEICEKKQADLGHRPITRRFAAKIAGSQQSYAEKTKNSNPLNLNEFGNSIAIDDELKSPEDQPEPMTLEHTEPMHSDPLEMEEVEMEDIEGEMILDIDSCDANNSLAVVEYIEDLHAYYRKIEYLGCVSPTYMDEQLDLNERMRAILVDWLIEVHDKFDLMQETLFLTVNLIDRFLAKQNVVRKKLQLVGLVAMLLACKYEEVSVPVVSDLIHIADRAYTRKDILEMEKLMLNTLQYNMSLPTAYVFMRRFLKAAQADKKLELVAFFLVDLSLVEYEMLKFPPSLVAAAAVYTAQCTVSGFKHWNKTCEWHTNYSEDQLLECSMLMVGFHQKAGAGKLTGVHRKYGSAKFSFTAKCEPACFLLENKNQP

SEQ ID NO: 8146 - protein, 437 aa, Azotobacter vinelandii
MLRPVFVRRGYLPRGRFQNPSSLAYRGRSFPMSVEHAQVQRADFDQFMVPNYAPAAFIPVRGQGSRVWDQNGRELIDFTGGIAVNSLGHCHPRLVAALTEQAGKLWHVSNIFTNEPTLRLAKKLEEATFADRAFFCNSGAEANEAAFKLARRVAHDRFGPQKCEIISALDSFHGRTFFTVSVTGQPKYSDGFGPKPEGITHVPYNDLAALEAAISERTCAVVLEPIQGESGILPAQQAYLEGARRLCDQYDALLILDEVQTGVGRTGELFAYMHYGVVPDILSTAKGLGGGFPIGAMLTRSDLAKHFSAGVHGTTFGGNPLACAVAEAVIDVVNTPEVLQGIKAKHQRFKTRLEAIGRQYGIFSQVRGMGMLIGSVLSEPWKGKARDVLVAAEQEALMVLQAGADVVRFAPSLVIEDADIDEGLERFERAIVRLVRG

SEQ ID NO: 8147 - protein, 634 aa, Xanthomonas axonopodis pv. citri str. 306
MNQPTEPLDMDVCAQEPIHIPGLIQPYGVLLVIEPADGRIVQASSTAADLLGVPMDALLGTPYTQVLELPDAQPFAVDDQPQHLLHADVRFPQRSAPTDHPWVAAWHLYPEQWLVEIEPRDARLMDVTLREALPLLRSIERDAGIDEAAVRAAKGLRSMIGFDRVMVYRFDEEWNGDVIAEARQPELEAYLGLHYPASDIPAQARALYLRNRVRQIADVRYQPSPIQPTLHPRLGTPVDLSDVSLRSVSPVHLEYLANMGVSATLVSSIVVNDALWGLISCHHYSPHFTSHAMRDATDAVTRALAGRIGALQAVGRARLESVLLTIREKLITDFNDAEHLTVDMLADMAPDLMDVVDADGVAIFHGNEISRHGSVPDAEALRRIREHLESEHHDALREDAVGALHVDAIGEVFPELADLAPLAAGFIFVPLMPQSRSALLWTRREQVQQVKWAGNPQLAKLQDIPNSRLSPRKSFDLWQQTVRGRARRWSPLHLESARSLRVLIELMERKRFQQDFTLLEASLSRLRDGVAIIERGAKGAAHRLMFVNPAFAELSQTEVADLIGCDILALLDDDAARGKVELLEEALRLGRAAYVTLPLRTRDGAPVYRQFHLEPLPSPSSITAHWLLQLRDPE

SEQ ID NO: 8148 - protein, 395 aa, Campylobacter jejuni
MKMDYKEQSHIVPAYKRFDIVLEKGQGVYLFDDKAKKYLDFSSGIGVCALGYNHAKFNAKIKAQVDKLLHTSNLYYNENIAAAAKNLAKASALERVFFTNSGTESIEGAMKTARKYAFNKGIKGGQFIAFKHSFHGRTLGALSLTANEKYQKPFKPLISGVKFAKYNDISSVEKLVNEKTCAIILESVQGEGGINPANKDFYKALRKLCDEKDILLIADEIQCGMGRSGKFFAYEHAQILPDIMTSAKALGCGLSVGAFVINQKVASNSLEAGDHGSTYGGNPLVCAGVNAVFEIFKEEKILENVNKLTPYLEQSLDELINEFDFCKKRKGLGFMQGLSLDKNVKVAKVIQKCQENALLLISCGENDLRFLPPLILQKEHIDEMSEKLRKALKSF

SEQ ID NO: 8149 - protein, 80 aa, Zea mays
  unsure (1)..(80): unsure at all Xaa locations
IAHRVDDALGFMSAAGXTVEHTLTTMIEFWXSHECLLLPYEQVFTRXDCTTGXFYDCSAHXLWVGXRTRQLDGAHVEFLR

SEQ ID NO: 8150 - protein, 341 aa, Caulobacter crescentus CB15
MTTSREIRLKARPVGMPKDSDFELATVELPAPGDGEIQVKNLWMSVDPYMRGRMYDRPSYVPPFQLGEALQGGAIGEVIASNDPDFKPGDIVSSMFGWREAYNAHPKSLAAAGMGAITKIETHGIPPQAFLGVAGMPGMTAYAGLLRVAALKDGDVVFVSAAAGAVGSIVCQIAKLKGHTVIGSAGGPEKVAFLKSIGVDHVIDYKATPDVVAELAKVAPKGIDVYFENVGGVHLEAAINSARPFARFALCGMISQYNETSKPEGPSNIILAVGKSLRLEGFIVSNHFDLYPQFAKDMAEWIKAGKITWKETVEDGVDRAPNAFLKLFTGENLGKMLVKLG

SEQ ID NO: 8151 - protein, 269 aa, Bacillus subtilis subsp. subtilis str. 168
MNEAILSRNHVKVKGSGKASIMFAPGFGCDQSVWNAVAPAFEEDHRVILFDYVGSGHSDLRAYDLNRYQTLDGYAQDVLDVCEALDLKETVFVGHSVGALIGMLASIRRPELFSHLVMVGPSPCYLNDPPEYYGGFEEEQLLGLLEMMEKNYIGWATVFAATVLNQPDRPEIKEELESRFCSTDPVIARQFAKAAFFSDHREDLSKVTVPSLILQCADDIIAPATVGKYMHQHLPYSSLKQMEARGHCPHMSHPDETIQLIGDYLKAHV

SEQ ID NO: 8152 - protein, 304 aa, Bifidobacterium longum DJO10A
MKGNIMAVFFAGPLIIIVLLIVLLSAALFVVPQQQAYIIERFGKFLKVQFAGIHIRIPFVDRIAMKTNMRVNQLNVQLETKTLDNVFVTVVASTQFRVNPNDVATAYYELRDPAGQLRSYMEDALRSAIPALSLDDAFARKDDVAFDVQKTVGAEMSRFGFTVVKTLITAIDPSPQVKNAMDSINAAQREKEATRQRAEAQRIQIETQAAADAEKTRLQGEGQANYRREIANGIVDQIKSLQAVGMNINDVNNVVLFNQYLDVMRSLSESNNTKTVVLPASTPGGYQDLYEQVTKAMLTASETK

SEQ ID NO: 8153 - protein, 346 aa, Novosphingobium aromaticivorans
MFSFLRKSKMNTVTVEGSPTTLDIPAGKTLLEAMLDAGLAMPHDCKVGSCGTCKFKLVSGKIGELSPSALALEGDELRSGFRLACQAIPRSDLTIAVDAPLSQGIAIATYRGTIVAAQRLCEDIIGLTIELDRPLAFTPGQYADLTAPGIEGARSYSFAFATVGEPTQQLHFHIRHVPGGAFTDWLFCTDRTGMELKVTAPYGQFALKDSTAPILCIAGGSGLAPIISILEQALDRGADRAVHLLYGARRQSNLYALDKIAALRQRWMAPFEFVPALSDEEPDSDWAGARGLITEQIAGVADLAAHEAYLCGPPAMIDFAEAQLLAAGISRSVISADRFLDRSNRT

SEQ ID NO: 8154 - protein, 342 aa, Streptomyces avermitilis MA-4680
MKALVKEKAEPGLWLMDVPEPEIGPGDVLIKVLRTGICGTDLHIRSWDGWAQQAVRTPLVLGHEFVGEVVETGRDVVDIKAGDRVSGEGHLVCGKCRNCQAGRRHLCRATVGLGVGRDGAFAEYVALPAANVWVHRVPVDLDVAAIFDPFGNAVHTALSFPLVGEDVLITGAGPIGLMAAAVARHAGARNVMITDVSEERLELARKIGVSLALNVADTTIADGQRALGLREGFDIGLEMSGRPEAMRDMIANMTHGGRIAMLGLPSQEFPVDWARIVTSMITIKGIYGREMFETWYAMSVLLEGGLDLAPVITGRYGYRDYEAAFADAASGRGGKVILDWTL

SEQ ID NO: 8155 - protein, 433 aa, Novosphingobium aromaticivorans
MTTNAELWTRREAAVPRGVSSMHQRFFARGENAEAFDAEGNRYIDFATGIAVCNTGHGHPRVLAAVQRQLDAFSHCSFQVTPYENYIELAERLNAIAPIDGPVKSIFFTTGAEALENAVKIARAHTGRRGIITFQGGYHGRTLLTLAMTGKVLPYKARFGPMPGDVFHARFPIPYHGFSEEEAIAGIEALFASAIEPSAVAAIVLEPVLGEGGFYTASYAFFRALREICDRHGILLIADEVQAGFARTGRMFAMDWVREATGVTPDLMTVAKAMAGGFPISGVMGRAEIMDAPDPGGLGGTYGGSPLGCAAGLAVLDVIADEDLCARAVAIGNRIKARLRRMRDNGMTAIGDVRGPGAMIAMELVHDGDPSRPNPDATRALVQEGAREGLLLLSCGLRGNVVRFLPALTMPDALLDEALDRLEIALNRVLGGQ

SEQ ID NO: 8156 - protein, 514 aa, Methanosarcina mazei Goe1
MKLGIGKIKDVLKSGAGKSTESGREEQKIEEIEPDRVEEATMTAKISEQESENTPDKEHLVPMNRTECKKTGLIFFPAFDWAISPTHPEREERLLYTRDQIFEEGLMDLPQIAEYKPRLAEFKDIARVHFCIPDIEAQATTPHLIAAGSCLVLADALMRGEVKNAFALVRPPGHHAMTVAHGNRGFCNINNEAILVEYLRKKYGIRRIAIVDTDVHHGDGTQEIFYNDPDILFISFHQDGRTLYPGSGFTNELGGPKALGRTINIPLPPGTPDEGILYVLDSLVMPILEDFKPELVLNSAGQDNHYTDPLANMRFSAQGYAKLNEKLGPDMAVLEGGYAIQSALPYVNTGIILAMAGLDYSCVMEPDFKPGMFVQAARDRQILEGVVATQLENWKNRNRLVEEEIAKHGDFYRRKKQIFYDTDMIQEVQEETIKMCPDCQGYVTIDSRAHRSINDTRIFGVSVPIYACNRCQAEAEEEYKKRLKSPEYEYVYLQDKKADEYRAYNMRTKQEIVY

SEQ ID NO: 8157 - protein, 256 aa, Burkholderia fungorum
MTEAEQYTGKPAFEGRVALVTGAVRGIGAAIARELHVGGARVAVTDLDVASAEAVAKALDTHGETAFAFALDVREKRDFGHALDAVLGRWGKLDIVVNNAGYAKRTPLDEITPEEFDEIVNINMRSVFLSCQTFSKHMKSAGYGRIVNVTSLASHNGGTVASAHYSAAKGGAMTLTRYFARQLAGTGVTVNAVSPGPVSSAKERLAHLRDEISKQVPVGRFAEPEEIAAAVALLASERAGFMVGATIDVNGGLYMR

SEQ ID NO: 8158 - protein, 91 aa, Oryza sativa
  unsure (1)..(91): unsure at all Xaa locations
XHMYHDMYMKVMGHMCKSKRVLMESIHESKAXKARENTLSDQFESKRAXSKSSCDSNIVSMQDRLAQGPRASAPAGAAHAVNAAAPKKAEK

SEQ ID NO: 8159 - protein, 374 aa, Rhodococcus ruber
MKTKAAVLRGVGQDWRIEEIELGDPVPGEVQVRLVASGMCHSDHHLRTGGSPIPFPVIGGHEGSGIVTKVGPGVTSLVEGDHVVTAFIPACGTCGPCSRGLQNLCDEGAGLLTGRSISDGTYRASAKGEPLVPMCLLGTFSPYITVNEASLVKIEKDIPLEAAALLGCGVATGWGSATAIGGTKVGDTVVVVGVGGVGINAVQGAAAAGARHVIAVDPVEFKRHMALALGATHVYASLEEAMEPVRDLTWGLMADVTVLTVGDIEGDIIQPALTITAKAGQVVVTAMGDATKNEVTLNLFELTLLQKRVQGAIFGGVGPRTQIPALLHHYRSGALKLEELATTVYRLEDVNQGYDDMLAGKNLRGIIRYTDADF

SEQ ID NO: 8160 - protein, 377 aa, Yersinia pestis CO92
MIKTRAAVAWGPNQPLSVEEVDLMPPQKGEVLVRIVASGVCHTDAYTLSGADPEGVFPTILGHEGGGIVEAIGEGVTSVAVVDHVIPLYTPECGECKYCRSGKTNLCQAIRSTQGKGLMPDGTTRFSKNGQPIFHYMGTSTFSELTVVPEISLAKINKEAPLEEVCLLGCGVTTGMGAVMNTAKVKPGDTVAIFGLGGIGLSAVIGAQMAGASRIIGIDLNTSKFELARKLGATDLINPKDYDKPIQEVIVELTDGGVDFSFECIGNVNVMRSALECCHKGWGESVIIGVAGAGEEISTRPFQLVTGRVWRGSAFGGVKGRSELPGIVQQYLDGKFALNDFITHTMALDQINEAFDLMHEGKSIRSVIHFNHSSESK

SEQ ID NO: 8161 - protein, 751 aa, Geobacillus stearothermophilus
MENQNRQNAAQCPFHGSVTNQSSNRTTNKDWWPNQLNLSILHQHDRKTNPHDEEFNYAEEFQKLDYWALKEDLRKLMTESQDWWPADYGHYGPLFIRMAWHSAGTYRTGDGRGGASTGTQRFAPLNSWPNNANLDKARRLLWPIKKKYGNKISWADLFILAGNVAIESMGGKTIGFGGGRVDVWHPEEDVYWGSEKEWLASERYSGDRELENPLAAVQMGLTYVNPEGPDGKPDPKAAARDIRETFRRMGMNDEETVALIAGGHTFGKAHGAGPATHVGPEPEAAPIEAQGLGWISSYGKGKGSDTITSGIEGAWTPTPTQWDTSYFDMLFGYDWWLTKSPAGAWQWMAVDPDEKDLAPDAEDPSKKVPTMMMTTDLALRFDPEYEKIARRFHQNPEEFAEAFARAWFKLTHRDMGPKTRYLGPEVPKEDFIWQDPIPEVDYELTEAEIEEIKAKILNSGLTVSELVKTAWASASTFRNSDKRGGANGARIRLAPQKDWEVNEPERLAKVLSVYEDIQRELPKKVSIADLIVLGGSAAVEKAARDAGFDVKVPFFPGRGDATQEQTDVESFAVLEPFADGFRNYQKQEYSVPPEELLVDKAQLLGLTAPEMTVLVGGLRVLGANYRDLPHGVFTDRIGVLTNDFFVNLLDMNYEWVPTDSGIYEIRDRKTGEVRWTATRVDLIFGSNSILRSYAEFYAQDDNQEKFVRDFINAWVKVMNADRFDLVKKARESVTALQTFVSHRSKKESRLQ

SEQ ID NO: 8162 - protein, 249 aa, Pyrobaculum aerophilum str. IM2
MAKQVLTYIDAKEFAYIIDSISVLVEEANFLIRNDGLYLRALDVSRTAMVDLAIPKESFEEFPEVEELRFGLNFKELKKLLRRVKKGDKISMEFEEGRVRIKLIGKSVRSIVVPSIEVVGEELPTPKVVYTAMVKAASDVLATAVKDADAVADEVKFEASEEALIISASSDKGEVEVKLDKNSELVYEFDVKEPASARFSLEYLVDITSKTSKISDIVTIELATAKPIYLSFDIPAGGKISYFIAPRVE

SEQ ID NO: 8163 - protein, 340 aa, Burkholderia pseudomallei
MSTKGTILVTGGAGYIGSHTAVELLAHGYDVVIADNLVNSKREAIARIEKITGKTPAFHETDVSDERALARIFDAHPITAAIHFAALKAVGESVAKPIEYYRNNLDSLLSLLRVMRERAVKRIVFSSSATVYGVPERSPIDETFPLSATNPYGQTKLMAEQILRDVEAADPSWRVATLRYFNPVGAHESGLIGEDPAGIPNNLMPYVAQVAVGKLEKLRVFGSDYPTPDGTGVRDYIHVVDLARGHIAALDALERRDASLTVNLGTGRGYSVLEVVRAFEKASGRAVPYELVARRPGDVAECYANPAAAAETIGWKAERDLERMCADHWRWQENNPRGFV

SEQ ID NO: 8164 - protein, 148 aa, Triticum aestivum
RVRPIGIITATTNQTPGLNIITEYIMGYLYPGRPVANMCFKVYGYISMTQALAFLQDFKLGHYMKIPPRTMFMAQVVGTLIAALVYIGTAWWLMDSVPNICSTELLPADSPWTCPMDHVFYDASVIWGLIGPRRIFGDLGTYSAGNWF

SEQ ID NO: 8165 - protein, 822 aa, Oryza sativa (japonica cultivar-group)
MSPPHLLLLLLALLLSPPLLLASSSFPLPTIAIAAVSNSSSNPSKQHLACGLVPAAGGAAAGYRISCASVSNRSAAAPHVYAYGGDGTCSPYSAVVAGDGYLCSAAPTSSPPMSMRWWDLNEAGDGSKRVYRGRVLSAVSGGGESVCGLVGERMQCWRCPWGEGAPARVGFSAVAVGGGFVCGLVVGSGEVRCYGGGEVVGREPAGRRFMLLAAGERHACGVDDGGVVGCWGEAAAVAAASPPRISRAVSTVAVGDAVTCVLWGNWTVSCWPEGEASPPPALAGQQFVALEAKGKVVCGVLMSDYSLQCWGAGVAGGVRKVFDKVLPGPCAPSKSCSCGVWSGSAQLCAGSGGGGGGDVSVCYPCGYTPPPMALSPTSNSSSSSSSQSKGKRRPSNLAIALISAGAGSALVALLAALAAVYYLRRHRGSSSPVSGRIHAEPTGTAPRVERRLSALLSKGPNTTVEQFPLVALRAATDCFSPAKRIGSGSFGAVYRASLPDGREVAIKRAERRDTGGPSSSSAAAARRVDHEAAFVSELALLSRVNHKNLVRLLGFCADGGERILVYEFMPNGTLHDHLHRRAASAAAPLSPPLASWPSRLRLALGAARGIEYMHTYAVPPIIHRDIKSSNILLDSCWTAKVSDFGLSLLNTLDGDNAAAGDGGNAGDGDDEERCVTAGTVGYMDPEYYRLQHLTDKSDVYSFGVVLLELLSGCKAIQKYEGSGSPKNVVDMAVPHIEGDRVHRVLDARLPLPTPWEMEAVAYVGYLAADCVRLAGRDRPTMSEVVGVLERAVAACDEYEEGGAGAGGEPALSRSCTDGSTAT

SEQ ID NO: 8166 - protein, 246 aa, Caulobacter crescentus CB15
MFDLTGKTALVTGATGGIGGAIARALHAQGAHVVLSGTRESALAELKAELGERASTVVANLSDAEQVDGLVAKAEEAAGAPLDIVIANAGVTRDGLIVRMKDEDWDTVIKVNLEGYFRLSRAAAKGMMKRRAGRIIGITSIVGVTGNPGQTNYAASKAGMIGFSKALAQELASRGVTVNCVAPGFIASPMTDALNEQQKAGILSTIPAGKLGEGADIAAACVYLASDQAGYVTGQTLHVNGGMAMI

SEQ ID NO: 8167 - protein, 952 aa, Oryza sativa
MWAHDLQYATPGAPTNQFRPRHAVDRSHTSPPPPPNAPRGRPIRNRLHGALEPNPASMWAPRKKNTKRTQSHTHPDPFPAKATPRPHHHHHHLLLPPPPPRPSMAKTRKAAAAPPPPPPPPPAETPARRKGKKKGRPSLLDLQRRSLRLQAQNPSPAPSPSRRDANPSDEDDDGVGSGGRRRQKRLKSVLSSSGGGERFNPFHRREQYADLTSFDGFDLFPPGLLCCKRCPGLKKRQKSSFFVCQVWSFAALRPGSRKRLTFLRFHGEFDSDGCCSMLQDDEAPAAAVVVKVEVEEKKKKVSSKATGKGDAASDGGPTTGTPLPDKKLLLFILDRLQKKDTYGVFSEPVDHEELPDYHEIIEHPMDFSTIREKLLNDSYTTLEQFENDVFLLTSNAMSYNSDDTVYYRQLVGMKTERIVSVRSGQKRIRIPFGSDNSRIVRIRIRIRIFSPGYEYEYGFPSDTDNNSDIRKNCFRIRVRSYLILIRIRDNPYLFPYSSYPYSFSYPVKNMKTNMARSIEALAKKDFENLRQASEPEEEQQPKTVPRRGRPPKYAKKIEKTENDVSPDLSNAKTKSADHAETIRKRLTGDRTRNANITTRDSPFLQHNTPGSFAGKRTDRFGDYSGPSKYGKKTTPTISDDERRSTYDQQYFHSSPLFSALGGERKVLVPVGLQQQHAYARSLARFAAKFGPVGWDIAAKRIRRLLPSGTNFGPGWVVDGEPPENSQWPRVPMLSDPSIQSTGVPASNVISKNDESNQKSGLTSNEDSGEEHLARTEPVASTSACVNTNSVSATKLATKCENGANVSCDGVGSTGQTPPLQQHSHSREIHSNMNGFTALPNTISQYAGQGFLGQMQLTHAQVLGMFSGVNGRTNGFIHGHPLVANSIKAPQNGDVGKVATNPSPDAGHDSEAALSQTMTSSAPSLSAGVQPSGSMPSEKLANPKKHPDLALQL

SEQ ID NO: 8168 - protein, 67 aa, Glycine max
  unsure (1)..(67): unsure at all Xaa locations
AKFNVVQKKIRALIADNKIQFHFDPLTGKFKIXGPTPXLSGKRKRKLFKKWRRDQKVALHIGLVTIE

SEQ ID NO: 8169 - protein, 403 aa, Vibrio cholerae
MTVEMSVDRSSFDEVMVPCYNPMEFIPVKGFGSRIWDQQGHEYIDFAGGIAVSCLGHCHPVMVQALTTQANKLWHLSNVMTNEPALRLAKKLTQVSFAEKVFFANSGAEANEAALKLARRYAADVYGPEKSEIIAFNQGFHGRTFFTVSVGGQATYSDGFGPKPGDIVHLPYNDLAALQAQISDRTCAVMMEPLQGEGGIVSPSAEFVQAVRELCDKHNALLIFDEVQTGNGRTGDFYAYQGIGVTPDILATAKSLGGGFPIGAMLTTAKIAEHMKVGVHGSTYGGNPLACAVAEAVVDFVAQPEILAGVKQREQWMRAELEKINQKYQLFKEIRGKGLLLGAALNDEWQGRARDILVAAGKQGLMVLVAGASVVRFTPSLIISQQEIEEGMARLDKAIATLM

SEQ ID NO: 8170 - protein, 205 aa, Zea mays
SSVARLIARGSGQLVRGIIWCGDITAGGLRRGEEVMKKSVGPSTKPTQVKPSTLRRMKRARRVTKMSNRVANSILSGVLKVTGFVTSTVLNSKPAQKFFKLMPGEVILASLDGFGKIWDAVEVSGKNVMQTSSVVTTSVVTHRYGEQAGEATHNYLHATGNVLGAAWAVFKIRKALDPKGNMKKSFVSQAAHAVAKESVARQKKK

SEQ ID NO: 8171 - protein, 96 aa, Betula pendula
CDHLRVVFGQQMGLSDQDIVALSGAHTLGRCHKERSGFEGPWTSNPLIFGNTYFTELLSGEKEGLLQLPSDKAPLSDAAFRPLVDKYAADEDAFFV

SEQ ID NO: 8172 - protein, 581 aa, Bradyrhizobium japonicum USDA 110
MAEQDDVLHLIDDTGTASEDTDARKWKIAVIDDDPAVHDGTRFALSDYSLNGQGLEILSAYSAAEGRKLMAAHNDIAAVLLDVIMETDVAGLELVEFIRNEIRNETVRIILRTGQPGQAPERRVIVQYDINDYKAKTELTADKLFTSLTAALRSYQQLERMVQTRRGLEIIIDAASTLYDFKSMQRLAEGVLTQLASLLNVDCAGILVLRDNGGVDPELSVLAGSGCYSRFIGTTTSKALDPDLREMVEAAFQRRKNEFADHRSVIYLRTGSGREVVVLLQAERELSETDRSLVEIFSSRLSIAFDNVILYQQLQDANTQLEDRVAQRTRALMQANRRLSAQWLRLQRANGFKNEILGTVAHDLKNPLGVILGRTEMLKELISTGASSSGVVAQVDHIRDATKRLTTMVDHLISDAMADAFDITIRREPVDVAALVKEVADANQPLAVNKQQAISVAAPSNIVTMCDTDRIREAIDNLISNAIKYSPIGGKISVAVAHEGSETIVRVSDEGAGLSPEDLGRLFGRFQRLSAKPTAGESSTGLGLSIVKRIIDMHGGEVTADSDGPGRGSTFTITLPATELP

SEQ ID NO: 8173 - protein, 328 aa, Arabidopsis thaliana
MNSEKEDEPLEEIGDSNNVLDLTSYQLHSLDTVELPPNLIELDLTANRLSGLDSRIAQLSTLKKLSLRQNLIDDSAVEPLSHWDALSDLEELVLRDNKLAKVPDVSIFTKLLVYDISFNEITSLEGISKASSTLKELYVSKNEVNKIMEIEHLHNLQILELGSNRLRVMENLENFTKLEELWLGRNRIKVVNLCGLKCIKKISLQSNRLTSMKGFEECVALEELYLSHNGISKMEGLSALVNLRVLDVSNNKLTSVDDIQNLTKLEDLWLNDNQIESLEAITEAVTGSKEKLTTIYLENNPCAKSSDYVAAVRQIFPNVEQIDSNLFA

SEQ ID NO: 8174 - protein, 751 aa, Geobacillus stearothermophilus
MENQNRQNAAQCPFHGSVTNQSSNRTTNKDWWPNQLNLSILHQHDRKTNPHDEEFNYAEEFQKLDYWALKEDLRKLMTESQDWWPADYGHYGPLFIRMAWHSAGTYRIGDGRGGASTGTQRFAPLNSWPDNANLDKARRLLWPIKKKYGNKISWADLFILAGNVAIESMGGKTIGFGGGRVDVWHPEEDVYWGSEKEWLASERYSGDRELENPLAAVQMGLIYVNPEGPDGKPDPKAAARDIRETFRRMGMNDEETVALIAGGHTFGKAHGAGPATHVGPEPEAAPIEAQGLGWISSYGKGKGSDTITSGIEGAWTPTPTQWDTSYFDMLFGYDWWLTKSPAGAWQWMAVDPDEKDLAPDAEDPSKKVPTMMMTTDLALRFDPEYEKIARRFHQNPEEFAEAFARAWFKLTHRDMGPKTRYLGPEVPKEDFIWQDPIPEVDYELTEAEIEEIKAKILNSGLTVSELVKTAWASASTFRNSDKRGGANGARIRLAPQKDWEVNEPERLAKVLSVYEDIQRELPKKVSIADLIVLGGSAAVEKAARDAGFDVKVPFFPGRGDATQEQTDVESFAVLEPFADGFRNYQKQEYSVPPEELLVDKAQLLGLTAPEMTVLVGGLRVLGANYRDLPHGVFTDRIGVLTNDFFVNLLDMNYEWVPTDSGIYEIRDRKTGEVRWTATRVDLIFGSNSILRSYAEFYAQDDNQEKFVRDFINAWVKVMNADRFDLVKKARESVTALQFNSSIRSIITKALQ

SEQ ID NO: 8175 - protein, 233 aa, Gossypium robinsonii
KILFTSLCHTDVYYWEAKGQTPVFPRIFGHEAGGVVESVGEGVTELKPGDHVLPVFTGECGDCGHCKSEESNMCDLLRINTDRGVMLSDGKTRFSINGKPIYHFVGTSTFSEYTVVHVGCVAKVNPAAPLDKICVLSCGISTGLGATLNVAKPTKGSTVAIFGLGAVGLAAAEGARIAGASRIIGVDLNPNRFEEAKKFGCNEFVNPKDYDKPVQEVLAEMTNGGVDRSVECT

SEQ ID NO: 8176 - protein, 455 aa, Plesiomonas shigelloides
MASSDDNKMGLMGLTVLVTVNMMGSGIIMLPANLAGTGGITMLSWLVTTVGALCIAYTYAKCGMFCHRDGGMSAYSQEAHGKSSFFIASYTYYICLVISAVAIAVSAVGYMKPFFPWLSESAVHAFWGVVGVLVLTMVANFWGPKYTGGISSVTVWGIIIPVVGLSIIGWFWFKPELFAAGWNPHHVGTMDGISSGIALTLWAFLGIETAGANSGAVRNPEKTVPLAVMLATVSVAIVYIASTTVIQGIVPNAELAKSSAPFGLVFSMMFTPFVGQVICALAIIACIGSLLAWQFTNAQVSWAAAQMKLFPSIFGKMNKYNAPIAGMLIMLVLELLLATMSISPNTVQQFNTLLNLSVFINMVPYVLSQTGLFVMLRKNHVSASQWKIGAVVGAFAAIYSIYGVYACGQTAVFYGSILTLLGYIFYGFIAANDVPSDYDVKQEKMERGYITYPFK

SEQ ID NO: 8177 - protein, 226 aa, Zea mays
MDHEKVAPIDEKAPHGVSQPTVSSQEEYTGDWREQEDFMTRNGLNLKSFQRRPKGGELVVLDKSMKTRHLHMIAIGGSIGAGFFVGSGAALAKGGPASLLLDFSIMGVMIFNVVYALGELAVMYPVSGGFYTYSTRFIDPSWGFAMGWNYVFQWAIVLPLEINVAAITLEYWPGARNVHVAVWMLIFWLFIVIINVFGTLGYAEEKFWSSLLKLSATVIFMIIALV

SEQ ID NO: 8178 - protein, 240 aa, Caulobacter crescentus CB15
MTRVAFVTGGTRGIGRAICERLIADGHKVAAGYSGNEAAAEACAKELGVMVVKGNVGVFEDCQAAVKKVEAELGPIDILVNNAGITRDGMLHKMTYEQWSEVIRVNMDSAFNMTRPVIEGMRDRSWGRIINISSINGQKGQMGQTNYSAAKAGLIGFTKALALENAKKGVTVNVICPGYIDTEMVAAVPENVLAQIVAGIPVGRLGRGEEIADMVSFLAGERAGFVTGATLTLNGGQYMA

SEQ ID NO: 8179 - protein, 344 aa, Agrobacterium tumefaciens str. C58 (U. Washington)
MTKFKLEYIWLDGYKPVANLRGKTQIKEFDEFPTLEQLPLWGFDGSSTQQAEGHSSDCVLKPVAIYPDPARTNGALVMCEVMMPDGVTPHASNSRATILEDEDAWFGFEQEYFFYQDGRPLGFPEQGYPAPQGPYYTGVGFKNVGSVAREIVEEHLDLCLEAGINHEGINAEVAKGQWEFQVFGKGSKRAADQIWIARYLLLRLCEQYGIDVEFHCKPLGDTDWNGSGMHCNFSTKFMREVGGKDYFEALMAAFAKNWQEHIDVYGPDNHLRLTGKHETAPWNKFSYGVADRGASIRVPHSFVNNGYRGYLEDRRPNSQGCPYQIASVVLKTIAEVPLAKSAAA

SEQ ID NO: 8180 - protein, 177 aa, Salmonella typhimurium LT2
MKYTILSLVAGALISCSAMAENTLTVKMNDALSSGTGENIGEITVSETPYGLLFTPHLNGLTPGIHGFHVHTNPSCMPGMKDGKEVPALMAGGHLDPEKTGKHLGPYNDKGHLGDLPGLVVNADGTATYPLLAPRLKSLSELKGHSLMIHKGGDNYSDKPAPLGGGGARFACGVIEK

SEQ ID NO: 8181 - protein, 284 aa, Physcomitrella patens
MGRGKIEIKKIENTTSRQVTFSKRRGGLLKKAHELAVLCDAEVALVIFSSTGKLFEYASSGSIRDIIDRYKKGSDGMQNGARNDFMGCEVVKLREQLEQLKASHRHMLGEDLSLLKVPDLLQLEQQLDLGASRVRARKNQLILEEVESLRRKEHELLIANEDLRQKLADAQGIADAVTARANVSESPRPLTSALTRDIVMSSQQQEVTVHPHPNLRDAQRSQTSLQLGMFSSESYLPSSSRGPSEHPIPVGPEGCAGESAMRWEHPHFHSQNRLHANISPSVRI

SEQ ID NO: 8182 - protein, 181 aa, Bacillus anthracis str. A2012
MNVPFVQLRELTLDDVEDRYQWSLDTKVTKHLVVSDQYPPFTLEDTKQWIEACINRKNGYEQRAITAENGIHIGWIELKNFDKTNKNAELGIAIGNKEYWGKGDGIAALYSMLHVAFFEFELEKVWLRVDEDNLQARKSYEKAGFVCEGLMRNDRLRKGRFIHRYRYSMLREEYQSLISSL

SEQ ID NO: 8183 - protein, 166 aa, Nicotiana tabacum
IERYKKHHADSTSQGSVSESNTQYYQQEAAKLRRQIRDIQTYNRQIVGEALSSLSPRDLKNLEGKLEKAIGRVRSKKNELLFSEIELMQKREIDLQNANMCLRAKIAEVERAQQQMNLMPGGSEYNQQQQPMTTSQNYNDARNFLPVNLLEPNPHYSRHDDQTALQ

SEQ ID NO: 8184 - protein, 175 aa, Hordeum vulgare subsp. vulgare
  unsure (1)..(175): unsure at all Xaa locations
MAAAGDAGEKKMITLKSSDGEEFEVEEAVAMESQTIRHMIEDDCADNGIPLPNVNSKILSKVIEYCNKHVQAKPADAGASSDTASAAXGAPAAPAEDLKNWDAEFVKVDQATLFDLILAANYLNIKGLLDLTCQTVADMIKGKTPEEIRKTFNIKNDFTPEEEEEIRRENQWAFE

SEQ ID NO: 8185 - protein, 213 aa, Triticum aestivum
MVSLKLQKRLASSVLKCGKGKVWLDPNEVNEISMANSRQNIRKLVKDGFIIRKPQKIHSRSRARRAHEAKQKGRHSGYGKRRGTREARLPTKILWMRRMRVLRRLLRKYREAKKIDKHMYHDMYLKVKGNMFKNKRVLMESIHKSKAEKAREKTLSDQFEAKRAKSKASRERKHARREERLAQGPRDHAPAPAAAAPAPAPAAAAPKKAKAKK

SEQ ID NO: 8186 - protein, 335 aa, Glycine max
  unsure (1)..(335): unsure at all Xaa locations
SSQLRRPPPEAEALTDEIEKESQYVEEVFRIKDIFLNYEEESDSVLFDSLRRLQLMELTVDLLKATEIGKAVNPLRKHXSRDICQLARTLIDGWKQMVDEWVKDTTAIAGSEGTPDSVNPSVVDDEEGLPSPPMDEGALFAAPTGSMELSQFFDGMDDDGNPQHSGEFIKNHEHGRRPSLNSQNTAKRKPQASNEANIIAKDSKGQQAKKNEAAVRPNKSVIADSGPSRPPKSTMQKKGNIEPKMQQNIVKSAIPRNPHIHQLDKPKCSDDAAVHVKLEATKRKLQERYQQAEKAKRQRTVQVMELHDLPKQGIGHRNPHVKPGNHKRQWGHGRR

SEQ ID NO: 8187 - protein, 180 aa, Zea mays
AVAPDRDAPLFFTDRSAGGGMDYFPTYEEDMAHEDEEDMVGIKRRKPVWVDEEEEMTEVDIVKVPRLRKLRKEEDEHLISGKEYEARLRGQHAKLNPFTGWADMDQKTSLPAASDGESDDEGCVDDILRNNDELVAKDTVKLLPGMLEFSRLVDANIQDPSSGPINSVQFHRNGQLMLAA

SEQ ID NO: 8188 - protein, 217 aa, Glycine max
  unsure (1)..(217): unsure at all Xaa locations
ITLALSQFSATQLGDVFLCKEVVSRKVLVDQGHRQVVELDQAAXWKFLWWSGTISINVLVDQNRKDHSMKFKQTKAGFMKKFEGCWRVEPLFVDEAMCHPFKPVTKEDYNACTRGKGRIGSKVSLEQILQPSIVPPPPLSWYLRGITARTTEMLINDMLAETARIRGGYEAEKSKAEELQVKPGENVDLVSNTSDIKESWKLRRENAKQSHRSLLTK

SEQ ID NO: 8189 - protein, 272 aa, Azotobacter vinelandii
MRSTGDSGRPVPGIAGCVSGCGAGWTGWWSICWIAAVEWPAAGRRPGSGRVGWASLTHSPPGPERFVRFSRPVQEFPMSAKKILMLVGDYAEDYETMVPFQALLMVGHTVHAVCPGKQTGQSVRTAIHDFEGDQTYSEKPGHNFALNFDFAQVRAEDYDALLVPGGRAPEYLRLDERVLELVRNFATANKPIAAVCHGAQLLAAAGVLAGRSCSAYPACAPEVRLAGGEYVDVPLDQAHVDGNLVTAPAWPAHPAWLARFLELLGTRIVHEG

SEQ ID NO: 8190 - protein, 250 aa, x Aranda deborah
MGRGRVELKMIENKINRQVTFAKRRKRLLKKAYELSVLCDAEVALIIFSNRGKLYEFCSSTSMLKTLEKYQKCNFGSPESTIISRETQSSQQEYLKLKNRVEALQRSQRNLLGEDLGPLGSKELEQLERQLDSSLRQIRSTRTQFMLDQLADLQRREQMLCEANKTLKRRFEESSQANQQQVWDPSNTHAVGYGRQPAQHHGEAFYHPLECEPTLQIGYHSDITMATATASTVNNYMPPGWLGQISGSYE

SEQ ID NO: 8191 - protein, 380 aa, Fragaria x ananassa
MSSTEGKVICCRAAVAWEAGKPLVIEEVEVAPPQANVVRVKILYTSLCHTDVYFWEAKGQNPLFPRIYGHEAGGIVESVGEGVTDLKAGDHVLPVFTGECKECDHCKSEESNMCDLLRINTDRGVMLNDGKSRFSIKGKPIYHFVGTSTFSVYTVTHVGCLAKINPQSPLDKVCILSCGISTGLGATLNVRKPKKGSTVAVFGLGAVGLAAAEGARMAGASRIIGVDLNSNRFEEAKKFGITEFVNPKDHKKPVQEVIAELTNGGVDRSIECTGNIQAMIPAFECVHDGWGVAVLVGVPHKDAVFTTHPMNFLNERTLKGTFFGNYKPRTDIPSVVEKYMNKELEVDKFITHQLPFSQINKAFDYMLKGEGIRCIITMEE

SEQ ID NO: 8192 - protein, 511 aa, Zea mays
ENDTSSPPEYGAGKAAATVPARSYWRWRRDDFFPEPSFASWGAYRRALRETPARLRDRLAGRSTDAAELGALRRRSEHEMRRCLTWWDLTWFGFGSVIGAGIFVLTGQEARDHAGPAIVLSYVASGLSAMLSVFCYTEFAVEIPVAGGSFAYLRVELGDAAAFVAAANLILESVIGTAAVARSWTSYLASLVNRPASALRIHAPGLAGGYDELDPIAVLVIAVTATLAMLTAKGTSRVNWVASAVHVLVIAFVIVAGFAHADAANLRPFMPQGVPGVFRAAAIVYFAYGGFDNIATMAEETRNPSRDIPLGLLGSMTAITAIYCVMALVLSMMQPYTAIDRSAAYSVAFASVGMRWAQYVVALGALKGMTTVLLVGALGQARYTTHIARSHIIPPVFALVHPRTGTPVHATALIAVCSACIALFSSLDVLASLLSVSTLFIFMMMATALLVRRYYVRGVTSRTHALRLTALLLLIIASSIGIAACWGTSPERWQSYVVLVPAWAAGTLGIQ

SEQ ID NO: 8193 - protein, 459 aa, Capsicum chinense
MANITNEFMGHDMLAPFTAGWQSDMEPLVIEKSEGSYVYDINGKKYLDTLSGLWCATLGGSETRLVEAANKQLNTLPFYHSFWNRTTKPSLDLAKELLNMFTANKMAKVFFTNSGSEANDTQVKMVWYYNNALGRPQKKKIIARAKAYHGSTYISAGLSGLPPMHQKFDLPPPFVLHTECPHYWAYHLPGETEEEFSTRLANNLESLILKEGPETVAAFIAEPVLGAAGVILPPATYFDKVQAILRKHDILFIADEVVCGFGRLGTMFGSDKYNIKPDLVSVGKALSSGYMPIAAVLVSQKISSVILSESNKIGAFCHGFTYSGHPVACAVALEALKIYKERNITEVVNKISQKFQEGLKAFADSPIIGEIRGTGLALSTEFVDNKSPNDPFPYEWAVGTYFGAQCAKYGMLVSSTGDHVNMAPPFILSLEELDELIRIYGKALKDTEKRVEELKSQKQ

SEQ ID NO: 8194 - protein, 280 aa, Glycine max
  unsure (1)..(280): unsure at all Xaa locations
QCLLCSSLSDMMADPASFIASWLTPSYLFILVNLVIGTIAITSRFSSTPKNQQAHHPQXTQLLQYPSSPTQLHSAPTPSNTLTVAASHVLQPLPPQTPTHTSRNTTXHPEPQPQPEKPPELLRTPSLLERLRSFHNLSLHKHVQPEPEPEPEPEPEKPELVRSPSLLQRIQSINFSHLYRSDFSHRDDEDPDSGSDPGRGSGKAAEMRKSASVRGGLTDSEWEEVEKRRPQTARPVETTTSWREDEEVDAKADDFINRFKKQLRLQRIDSLLRYRGGNSS

SEQ ID NO: 8195 - protein, 200 aa, Glycine max
  unsure (1)..(200): unsure at all Xaa locations
HASVKEDIQNVVVVXCKAGMGRTGLMICSLLLFLKFFPTAEEAIDYFNHKRCVDGKALVLPSQIRYVKYFERTLTHFNGEVQPGRRCMLRGFRLHKCPYWVRPSITISDHTGILFTTRKHPKTKDLMPEDFWISAPKKGMXFALPGEPGLTELVGDFKIQFQDRQGDFYWFVKNTYFVWPPFFSAFHSLTRIIMIVLWLI

SEQ ID NO: 8196 - protein, 398 aa, Triticum aestivum
NFPFLVNLTSHHGNEPDQPSAPATAPLSKRCREPAFAVTGNATSSRGGGGLREKARAVTRLAGSGSRHTHADAQYSGGPVPGVAFDPFDIEADPPPLALTHEQIKLCKDALAHFERRSKQLDALSDEFQRLQGMRTMHPEMMKMSTVARDAANREKNRYIDVLPFDDTRVRLKSSATSQISGNDYINASFVKATEDNSVARFISTQGPLVRTFDDFWEMVCENQCPVIVMLTQFDSVKCDEYLPLQNGQGTYGKYDVKIRKDTRDKHQLCLRAVEVQCNESGKVHSVLHIEYPDWPDHGVPANTDAVRQIQKRLHHIPREHPIVAHCSAGIGRTGAYITIHSSIERILLGDKSSYDLVETVKNFRSQRTGMVQTEQQYMFCYRAIADELKDLLRSSGH

SEQ ID NO: 8197 - protein, 141 aa, Zea mays
  unsure (1)..(141): unsure at all Xaa locations
MQSSSMKREISEAHDTIRFGINAGVKADLAPPHPLQSTIQSETKFWADKKKFGTDAIYGSALNIRXDLDAQILSRFQRPPGALPSSLLGYEALTGSLXDDFGFEDYLNMPHDSDSFRQPDMHHGMEVRLGLSKGPICPSFN

SEQ ID NO: 8198 - protein, 254 aa, Triticum aestivum
MVKESASPGSGSGSPGGAAEKMGRGRIEIKRIENTTNRQVTFCKRRNGLLKKAYELSVLCDAEVALIVFSGRGRLYEYSNNSVKATIERYKKATSDTSSAGTVAEINAQHYQQESAKLKQQITTLQNSNRTLIGDTMATMSHRDLKQLEGRLDKGLGKIRARKNELLCAEIEYMQRREMELQNNNFFLREKVAETERGQQQTLNMMGAASTSNEYEQNMIHCDPRTFLQFNFMQQQPQYYSQQEDRKSLNSVGR

SEQ ID NO: 8199 - protein, 377 aa, Triticum aestivum
MDHRLVAALLVLLGLLLSPAPAAAAAGDEEPLIRQVVGGADPLDNDLELDSQFLGFVQRFGKTYRDAEEHAHRLSVFKANLRRARRHQMLDPSAEHGVTKFSDLTPAEFRRTFLGLKTTRRSFLREMAGSAHDAPVLPTDGLPEDFDWRDHGAVGPVKNQGSCGSCWSFSASGALEGANYLATGKMEVLSEQQLVDCDHECDPAEPDSCDAGCNGGLMTSAFSYLLKSGGLEREKDYPYTGKDGTCKFEKSKIAASVQNFSVVAVDEEQIAANLVKYGPLAIGINAAYMQTYIGGVSCPYICGRHLDHGVLLVGYGASGFAPSRFKEKPYWIIKNSWGENWGDKGYYKICRGSNVRNKCGVDSMVSTVSATHASKEE

SEQ ID NO: 8200 - protein, 433 aa, Caldococcus noboribetus
MVSHPCTADEAKPPSEGQLARFENGKLIVPDNLIVAYFKGDGIGPEIVESAKKVLDAAVDKAYGGTRRIVWWEVTAGEEAQKECGSLLPDGTLQAFKLARVNLKGPLTTPVGGGFRSLNVTLRMVLDLYSNVRPVKWYGQPTPHCHPENIDWVIFRENTEDVYAGIEWPFDSPEAQKIRDFLKKEFGIELTPDTGIGIKPISKWRTQRHVRRAMEWAIRNGYKHVTIMHKGNIMKYTEGAFRQWAYDLILSEFRDYVVTEEEVNTKYGGKAPEGKIIVNDRIADNMLQQIITRPGEYNVIVTPNLNGDYISDEANPLVGGIGMAAGLDMGDGIAVAEPVHGSAPKYAGKNVINPTAEILSGMYLLSDFVGWPEVKLLVEYAVKQAIAHKQVTYDLAREMGGVTPISTTEYTDVLVDYIRHADLKPSRASEGLP

SEQ ID NO: 8201 - protein, 133 aa, Zea mays
MAKGGLSKLRCMIKRWHSSSRIVSRAPSPSSAHDGATSGDAHGASFHGADEVPKGLHPVYVGKSRRRYLVAEELVGHPLFQTLVHRTGGTTGGAAAGTVVGCEVVLFEHLLWMLENADPQPESLDELVDYYAC

SEQ ID NO: 8202 - protein, 139 aa, Triticum aestivum
  unsure (1)..(139): unsure at all Xaa locations
MVXLKLQKRLASSVLKCGKGKVWLDPNEVNEISMANSRQNIRKLVKDGFIIRKPXXXHSRXXXRRXHXGQXXGXHSGYGKXRGTRELXPQQVLXMXKMRVLKRLLRKYREARSRQTHYMTCTEKGTCQDKGPHGIHNPR

SEQ ID NO: 8203 - protein, 220 aa, Griffithsia japonica
ARGQHPQDSPTDGPQEHSMGTSIMAVTFDGGVVMGADSRTTTGSYIANRVSDKITPMTDKIFVCRSGSAADTQIISDYCRYYLSMHHIELGEDPRVETTARLFNQLCYHNKEMLMASIIVGGYDARKGGQVFSIPLGGALIKQPFTIGGSGSSYIYGYCDANFKEGMSKDECIEFVKNALSLAMARDGSSGGVIRLVVIDKDGASRQFIHGDKLPQFWVG

SEQ ID NO: 8204 - protein, 418 aa, Triticum aestivum
  unsure (1)..(418): unsure at all Xaa locations
MADQSPAPIRCKAAVSRAKGAPLVIEDIVVDPPKAYEIRMKVICTSLCHTDITFWRGKEDFPLPPVFPRILGHEAYGVVESVGERVEGFAVGDTVVPTFLGQCDSCAGCASAGSNMCSALPFVVGPGMRRDGTTRFRDSQGEPLHDFLAVSSFSQYTVVDVXQVVKVDPAVPPKLACLLGCGAGTGVGAAWRLAKVQPGSSVVIFGLVLXTIKXXXXXXQGAKMCGAAKIIGVDLNPDKEELGKSSFLRGTRHGENIWLISKCYLLVLQAXKFGVTDFVNPSKLGESPLSQVIIEMTGGGADYCFECIGVASVMTEAFRSAKQGNGKTVILGLEKDGKPISLPSIEFLFGKCVMGSLFGGIKPKTDIPILAKKFMIKELELEKLITHEVGLQEINTAFDLLLQGKSLRCIIWMDKLAA

SEQ ID NO: 8205 - protein, 316 aa, Saccharomyces cerevisiae
MEEYDYSDVKPLPIETDLQDELCRIMYTEDYKRLMGLARALISLNELSPRALQLTAEIIDVAPAFYTIWNYRFNIVRHMMSESEDTVLYLNKELDWLDEVTLNNPKNYQIWSYRQSLLKLHPSPSFKRELPILKLMIDDDSKNYHVWSYRKWCCLFFSDFQHELAYASDLIETDIYNNSAWTHRMFYWVNAKDVISKVELADELQFIMDKIQLVPQNISPWTYLRGFQELFHDRLQWDSKVVDFATTFIGDVLSLPIGSPEDLPEIESSYALEFLAYHWGADPCTRDNAVKAYSLLAIKYDPIRKNLWHHKINNLN

SEQ ID NO: 8206 - protein, 152 aa, Zea mays; identical to SEQ ID NO: 631

SEQ ID NO: 8207 - protein, 377 aa, Ralstonia metallidurans
MKQVDSTKETQKMKAAVMEKAGAPLVIHDVAIAEPGPREVRVRTAAVGLCHSDLHMMQGTYPLPLPAVLGHEVSGVVEAVGTQVSGLKAGDHVVGCLSVYCGHCSVCASGHQVLCQNPEVKLPPGKANRLRLAGNPLSQVFNLSGFAEEILVHENALVKIRDDMPLDRAALLGCAVITGTGAVFHSAKVPPGSTVVVVGCGGVGLSVINGAVIAGASRVIAVDMLPAKLELARKFGATDVVNAGDGDPVAQVMQLTGGGAEFAFECIGLKQTAEQCYAMLAPGGTATVIGLFRPDARIELPALDFLKEKRIQGSFMGSNRLSLDIPRLVELYMQGKLLLDDLISQRISLEDINEGFIAMQSGSVARSVITFPGVGGL

SEQ ID NO: 8208 - protein, 452 aa, Saccharomyces cerevisiae
MSGTFSYDVKTKENEPLFEFNSAYSPRVSYHFNSKVSHYHYGVKHPMKPFRLMLTDHLVSSYGLHKIMDLYETRSATRDELLQFHSEDYVNFLSKVSPENANKLPRGTLENFNIGDDCPIFQNLYDYTTLYTGASLDATRKLINNQSDIAINWSGGLHHAKKNSPSGFCYVNDIVLSILNLLRYHPRILYIDIDLHHGDGVQEAFYTTDRVFTLSFHKYNGEFFPGTGDLTEIGCDKGKHFALNVPLEDGIDDDSYINLFKSIVDPLIMTFKPTLIVQQCGADSLGHDRLGCFNLNIKAHGECVKFVKSFGLPMLVVGGGGYTPRNVSRLWTYETGILNDVLLPEDIPEDIPFRDSFGPDYSLYPMLDDLYENKNSKKLLEDIRIRCLENIRYLQGAPSVRMDAECIPTQDISALTEEEDKIIQEMNEETEADSSNRLEEMEKENSGLIAFS

SEQ ID NO: 8209 - protein, 249 aa, Pseudomonas fluorescens PfO-1
MLLQGKVAIITGAASARGIGRATATTFAQHGAWVVILDLDASAARDAAASLGEGHLGLAANVADESQVQQAVATVIEHFGRIDILVNNAGITQPLKTLDIRPGDYDKVLDVSLRGTLQMSQAVIPLMRQQASGSIVCMSSVSAQRGGGIFGGPHYSAAKAGVLGLAKAMARELGPDNVRVNSIAPGLIHTDITGGLMQDERRHAIIDGIPLGRLGEAQDVANAALFLASDLSSYLTGITLDVNGGMLIH

SEQ ID NO: 8210 - protein, 176 aa, Rhodobacter sphaeroides
MTVRPHLALAFACLAGPALAAGPPPVTFDSIDGGQIRLDELRTAGPVLVVNTASLCGFTPQYDDLQALWDRYRDAGLTVLAVPSNDFKQELDDAGAVRDFCATNFDLTLPMTTITPVTGAEAHPFYRWLAEEHGVEPRWNFHKVLIDRDGDLVASWSSPVRPTDREIVGRIEALLP

SEQ ID NO: 8211 - protein, 229 aa, Staphylococcus aureus subsp. aureus Mu50
MNDYVQALLMILLTVVLYYFAKRLQQKYPNPFLNPALIASLGIIFVLLIFGISYNGYMKGGSWINHILNATVVCLAYPLYKNREKIKDNVSIIFASVLTGVMLNFMLVFLTLKAFGYSKDVIVTLLPRSITAAVGIEVSHELGGTDTMTVLFIITTGLIGSILGSMLLRFGRFESSIAKGLTYGNASHAFGTAKALEMDIESGAFSSIGMILTAVISSVLIPVLILLFY

SEQ ID NO: 8212 - protein, 153 aa, Zea mays
KRSEAMSMSKTGQAAEKDEQQQSRGIALMQGICAVVYRKADNTPCPIKQGLYLGSVGAAFNKDALKSLNITHILIVAKSLDPVFPAEFNYKKIEVLDIPDTDLLKHSDECFGFIDEAISSGGNVLVHCFAGRSRSGAGMENATCAALIIILVL

SEQ ID NO: 8213 - protein, 326 aa, Shewanella oneidensis MR-1
MSQNTHANEKPFAIAIHGGAGTISKANLTPELRQAYKDKLKEAVDKGSKVLEQGGDSLVAVQTAINVLENSPLFNAGVGSVYTYDGGHELDASIMDGKTMNAGAVAGVRHIANPIDLALAVMNKSEHVMLSGAGAEEFALTQGFTLVANSHFDSDARYQQLLDARQKLQAAQKSEQIAGIEMNDLDYKFGTVGAVALDKNGNLAAGTSTGGMTAKRFGRIGDSPVIGAGTYAENGVCAVSATGHGEFFIRYQVAGDICARVKYQQKSILQAADEVINQRLITAGGSGGVIAVDHRGNIATPFNTEGMYRASRSNGEPAQVMIWQDQ

SEQ ID NO: 8214 - protein, 243 aa, Xanthomonas axonopodis pv. citri str. 306
MNSSARRALVTGGSGDLGGAICRHLAAQGRHVIVHANGNLARADEVVAAIVADGGSAQAVAFDVADAQASSAALESLLEAGPIQIVVNNAGIHDDAPMAGMNVEQWHRVIDVSLHGFFNVTQPLLLPMARTRWGRVVSVSSVAAVLGNRGQTNYAAAKAALHGASKSLSREMASRGIAVNVVAPGVIESDMVGDSFAPEAIKQLVPAGRVGKPDEVAALVAFLCSDAAGYINGQVIGVNGGMG

SEQ ID NO: 8215 - protein, 333 aa, Hordeum vulgare subsp. vulgare
MARWAIAIHGGAGVDPNLPEHRQEEAKRVLARCLQVGVDLLRAGATALDVVEAVVRELETDPCFNSGRGSALTRAGTVEMEASIMDGRGRRCGAVSGVSTVKNPVSLARRVMDRSPHSYLAFDGAEDFAREQGLEVVDNSYFITEENVGMLKLAKEANSILFDYRIPLAGADTCSAQAAATENHNNNGMVMNGLPISIYAPETVGCAVVDCNGFTAAATSTGGLMNKMTGRIGDSPLIGAGTYACGHCAVSCTGEGEAIIRSTLARDVAAVMESRGCLLQEAVDFCVKERLDEGFAGLIAVSGTGEVAYGFNCTGMFRGCATEDGFMEVGIWE

SEQ ID NO: 8216 - protein, 456 aa, Zea mays; identical to SEQ ID NO: 1736

SEQ ID NO: 8217 - protein, 368 aa, Neurospora crassa
MATHNIVVFGGNHCGPEVVLEAIKVLKAIETNSPSACKFNLQNHLLGGASIDKHNDPLTDEALNAAKAADAVLLGAIGGPEWGTSSTVRPEQGLLKLRKELGTYGNLRPCNFASESLVDSSPLKAEVCRGTDFIVVRELTGGIYFGDRTEDDGSGYACDTEPYSRAEIVRIARLAGFLALAKNPPAKVWSLDKANVLATSRLWRKTVTDVISKEFPQLQLEHQLIDSAAMLLVKNPRALNGVVITSNLFGDIISDEASVIPGSIGLLPSASLGGIPDGKGKCNGIYEPIHGSAPDISGKGIVNPVGTILSVAMMLRYSLNLPKEADAVEAAVKAAIDNGTKTKDLGGNATTSDMGNAVVAELEKILKA

SEQ ID NO: 8218 - protein, 379 aa, Olimarabidopsis pumila
MITTGQIIRCKAAVAWEAGKPLVMEEVEVAPPQKHEVRIKILFTSLCHTDVYFWEVKGQTPLFPRIFGHEAGGIVESVGEGVTDLQPGDHVLPIFTGECGDCRHCHSEESNMCDLLRINTERGGMIHDGESRFSINGKPIHHFLGTSTFSEYTVVHSGQVAKINPDAPLDKVCIVSCGLSTGLEATLNVAKGKKGQSVEIFGLGAVGLAAAEGARIAGASRIIGVDLNSKRFDQAKEFGVTEFVNPRDHDKPVQQGIAEMTDGGVDRSVECTGSVQAMIQAFECVHDGWGVAVLVGVPSKDDAFKTHPMNLLNERTLKGTFFGNYKPKTDIPGVVEKYMNKELELEKFITHTVPFSEINKAFDHMLKEESIRCIITMGA

SEQ ID NO: 8219 - protein, 291 aa, Rhizobium sp. CIAM1141
GKTQIKEFDTFPTLEQLPLWGFDGSSTMQAEGRSSDCVLKPVALYPDPARTNGALVMCEVMMPDGVTPHATNARATILDDEDAWFGFEQEYFFYQNGRPLGFPEQGYPAPQGPYYTGVGYSNVGDVAREIVEEHLDLCLEAGINHEGINAEVAKGQWEFQVFGKGSKKAADQIWMARYLLQRLTEKYGIDIEYHCKPLGDTDWNGSGMHCNFSTKYMREVGGKDYFEALMAAFDKNLMDHIAVYGPDNDKRLTGKHETAPWNKFSYGVADRGASIRVPHSFVKNDYKGYVE

SEQ ID NO: 8220 - protein, 382 aa, Glycine max
MEGRRRGGYSGRRIVASRRGSGKSNANNNNNNNNKNNNNINVIKKLQSREIWSKPHRAFASVTASHRFRSMCLTHQYDTHDPSKTPSSLWPFLMKRTKVVEIVAAKNVVFALYHSGLCAAFSRVIRSLFYNKNNDSLITVSVYASENFCSLKCRSTKIEYIRRGKPDAGFPLFQSESLKWPGFVEFDDVNGKVLTYSAQDCIYKVFDLKNYTLLYSISDRNVQEIKISPGIMLLIYNRTSGHIPLKIISIEDGTILKVFNHLLHRNKKVDFIEQFNEKLLVKQENENLQILDVRSSELMEVSRLEFMTPSAFIFLYENQLFLSFRNRTVSVWNFRGELVTSFEDHQLWHPDCNTNNIYITSDQDLIISYCKADSDDQWIEAL

SEQ ID NO: 8221 - protein, 420 aa, Erucastrum abyssinicum
YHQSCTIFFLVLIQFHHVFSTNTLSPNDALTISSNKTLVSPGDVFELGFFKTTTRNSRDGTDRWYLGIWYKTTSDQRTYVWIANRDNPLHNSMGSLKISHANLVLLDQSDTPVWSTNLTGVAHLPVTAELLANGNFVLRDSKTNDLDRFMWQSFDFPVDTLLPEMKLGRKVNSSEKEKILTSWKSPTDPSSGDYSFILETEGFLHEFYLFKNEFKVYRTAPWNGVRFNGVPKMQNWSYIDNSFIDNKEEVAYTFRVNNNHNIHSRFRMSSTGYLQVITWTKTVPQRNMFWSFPEDTCDPYKVCGPYAYCDMHTTPMCNCIKGFVPKNAAQWDLRDASGGCVRSSKLSCGERDGFLRLGQLKLPETSEALVEKGIGLKECKEKCLRDCHCTGFANMDIMNGGGSGCVTWTGELVDMRDYDA

SEQ ID NO: 8222 - protein, 441 aa, Oryza sativa (japonica cultivar-group)
MEMHECCYYGGSIGGDWLNPLAAIPPPCSSSSSSWSSQLLLLSDHDDVLLHSAGDHGGAVAGIGGACMTADLVVRDEEMEMAAGYLPVAASAAAAADVDHYMYQQFQLEPDQFVSTLPAVAVAVAATAGGGSHDDELLRMPFTDIDLDAFADARDVVVGVGEPKPSPQHTLDAAIALPAVGGGGAHHFGTQDDDVKFDVTKQRNDAALAGDDSLSMVIVESYEMGMRRHAAEQEQEQKPKIITSAATTLTPLPLPPPPPPPPRVTRSRRDGSSAATAGGKTRLDHIGFEDLRRYFYMPITKAAREMNVGLTVLKKRCRELGVARWPHRKMKSLKSLILNEMGSKGMSAAAMRRELEALENCCALMERNPAVELTERTKKLRQACFKENYKRRRAAAVDVLDLDHCFSFAAGHCHRHHHQQLALPPPPAAAADHRRRDFFGY

SEQ ID NO: 8223 - protein, 241 aa, Tradescantia virginiana
  unsure (1)..(241): unsure at all Xaa locations
VQLKRMENKINRQVTFSKRRGGLLKKAHEISILCDAEIALIIFSTKGKLYEYATNSKMDNILERYERYSYAEKALTSSDPDIQGNWCQEYAKLKSKVEALCKSQRHLMGEQLETLNLKELQQLEQQLEGSLKHVRSRKTQVMLDSISELQRKEKSLEEQNKNLEKEILEKQKIKALAQQAHWEHQNQPAPRGSPPRPFVIAESHPTLNIGHFQGRTNAVEAEENQQPXMRICSSLLPPWML

SEQ ID NO: 8224 - protein, 165 aa, Brassica oleracea
SNTTFKLKPSPAFRLNGFSTKNWAALNVTTPLTADSPPPTSEEHERQRFDPGAPPPFNLADIRAAIPKHCWVKNPWKSMSYVVRDVAIVFALAAGAAYLNSWLVWPLYWLAQGTMFWALFVLGHDCGHGSFSNDPRLNSVVGHLLHSSILVPYHGWRISHRTHHQ

SEQ ID NO: 8225 - protein, 340 aa, Corynebacterium glutamicum ATCC 13032
MKLAVIGGDGIGPEVTAEALKVLNAVRDDIETTDYDLGARRYLKNGELLTDEDLASLREHDAILLGAIGAPGSVPPGILERGLLLKMRFALDHHVNLRPSKLYDGVESPLRNPGKIDFVVVREGTEGAYTGNGGAIRVGTPHEIANETSVNTRYGAERVIRYAFELAQSRRKKLTLVHKTNVLVHGGGLWQRTVDEVAKEYPEVAVDYNHIDAATIYLVTDPSRFDVIVTDNLFGDILTDEAGAVSGGIGLAASGNIDATGTNPSMFEPVHGSAPDIAGQGIADPTAAILSAAMLLRHLGDEDNAVRIETAIAADVAGRDNSQPISTTEVGDRIVKALQS

SEQ ID NO: 8226 - protein, 187 aa, Zea mays
SARGLSIALVYPPPTGLRQSAMAAASSVHGFTVKDASGEDVHLSTFKGKVLLIVNVASQCGLTNSNYTELAQLHEMYKDQDFEILAFPCNQFGGQEPGTSEEIVQLVCARFKAKYPILHKVDVNGEDAAPIYKFLKSSKTGPMGEDIKWNFAKFLVDRQGHVAERYAPTTYPLSIQKDIKKLLGGSY

SEQ ID NO: 8227 - protein, 336 aa, Streptomyces roseochromogenes subsp. oscitans
MRLLVTGGAGFIGSEFVRATLRGVLPGSSGTHITVLDKLTYSGNELNLAPIADLPNYRFVQGDICDRGLVDDVVAGHDAIVHFAAETHVDRSIDSAASFVRTNALGTQVLLEAASRHRLGRFVHISTDEVYGSIPEGAWTEVSPVAPNAPYAAAKAAGDLLALAWHRTRRLDVVVTRCTNNYGPYQYPEKLIPLFTTNILDGQQVPVYGDGRNRRQWLHVSDHCRAIQLVLLGGRPGEVYHIGGGIELTNLELAEHILAACGVGWDMVRHVPDRLGHDLRYSLETAKIRTELGFSPRVAFAEGLAETVEWYRTHRGWWEPLKNPDKATGSPSDAGR

SEQ ID NO: 8228 - protein, 85 aa, Glycine max
  unsure (1)..(85): unsure at all Xaa locations
RLCNINLLSAEDLGVSKEERQLVDSLXETCFNDPSSRREKRLLMLPGDDVRPPDVAITYFETPRTSSNAXLSSKNERDKNEIPLR

SEQ ID NO: 8229 - protein, 490 aa, Glycine max
  unsure (1)..(490): unsure at all Xaa locations
MDSVPADVSNSHTINDPSKSPPAKETDRQASASVASGQDNSPHEASPRLSPTGISSWAKNLKISQPFSGSQDDSSSGNVGKSTFARITSNFGLRLSPKSPVEDDSSSETAGQSNLFGTITKGLVDSSKNAVKAVQVKARHVVSQNKRRYQEGGFDLDMTYITENIIAMGFPAGDMSSGFFGYVEGFYRNHMEEVIKFFETHHKDKYKVYNLCSERLYDASLFEGKVASFPFDDHNCPPIQLIISFCQSAYSWLKEDIENVVVVHCKAGMARTGXMISSLLVFLKFFPTAEESMDYYNQKRCVDGKGLVLPSQIRYVKYFERVLTYFNGENPPARRCMLRGFRLHRCPYWIRPSITVSDHSGVLFSTKKHPRTKDLLPEDFWFGAPKKGVMVFALPGEPGLTELAGDFKIHFHDRQGDFYCWLNTTMTENRKVLNTSDLDGFDKRKLPSPGFMVEVVLVDYNGNVVTSKIETTTKKSDRVQVESACCSCSN

SEQ ID NO: 8230 - protein, 318 aa, Oryza sativa (japonica cultivar-group)
MTRRCSHCSHNGHNSRTCPNRGVKIFGVRLTDGSIRKSASMGNLSLLSSAAGSTSGGASPADGPDAAPTAADGYASDDFVQGFSSATRDRKKGVPWTEEEHRRFLLGLQKLGKGDWRGISRNFVVSRTPTQVASHAQKYFIRQSNMTRRKRRSSLFDMVPDESMDLPPLPGGQEPETQVLNQPALPPPKEEEEVDSMESDTSAVAESSSASAIMPDNLQSTYPVIVPAYFSPFLQFSVPFWQNQKDEDGPVQETHEIVKPVPVHSKSPINVDELVGMSKLSIGESNQETESTSLSLNLVGGQNRQSAFHANPPTRAQA

SEQ ID NO: 8231 - protein, 208 aa, Caulobacter crescentus CB15
MSMTLRRMAMTAVFAAVFLGTVAMAVEEPVFKVVLHEGDFDVRDYPALVVAEVTVSGDQKQAANRGFRLLAGYIFGGNRTRQSIAMTAPVAQAPAGQTIAMTAPVTQTQSAGQWVVRFTMPSRYSLEALPEPNDPQVKLRLIPPSRLAVLRFSGLAGADTVEVKTADLKKRLSAHQLQATGPATLAQYNTPWTPWFMRRNEVMIPVAP

SEQ ID NO: 8232 - protein, 455 aa, Tropheryma whipplei TW08/27
MPGSNRVNPFIKNSVDVSLETINAWRGLPIEQQPEWPDSVLLSEVSCTLSQLPPLVFAGEVDKLRLHLQEAAEGRAFILQGGDCAESFRDITADNISRKLKTILQMAAILTYAAGVPIIKMARMAGQYAKPRSEQFELVDGRSLPVYRGDMVNGHELHDRVPDPKRMLKAYELSAATLNLIRAFTRGGFADLRALHVWNRGFAESCENEQYEELARKIDKAIAFMNACGVDCSNLTQTEVFVCHEGLLLDYEHALTRCDSRTGFFYDTSAHFLWIGERTRQIDGAHIDFFSKIENPIGVKLSSKVTARQVLELANRLDPGRTPGRLTFITRMGAGNIRQCLPGIIEAVRDGGFNPAWVCDPMHGNTITSSSGYKTRRFMDILDEVRGFFDVHRSVGTHPGGLHVELTGDDVTECTGGFDSISDDDLKDRYESLCDPRLNHRQSLELAFFLADCMK

SEQ ID NO: 8233 - protein, 192 aa, Xylella fastidiosa Ann-1
MNMLNVLRFPVLALALAFVSSGVLADVGSLLDLDYRPLAGKETVNLQRLYGGKVLLVVNTASKCGFTPQYEGLEALHQKLSPLGFAVLGFPSNDFKGQEPGDEQQIQEFCTLTYGVKFPMFQKVHVKGDEVTPLYQRLTQTTGVAPGWNFHKYLIARDGHVVAQFDSRTRPDDPILLEAIKRELAKSVQVVH

SEQ ID NO: 8234 - protein, 434 aa, Glycine max
MEDSFFDVVEFLKKPSLTETFVDILLCAVPIWLAVMIGLVIGWSWRPRWTGLVFLGLRSKFRFLWTAPPGFGARRLWLAFTALSAFTYWFNFKGKTKAKAQDPSPSQSDTADSNAISRAARSGDRAEEREQDTVTQADLEHFLHLLEGKDGVMDWQSFMERSTPNMQYKAWRHDPETGPTVYCSRTVFDDATPELVRDFFWDDDFRPKWDAMLAYCKVLEECPRNGTMISHWIKKFPFFCSDREYIIARRIWQAGNTYYCVTKGVPYPSLPKRDKPRRVELYFSSWVIKPVESRKGDGQMSACEVTLLHYEDMGIPKDVAKLGVRHGMWGAVKKLHSGMRAYQNARKTEASLSRCALMASKTTKISSDTNMHSSEPASCMEDRVQAMSNTAQKGNGIDWKWVAVGGTVALVLGLHTSAVGRALLLGAGHRIARR

SEQ ID NO: 8235 - protein, 446 aa, Zea mays
MSSRSGSTGGGSTGGGSSAGGGGAVPLAVLLRREVASERTASERPELHWGLFSQAKKGEDFTFLKPECERVPDVPSSSFSAFGLFDGHNGNGAAIYTKENLLNNILSAVPADLNREDWLAALPRALVAAFVKTDKDFQTKARSSGTTVTFVIIDGLVITVASVGDSRCVLQAEGSIYHLSSDHRFDASKEEVDRVTECGGDVGRLNVVGGAEIGPLRCWPGGLCLSRSIGDQDVGEFIVPVPLVKQVKLSTAGGRLIIASDGVWDVLSPEVAFNCSRELPPVPAAEQIVKTAVQSKGLRDDTTCIVVDIIVEKNNSSMPLAKRQPGIGVFKNMFGKKKSSDSSSHSHSDREYMDPDNVEEIFEDGCALLSRRLDSEYPVRNMFKLFICAICQVELKPNQGISVHEDSSQPGSLRRWDGPFLCQSCQEKKEAMEGKRRSRDSSRNSG

SEQ ID NO: 8236 - protein, 239 aa, Phytolacca americana
  unsure (1)..(239): unsure at all Xaa locations
VQLRRMENKINRQVTFSKRRSGLVKKAHEISVLCDAELALIIFSPRGKLFEYSTDSSMEKILERYERYFYAERQLASNDPNTEVNWTFDFAKLKAKLELLQRNHRHYLGQDLDSLNIKDLQSLEQQLDNALKHIRTRKNQLMHESISELHKKEKAMQEQNNMLVKKIKEREKAMAEAQGMQWQRQQNEPPEASNFLLPPPLTSWNTAGDAYHGQIAGEVKRNDLDLTLEPVYSCXXGCF

SEQ ID NO: 8237 - protein, 162 aa, Solanum commersonii
MAAEVEYSCFVGGLAWATTDRTLSDAFSTYGEVVDSKIINDRETGRSRGFGFVTFKDEKSMKEAISGMNGSELDGRNITVNEAQARGSGGGGGGGGGFGGGRRREGGGGGYGGGGGYRGGGGGGYGGGRREGGGGGGYGGGRREGGGGGGYGGGGYGGGDRY

SEQ ID NO: 8238 - protein, 1197 aa, Candida albicans
MSETKEAPKPTKQESQGILKKLTSGDTWVSPFRSQASEEDPKKKINLYKQFKESNKIEHIKVPVKFSYHPTLEAEAKKKKAAEAEAKKAKETKATVTSTEAKDAKEETETKAEKVEEKLETDAKEPLIEDETKEEAKVDTEAKEPLIEDEDKQEPANEAEEKEAELEDKAEEKLVTDQPKDEEIEVAEPKEVSAASEVEEQKLEKDAAEPEIQDGEALKGDDNIEKQIKENPIELVDQPSQFKYEPVELPNKETLDKLQDKPVLLKHYQELNAIGVGSIANRIEDPNKVIELGSGLRMTQQQLLDIAAKRVAPVITNINDEVSKTRQEDEIKRQQGLDNKVKKHESKLQSDFEKYLGKIGKKKDKFNKEIEEKLANFETMIKKSNNTAIEFEKTTKGEIETANKEYEEREAKAVEQHATDKETIEKNHEELLATKKQELEDAKTGQETATQEIEELKDKKTELDDKNSELADKIEQLTAQLNTELAKLDDLKANHKEHQDSIDANLTKKKELDDNLTIIRKDLSDKKEKHKGLSAEVGVLAGSAAAYAARLTSLHSDKEDRAKRLAEAKDKHASWLKEKRELAEQTARDHERKRLEATHEYETQKHLEELERQKQKEELERKEKEEAEERERQAKIEAEERERKEKEEAEEKARLEKEQAEKEAKEKELKEQQEKEEAQKKKNDVEYQVSQAILSRETDQKKFEEERAESERIYNERKAKEKEETDRLLKEIEDLKAEKEKAAELEREEAEKVAQAKLAQIEKLKQEHEAKTKLFNDKLEFENLQKQRLEEEVANLKKIRELREEKARLASEQYKDPELERVKKLIQERELEVDKLTKVIEFEKPEQTSSEGGHFLGISNDSKSGAIPVIKSKDVVVGNNENSHSKSVNTGNEAKTENESDDKKKDHHYGGAALGIAGGILAAAGAGALAAGSAGKNAVSGIASGVSNAVPSGNKDVQLPSNGSGTQGNTTTSAPGQSQSSSPLATTTEPSGSAASIPTSSNTSTISSKKNAASVTPTPVEAQRTNSLSDKFKGWGRKLSKKDKSKDVNSAAGETTAETGVIAKDDDKPVGGITALDAEKNTVVARDAKPIGGVTALDAEKNTVVARDTKPIGGINANDIEEKPSVGIFVSKNVSSNKTSTDADDESFEIQSVYEVVSDSEYEANKHNPNYFEVSPEEFEKHKNLENKVVLIEKISE

SEQ ID NO: 8239 - protein, 326 aa, Corynebacterium efficiens YS-314
MGLRYIWHIEGATPMAVIPGTDFDIFPLNLGGNTFGWTTDEQQSFAVLDAFREAGGNFVDTADMYSVWAEGNAGGESERVLGAYLRARGGADDLIIATKSGALEPHTGRTRTATTAAVDASLTRLGVDTIDIFYHHHDDDSVSIGEQIAIAEDLIAAGKIRHLALSNYSPQRLREFFEQSADSPARPVAVQPQYNLLARRDYETGIRPVVDEFGPAVFPYFALASGLLTGKYSSRADLEGRARQGFAEGLATDDAFVVVNELRAVAGELGAAPATVALAWLLARGVTAPIASATRVDQLPDLMAAPTLVLDDAHLTRLDNASAAFA

SEQ ID NO: 8240 - protein, 168 aa, Zea mays
MAASSTATSVHDFIVKDASGKDVDLSTYKGKVLLIVNVASQCGLTNSNYTELAQLYEKYKDQGFEILAFPCNQFGGQEPGTNEEIVQFACTRFKAEYPIFDKVDVNGSNAAPIYKFLKSSKGGLFGDSIKWNFSKFLVDKEGRVVDRYAPTTSPLSIEKDIKKLLGSS

SEQ ID NO: 8241 - protein, 92 aa, Oxalis spiralis
GINISGTNGEVMPGQWEYQVGPSVGIEAGDHIWASRYILERITEQAGVVLTLDPKPIDGDWNGAGCHTNYSTKSMRDEGGFEVIKKAILNLS

SEQ ID NO: 8242 - protein, 169 aa, Leavenworthia stylosa
NTEIVGMIHDGESRFSIKGKPIHHFLGTSTFSEYTVVHSGQVAKINPEAPLDKVCIVSCGLSTGLGATLNVAKPKKGQSVAVFGLGAVGLGAAEGARIAGASRIIGVDLNSNRFEQAKKFGVSEFVNPKEHDKPVQQVIAEMTNGGVDRSVECTGSVQAMIQAFECVHD

SEQ ID NO: 8243 - protein, 293 aa, Nostoc punctiforme
MAITQNYRLNVIQWYPGHIAKAEKKLKEQLKRVDVVFEVRDARIPLATHHPQIGEWVEGKTRVLILNRVDMITPQMRSLWIDWFKRQGEVPYFTNAQHGKGIAEVARAAQAAGVELNQRRSDRGMLPRPVRAVVIGFPNVGKSALINRLLGRRVVESAARPGVTRQLRWVRISEHLELLDAPGVIPLRLEDQDAALKLAICDDIGEASYDNQLVAAALVDLFNYLEAVTTDLLPKKPLQSRYQLDSTSDTGDTYLHALAEHRYKGDVERAARQLLTDFRKGLLGEMSLELPPN

SEQ ID NO: 8244 - protein, 271 aa, Triticum aestivum
MSPSLDLPPKGGFSFDLCRRNAMLQNKGLKAPTFLKTGTTIVGLVFQDGVILGADTRATEGPIVADKNCEKIHYMAPNIYCCGAGTAADTEAVTDMVSSQLQLHRYHTGRESRVVTALTLLKKHLFNYQGHVSAALVLGGVDITGPHLHTIYPHGSTDTLPFATMGSGSLAAMSVFESKYKESLSRDEGIKLVVEAICAGIFNDLGSGSNVDVCVITKGHKEYLRNHLLPNPRTYVNPKGFDFPKKTEVLLTKITPLKEKVEVIEGDAMEE

SEQ ID NO: 8245 - protein, 351 aa, Streptococcus agalactiae 2603V/R
MRAATYLSANELSLTDKAKPQVIKPTDAVVRLVKTTICGTDLHILGGDVPACKPGTTLGHEGIGIVEEVGSAVNHFKVGDKVIISCVTACNTCYYCKHQLPSHCEDGGWILGHLIEGTQAEYVHIPHADGSLYHAPEGVCDDALVMLSDILPTSYEIGVLPSHIKPGDTVCIVGAGPIGLSALLTAQFYSPAKIIMVDLSQKRLEASKKFGATHTILSTSTQEVKEEIDKITKGRGVDVVLECVGYPATFDICQNVVSIGGHIANVGVHGKPVEFNLQDLWIKNITLNTGLVNANTTEMLLEVLETGKIDATQLVTHHFKLSEIEEAYKVFKAAEENNTLKVIIENDITPA

SEQ ID NO: 8246 - protein, 189 aa, Leptospira interrogans serovar lai str. 56601
MKEGASFMYSKYFIWFMTLGIFLPLAGIFAKGSFYDFKVKDIKGNEVSLSKYKGKVVMVVNVASKCGYTYQYEHLEKVYKKYKDQGFAVVGFPANNFGGQEPGTDQEIETFCRIQKGASFDMMSKISVKGKDIHPLYSYLIQNSPNPGEVEWNFEKILISKNGTIEARYRSSVEPDSSAVTQKIETLLK

SEQ ID NO: 8247 - protein, 196 aa, Lycopersicon esculentum
QAPGEDSEVILYPQAIFKDPFRRGNNILVMCDAYTPAGEPIPTNKRHAAAKVFSHPDVAAEETWYGIEQEYTLLQREVNWPLGWPIGGFPGPQGPYYCGTGADKAFGRDIVDAHYKACLYAGINISGINGEVMPGQWEFQVGPSVGISAGDEVWVARYILERIAEIAGVVVSFDPKPIPGDWNGAGAHTNYSTKSM

SEQ ID NO: 8248 - protein, 303 aa, Zea mays
MQIAGFNVHYRVGWFKKTKKKKKQAPQQLLRSSLSRVAPHRILRFEALCSQGTMAKNYPTVSAEYSEAVEKARRKLRALIAEKSCAPLMLRLAWHSAGTFDVSSRTGGPFGTMKCPAELAHGANAGLDIAVRLLEPIKEEFPTLSYADFYQLAGVVAVEVTGGPEIPFHPGREDKPQPPPEGRLPDATKGSDHLRQVFGKQMGLSDQDIVALSGGHTLGRCHKERSGFEGAWTTNPLVFDNSYFKELLSGDKEGLLQLPSDKALLSDPVFRPLVEKYAADEKAFFDDYKEAHLKLSELGYADA

SEQ ID NO: 8249 - protein, 368 aa, Malus x domestica
MGKGGQSCNGVVRDAKPVEQENMAVWLVDVNTIKILPFKLPAIGPNDVRIRIKAVGICGSDIHYLKTMKCGDFQVKDPMVIGHECAGIVDKVGSKVKHLVPGDRVAVEPGISCAHCQQCKGGRYNLCFDMKFFATPPVHGSLANQIVHPADLCFKLPENVSLEEGAMCEPLSVGVHPFRRANVGPETTVLIVGAGPIGLVSVLAARAFGAPRIVIVDMDDRRLAMAKSLGPDGTVKVSTKMEDLDDELAKIKEAMGSEVDVTFDCVGFNKTMSTGLNATRPGGKVCLVGMGHGVTTVPLTPAAAREVDVVGVFAYKNTWPLCLEFLRSGKIDVKPLITHRFGFTEKEVEEAFATSARGGNAIKVMFTL

SEQ ID NO: 8250 - protein, 300 aa, Oryza sativa
MGRGKIEIKRIENKTSRQVTFCKRRNGLLKKAYELAILCDAEIALIVFSSRGRLYEFSNVNSTRSTIERYKKASASTSGSAPVIDVNSHQYFQQEAAKMRHQIQTLQNANRHLIGESIGNMTAKELKSLENRLEKGISRIRSKKHELLFSEIEYMQKREADLQNENMFLRAKVAEAERAEHDDQQAAEDDEMAPAPAVGGGSSSGTELEALPATFDTREYYQPAPPVSMLAAAAAAAAAQYSSDHHQTALHLGYFKAASSRSIAMDANIACIRSNYTVFRKSDDDEDDNNYCGIVRIVRW

SEQ ID NO: 8251 - protein, 336 aa, Coxiella burnetii
MQIDPSVLCYGLGINDSARIFGTTTGLVEEFGEDRVFDMPTAENAMTGVGIGLAINGFRPVLSHCRLDFALLSLDQIINGAAKWYSLFAGTMPVPLTIRAIVGRGWGQGPTHCQSLQACFAHIPGLKVVMPSLAEDAYGLLLSSIFDDNPVIFIEHRWLHNIHVNEAEDSYRYLPLGQARKVIEGTDITVVAMSYMTIEALHAVKFLKTQGIHCELIDLRTIKPLDWETIYVSIRKTGRLLVLDTGFEFCSVASEIIAKASIDCFSSLLAPPKRLATPDYPVLTSPTLATPMYTYSDGIVRAVAEVLKLPVNVESLQKERDAKPRDVPGDWFGGPF

SEQ ID NO: 8252 - protein, 481 aa, Oryza sativa (japonica cultivar-group)
MAGGGGNSLPSPSCGDDKKRRVCYYYDPGISTVDYGEGHVMVPHRVTMAHNLVAAYGMLGDMRRLRTAPATAAELADFHDEGYLALLQDLTPDGCGGDDGVGDMARARGIYAVEGKGGGRGVDNPVFDRLWDYCLRYSGGSLAAARTLGSGTADIAINWSGGMHHACRGGARGFCYVNDIVLAIRELLAHFRRVLYVDIDVHHGDGVQAAFEASNRVMTVSFHQHGGGFFPGSGAVADVGKKGPGRYCALNVPVSVGIGDEEYHRLFEPIMARVMEVFQPEAVVLQCGADSLAGDRLGELNLTTRGHAQCVSFIRSFNLPLLLLGGGGYTINHVASCWCNETAVAIGKEIPNDIPKHGFDVFYKNQEYKLHYKLETKHLHRNRNTANSIDGIRMAAMENLSKLKLEAAASVQFEERRHRSINVGDLYYDPREQEEEEESPTARLHRKLYFEPTGDQESPYTKHRCNVQPGESSSRKQRKLK

SEQ ID NO: 8253 - protein, 324 aa, Nicotiana plumbaginifolia
PGCDSAVEYDLGSGSYDVTCCCSFSFCWNCTEEAHPPVDCDTVAKWILKNSAESENMNWILANSKPCPKCKRPIEKNQGCMHMTCTPPCKFEFCWLCLGAWSDHGERTGGFYACNRYESAKQEGVYDEAERRREMAKNSLERYTHYYERWATNQSSRQKAMADLHQMQTVHLEKLSEIQCQPESQLKFILESWQQIVECRRVLKWTYAYGYYLPEHEHAKRQFFEYLQGEAEAGLERLHQCAEKELQTYLNATGPSKDFNDFRTKLAGLTSVTRNYFENLVRALENGLADVDSQGACSKAPSSKNVAGSSKAKGGGRGKSSTRT

SEQ ID NO: 8254 - protein, 775 aa, Schizosaccharomyces pombe
MSTISEVGPWELGLSLGSGGPNSSRLAKHRETGQLAVVKPIVGWSELTSSQQARIEGELVLLRLIEHPNVLQLIDVISAQEQLFVVVEYMPGGELFDCMLRKGSFTEQDTAKFLWQILCGLEYCHKLHICHRDLKPENLYLDAHGSIKIGEFGMASIQQPGKLLQTSCGSPHYASPEIIMGRSYDGCASDIWSCGIIFFALLTGKLPFDDDNIRSLLLKVCQGQFEMPSNISPQAQHLLYRMLDVDSSTRITMEQIREHPFLSCFVHPNISIPIISAPIQPIDPLIVQHLSLVFRCSDDPMPLYEKLASQSPLVEKTLYTLLSRHLHPPSSAAVDRNRAVVDDLLGTAASNGQQMDEEEIEQAINIPTLAPYPISYAAESVPRPATSASPFLTPVTTSGTFNYSFNATNPQSILQRPATTSSAVPQLPKSVTPGLAYPHDSSMLSSNYRPPSALSPRNFNVSINDPEVQLSRRATSLDMSNDFRMNENDPSIVGNLAASNFPTGMGPPRKRVTSRMSEHTGNRVVSFPRGSAFNPRVTRFNVGNEQFSNNIDNNNYNQPYANATMNNSRRLRTPSGERSMRADLSQSPASYDSLNVPKHRRRQSLFSPSSTKKKLSGSPFQPKRSFLRRLFSSEPSCKCVYASLVASELEHEILEVLRRWQLLGIGIADIIYDSVSASISARIKRQNSLNLKPVRFRISVLAEFFGSQAVFVLESGSSTTFDHLATEFQLIFEDKGFLDNLELSYFQASASRPVSRMSVSSSPFAVFRQRQSVQS

SEQ ID NO: 8255 - protein, 352 aa, Zinnia elegans
MAFIFSSKKTSLLFLFVSILACSALAHEFSILGYAPEDLTSIHKVIHLFESWLVKHSKFYESLDEKLHRFEIFMDNLKHIDETNKKVSNYWLGLNEFADLTHEEFKHKFLGFKGELAERKDESSKEFGYRDFVDLPKSVDWRKKGAVAPVKNQGQCGSCWAFSTVAAVEGINQIVTGNLTMLSEQELIDCDTTFNNGCNGGLMDYAFAYVMRSGLHKEEEYPYIMSEGTCDEKKDVSEKVTISGYHDVPRNDEASFLKALANQPISVAIEASGRDFQFYSGGVFDGHCGTELDHGVAAVGYGTTKGLDYVIVRNSWGPKWGEKGYIRMKRGSGKPHGMCGLYMMASYPTKQK

SEQ ID NO: 8256 - protein, 193 aa, Calamus usitatus
TVVHSGCVAKINPLAPLDKVCVLSCGISTGLGATLNVAKPPKGSTVAIFGLGAVGLAAAEGARIAGASRIIGVDLNPARFDTAKKFGVNEFVNPKDYERPVQQVLAEMTGGGVDRSIECTGNVNVMISAFECVHDGWGIAVLVGVPHKEAVFKTHPINFLNERTLKGTFFGNYKPRTDLPSVVEKYMSKVLEV

SEQ ID NO: 8257 - protein, 218 aa, Ralstonia solanacearum
MTTRDLFADHAPADDRRIALGEAAVVLRGFALAEATALLAAIDDIARQAPFRHMVTPGGFEMSVALTNCGALGWTSDRRGYRYAARDPQTGQPWPPLPDCFLRLARDAAAAAGFPGFTPDACLINRYVPGARLSLHQDKDEQDYGAPIVSVSLGMPAMFLWGGHRRTDKTLRVPLFHGDVVVWGGPDRLRYHGVLPLKEAAHPLLGAQRINLTLRRAG

SEQ ID NO: 8258 - protein, 326 aa, Lactococcus lactis
MTVLVLGGAGYVGSHAVDMLVNRGYDVAVVDNLVTGHREAVSEKVRFYEGDVRDHAFLASVFEKENIEGIMHFCAYSLVGESMQKPLMYFNNNVGGAQVILETMEEFGVKHIVFSSTAATFGIPEESPISEKTPQKPINPYGESKLIMEKMMKWQSQATDMTYVALRYFNVAGAKDDGSIGEAHKNETHLIPIILQTALGQREFITIYGDDYQTPDGTCIRDYIDMEDLIEAHIKALEYLKSGGKSDQFNLGSSKGYSNLEVLETARKVTGKEIPSQMGERRPGDPDELVADSTKAGEILGWKVKNDLEHIITNAWEWHQSHPKGY

SEQ ID NO: 8259 - protein, 466 aa, Yersinia pestis KIM
MMSDQQEGAELKRGLKNRHIQLIALGGAIGTGLFLGIAQTIKMAGPSVLLGYAIGGFIAFLIMRQLGEMVVEEPVAGSFSHFAYKYWGHFAGFASGWNYWVLYVLVAMAELTAVGIYVQYWWPEIPTWVSAAVFFLAINAINLANVKVYGEMEFWFAIIKVIAIIAMILFGGYLLISGRGGPEATVTNLWAQGGFFPNGIMGLVMAMAVIMFSFGGLELVGITAAEAEDPAKSIPKATNQVIYRILLFYIGSLAILLSLYPWGKVVEGGSPFVLIFDALDSNSVATVLNIVVLTAALSVYNSCVYCNSRMLFGLAKQGNGPKILLKVDGRGVPVIAIAVSAFATAFCVLINYLLPGRAFELLMALVVSALVINWAMISLAHLKFRAAKNRQGVIPKFKAFWYPFGNCLCLLFLTGILVIMFLTPSIRISVILIPVWVVVLAIGYILKNQSQRQNQQLSASSRKVTK

SEQ ID NO: 8260 - protein, 345 aa, Thermus thermophilus
MKVAVLPGDGIGPEVTEAALKVLRALDEAEGLGLAYEVFPFGGAAIDAFGEPFPEPTRKGVEEAEAVLLGSVGGPKWDGLPRKISPETGLLSLRKSQDLFANLRPAKVFPGLERLSPLKEEIARGVDVLIVRELTGGIYFGEPRGMSEAEAWNTERYSKPEVERVARVAFEAARKRRKHVVSVDKANVLEVGEFWRKTVEEVGRGYPDVALEHQYVDAMAMHLVRSPARFDVVVTGNIFGDILSDLASVLPGSLGLLPSASLGRGTPVFEPVHGSAPDIAGKGIANPTAAILSAAMMLEHAFGLVELARKVEDAVAKALLETPPPDLGGSAGTEAFTATVLRHLA

SEQ ID NO: 8261 - protein, 140 aa, Oryza sativa
CLESFILYTDHFSECVERHAYSTYDKFIKLHEDELKKLPAPEAALNYYLNEDLYLFDEFQTARVPCSRRPKIDNLYDVFVNIRDDEAEHCKTMKACQTHGNLRSPHSMQKCLETDTECVIPEDDCEGIVDCVKKSLVSKE

SEQ ID NO: 8262 - protein, 199 aa, Zea mays
MRRESRGGRCDTGAGKMNRKPGDWDCRACQHLNFSRRDICQRCSEPRGVADRGGGGGGGGDYASFGGRGGSSFGGGFGAAGSDVRPGDWYCSCGAHNFASRSSCFKCSAYKEEVAVNSGAGGFDGDMSRSRGYGFGSGAAGAGAGAARTTNRPGWKSGDWICTRSVCNEHNFASRMECFRCNAPRDSGSAAMTYENYLH

SEQ ID NO: 8263 - protein, 353 aa, Sphingomonas elodea
MQQQTFLVTGGGFIGSAVVRHLVRQGARVINLDKLTYAGNPASLTAIENAPNYRFVHADIADTATILPLLREEQVDVVMHLAAESHVDRSIDGPGEFIETNVVGTFKLLQSALQYWRELEGEKREGFRFHHISTDEVFGDLPFDSGIFTEETPYDPSSPYSASKAASDHLVRAWGHTYGLPVVLSNCSNNYGPFHFPEKLIPLTILNALEGKPLPVYGKGENIRDWLYVDDHAKALATIATTGKVGQSYNVGGRNERTNLQVVETICDLLDQRIPLADGRKRRELITFVTDRPGHDRRYAIDATKLETELGWKAEENFDTGIAATIDWYLENEWWWGPIRSGKYAGERLGQTA

SEQ ID NO: 8264 - protein, 250 aa, Zea mays; identical to SEQ ID NO: 2829

SEQ ID NO: 8265 - protein, 609 aa, Arabidopsis thaliana
MGCLRSLVRRKQFDSSNGKAETHHHHQQLAKALTFPHLIAIGVGSTIGAGVYILVGTVAREHSGPALALSFLIAGISAALSAFCYAELSSRFPSAGSAYHYSYICIGEGVAWLIGWALILEYTIGGSTVARGISPNLAMIFGGEDCLPTILARHQIPGLDIVVDPCAAVLVFIVTGLCCLGVKESTFAQGIVTTANVFVMIFVIVAGSYLCFKTGWVGYELPTGYFPYGVDGMLTGSATVFFAYIGFDTVASMAEEVKNPRRDLPLGIGISLLLCCLLYMMVSVVIVGLVPYYAMDPDTPISSAFSSHGIQWAAYLINLGAVMALCSALMGSILPQPRILMAMARDGLLPSYFSYVNQRTQVPINGTITTGVCAAILAFFMDVSQLAGMVSVGTLVAFTMVAISLLIVRYVVPPDEVPLPSSLQENSSSHVGTSIRSKQPLLGKVDDSVVDKENAPGSWVLNKKNRRKFAGWSIMFTCIGNFLLSYAASSFLLPGLLRYSLCGVGGLFLLVGLIVLICIDQDDARHSFGHSGGFICPFVPLLPIVCILINMYLLVNLGAATWVRVSVWLFLGVVVYIFYGRRNSSLVNAVYVSTAHLQEIRRTSGHSLA

SEQ ID NO: 8266 - protein, 425 aa, Zea mays
  unsure (1)..(425): unsure at all Xaa locations
MAAAAAAAAFDAYTDKTAVFRRLKAKPENKMCFDCNAKNPTWASVTYGIFLCLDCSAFHRSLGVHITFVRSTNLDSWTPDQLKMMAFGGNNRAHAFFKQHGWTEGSGKVDSKYTSRAAELYRQILQXKEVAKSAITDNALPSSPVTASEASKPPSDDFPEFKLPDVPAPPAENLNGKHEPKSPRAAPHSPKAATHPTFATSVKKPIGAKKVGGKTGGLGVRKLTTKPNESLYEQKPDEPKPAVPALAASTNKGGQALHSRFEYVENEPSADSRTGGSVSRVSGHVAPPKSSDFFQEYGMGNGFQKKSSNASKTQVEETDEARKKFSNAKAISSSQFFGTQNRXEEKEAQLSLQKFAGSSSISSADLFGRNDADXSNLDLSAADLINRISFQASQDLSSLKDIAGETGKKLTSLASNFISDLDRIL

SEQ ID NO: 8267 - protein, 502 aa, Triticum aestivum
  unsure (1)..(502): unsure at all Xaa locations
MSEQGAGQGTKEQSVPATVRSREISLSGQGAGQGTKEERLAEVEELELQTDHQGVLAILPSYAGKTVLELGAGIGRFTGELAKEAGHVIALDFIDSVIKKNEEINGDIYKNITFMCADVTSPELKIEDNSIDIVFSNWLLMYLNDEEVEKLIGRIVKWLKPGGHIFIRESCFHQSGDSKRKVNPTHYREPRFYTKVFKECHSYDQDGNSFELSLVTSKCIGAYVKSKKNQNQICWLWEKVKCTEDKGFQRFLDNVQYKSTGILRYERVFGEGYVSTGGFETTKEFVDKLDLKAGQKVLDVGCGIGGGDFYMAETYDVHVLGIDLSINMVSFAIERAIGRSCSVEFEVADCTTKEYAENTFDVIYSRDTILHIQDKPALFRNFFKWLKPGGKVLISDYCRSPGTPSEEFAAYIKQRGYDLHDVKTYGKMLEDAGFHDVVAEDRTDQFLRVLERELGETEKNKEAFLAXDFTQEDYDDIVNGWSAKLKRSSAGEQKWGLFIATK

SEQ ID NO: 8268 - protein, 219 aa, Triticum aestivum
SRARGSPGLRAGPPGRAPRHPARRNQSTQLKRKWQQAGQGAQPTKKPAAEVTLRLFGLADVDAMMAWASDPQVAAPCRWEPYESTEPLLAFIHDAVLPHPWFRAICLAGDDDRPVGAISVSPTDDACRAELGYVLARAHWGKGVATAAVRRAVAAVFGEVEGLQRVEALVDVANVASQRVLEKAGFRREAVLRRYCVLKGAVKDMVIFSFISTDTVLVD

SEQ ID NO: 8269 - protein, 329 aa, Botryotinia fuckeliana
MDGQKIKRSKNIMAQSTYQSVVLAKRPTGQIVPGETFEKKENPMVTEADLKDDQVLVEVLYLSLDPAMRDRRSYVPPVQIGEVMRGVSIGKVIASKSSKFNVGDYASGITGWKEVAIMASKDLTPIELPPNGKLTDALGVLGMTGLTAYFGILEVGKIKAGDFVVVSGAAGATGSVVCQIAKLKGAKVLGLAGSDDKVQWLKELGCDDALNYKDKEFPSKFKAATPNFIDVFFDNVGGEILELALSRAKPFSTFVMCGAISQYNSDTPVGPKNFSMIIAMRIRLQGFIVFDYASKYAEARKEMSQWLAEGKLQRKETIVKGGLGVAEKA

SEQ ID NO: 8270 - protein, 63 aa, Aureococcus anophagefferens
MRGILVDWLVEVHLKFKMLQPTIYLTVQIIDRYLSAKQIDRNQLQLLGVAALFIASKYEEIYP

SEQ ID NO: 8271 - protein, 375 aa, Azotobacter vinelandii
MEKTIMTSVAKESISTRRLNNIPKTMKAVMAYAPGDYRLEEVAVPKAGPGEIIAKVEACGICAGDIKSFGGAPSFWGDETQPAYIKAPMIPGHEFIAHIVELGKGVEGYELGDRVISEQIVPCWNCRFCKRGHYWMCQKHDLYGFQNNVNGAMAEYIRFTKESINYKVPRDLPIEKAVLIEPYACSMHAVQRAQIQFGDVVVLAGAGTLGLGMIGAAKKAGPGKLVVMDLFEDRLELAKKFGADLVINPAKEDPVARIKEITDGYGCDVYIEATGHPKSVEQGLSMIRNLGRFVEFSVFKDPVTVDWSIISDRKELDVLGAHLGPYCYPLVIEGIADGSLPTEGVVTHNFPLERFMDGFKLAMSGKDSLKVILTP

SEQ ID NO: 8272 - protein, 419 aa, Brassica oxyrrhina
YHHSYTFFFVILVLFPHAFSTNNLSSNETLTISSNRTLVSPGDVFELGFFKTTTRNSQDGGDRWYLGIWYKTTSDQRTYVWVANRDNPLHNSIGTLKISHSNLVLLDQSDTPVWSTNCTGVVQSPVTAELLANGNFVLRDSKTKDLNRFIWQSFDFPDDTLLPEMKLGRKLNSPENKKILTSWKSPTDPSSGDYSFILETEGFLHEFYLLQNEFKVYRTGPWNGVRFNGIPKLQNWSYITNNFIDNKEEVAYTFHVNKNHNIHSRFRMSSTGYLQVITWTKTVPQRNMFWSFPEDSCDPYKVCGPYAYCDMHTTPTCNCIKGFVPKNEAAWALRDMSGGCVRSSGLSCGEGDGFLRLGQMKMPETSEAFVDKRIGLNECKEKCVRDCNCTGFANMDIMNGGSGCVTWTGELVDMRNYDA

SEQ ID NO: 8273 - protein, 190 aa, Xylella fastidiosa 9a5c
MHTHVSHAFASKLSLLSLDRFPMSSIYTFTFTRLDGRPQALADWRGQVLLLVNVASRCGFTPQYAGLEMLWQRYRDAGLIVIGFPCDQFAGQEPGDEAKIAEFCTLNYGVDFPMAAKIKVNGADAHPLWQWLKHRRRGLFGMAAIKWNFTKFLIGRNGQPIARYSPIKSPEQLEVHIVRALGEEGGGNTH

SEQ ID NO: 8274 - protein, 338 aa, Haemophilus influenzae Rd
MAILVTGGAGYIGSHTVVELLNVGKEVVVLDNLCNSSPKSLERVKQITGKEAKFYEGDILDRALLQKIFAENEINSVIHFAGLKAVGESVQKPTEYYMNNVAGTLVLIQEMKKAGVWNFVFSSSATVYGDPKIIPITEDCEVGGTTNPYGTSKYMVEQILRDTAKAEPKFSMTILRYFNPVGAHESGLIGEDPNGIPNNLLPYISQVAIGKLAQLSVFGSDYDTHDGTGVRDYIHVVDLAVGHLKALQRHENDAGLHIYNLGTGHGYSVLDMVKAFEKANNITIAYKLVERRSGDIATCYSDPSLAAKELGWVAERGLEKMMQDTWNWQKNNPKGYRD

SEQ ID NO: 8275 - protein, 360 aa, Schizosaccharomyces pombe
MAPAEKAFVLRKKMDTAIEDRPGQTLTDDHQVKVAIKATGICGSDVHYWKEGGIGDFILKKPMILGHESAGVVVEVGKGVSSLKPGDPVAVEPGCVCRLCDYCRSGRYNLCPHMEFAATPPYDGTLRTYYITTEDFCTKLPKQISVEEGALFEPMSVAVHAMTRGNLKCGSRVLVMGCGTVGLLMMAVAKAYGAIDIVAVDASPSRVEFAQKYVGAKPFTPIAAKENESLPDYAQRYKQAIIEKYGEFDFAVDATGVGICIHTAVLALKRGGTFVQAGNGKPVIDFPINHIINYEINVLGSFRYAHGCYKQSLFLVSNGLVDVKPLITHRFAFKDALKAYETVASGEEGVLKVIIGGPDA

SEQ ID NO: 8276 - protein, 367 aa, Mesembryanthemum crystallinum
MAYNKCNTLLLVSLALLAMIVGLSEGIDFTDKDLESDETLWDLYERWRSVYTSARSFGEKQNRFHVFKENVKYINEVNKMDKPYKLRLNQFGDLTPSEFARTYANSKIIEGTRNESGGFMYENVEVPRSIDWRVKGAVTPVKNQGRCGGCWAFSAAAAVEGINQITTGQLISLSEQQLIDCDTQNSGCRGGTMGRAFEYIKQRGGITSEANYPYKAQAGMCKNNLIQRPTVSIDGYYNIRRSEDAVLKILAHQPVSVAVDATTWSSLDWMFYFQGVFTGPCGTKLNHGVTAVGYGTTNDGYDYWIIKNSWGETWGERGYMRMLRGVSPYGLCGIAMQASFPIKRVSAGKAKFEPKRLIDLLVYVLNA

SEQ ID NO: 8277 - protein, 349 aa, Thermus thermophilus
MKVAVLPGDGIGPEVTEAALKVLRALDEAEGLGLAYEVFPFGGAAIDAFGEPFPEPTRKGVEEAEAVLLGSVGGPKWDGLPRKIRPETGLLSLRKSQDLFANLRPAKVFPGLERLSPLKEEIARGVDVLIVRELTGGIYFGEPRGMSEAEAWNTERYSKPEVERVARVAFELARKRRKHVVSVDKANVLEVGEFWRKTVEEVGRGYPDVALEHQYVDAMAMHLVRSPARFDVVVTGNIFGDILSDLASVLPGSLGLLPSASLGRGTPVFEPVHGSAPDIAGKGIANPTAAILSAAMMLEHAFGLVELARKVEDAVAKALLETPPPDLGGSAGTEAFTATVEAFTATVGI

SEQ ID NO: 8278 - protein, 366 aa, Mycobacterium leprae
MATLAESPEPKSGASRAGVLGEEAGYHKGLKPRQLQMIGIGGAIGTGLFLGAGGRLAKAGPGLFLVYAVCGVFVFLILRALGELVLHRPSSGSFVSYAREFFGEKAAYVVGWLYFLDWAMTAIVDTTAIATYLHRWTIFTALPQWTLALLALAVVLVMNLISVEWFGELEFWAALIKVCALMAFLVVGTIFLGGRYPVDGHNTGLSLWTSHGGLFPTGVAQLIVVSSGVMFAYAAVELVGTAAGETVEPKKIMPRAINSVIARIAIFYVGSVILLALLLPYSAFKASESPFVTFFSKVGFYGAGDLMNIVVLTAALSSLNAGLYATGRVMHSIAINGSGPKFTARMSKNGVPYGGILLAAVICLCG

SEQ ID NO: 8279 - protein, 459 aa, Fusobacterium nucleatum subsp. vincentii ATCC 49256
MESNQKMKFWSIVLLTINSIIGTGIFLSPGAVAKLVGDKAAIIYLAAAVFAAVLAVTFAAASKYVVKSGAAYAYAKAGFGDEVGSYVGITRVVSASIAWGVMATGVVKTTLSIFGQDSSNMKNVTIGFITLMLILLIINLIGTKLLTIISNISTIGKMGALGITIIAGIFILIFSGGNHIEELNLLKDAEGNNLIPEFTTSVFVTALIGAFYAFTGFESVASGSADMEKPEKNLPRAIPLAIAIIAAIYFGIVFVSMYIDPVAMVTSKDPVVLASIFKNQLLQKIIVIGALMSMFGINVAASFHTPRVFEAMAKEKQVPEFFAKRTKGGLPLTSFILTAAIAVVIPLAFNYNMAGIIIISSISRFIQFIIVPLAVIVFFYGKSKEEVLNANKNFMIDVVIPIIALLLTILLLIKFNWVQQFSTKLDDGTTTINLKAVISMIIGYLILPIILRIYMRAKK

SEQ ID NO: 8280 - protein, 358 aa, Cryptococcus neoformans var. neoformans
MSQLIATKRVDLLAPYLALDQGSRVQAEYIWIDAEGGIRSKTMTLDKAPSSVADLKEWNFDGSSTNQAPADNSDVFLRPVAIFKDPFRGGANILVLCECYDNDGTPNKSNYRAHCKKVMDAAKDTEPWFGLEQEYTLFDADGQVFGWPKNGFPGPQGPYYCGVGAGKVFARDFIEAHYRACLYAGIKISGINAEVMPSQWEFQVGPCTGIEMGDHLWMPRFLLLRIGEEWGITPSLHPKPLKGDWNGAGCHSNYSTKDMRTPGKGMAAIEDAIKKLEKKHLEHIAVYGEDNDLRLTGKHETASMTTFSAGVANRGASIRIPRHVGAQGYGYLEDRRPASNVDPYRVTAILVETTVLNN

SEQ ID NO: 8281 - protein, 205 aa, Gossypioides kirkii
CKGYTPLFPRILGHEASGIVESVGEGVNDLKPGDHVLPIFTGECKECRYCLSEESNNMCELLRINCDRGVMLADGKTRFSINGKPIYHFVGTSTFSQYTVVHVGQVAKISPTAPLDKVCPISCGICTGFGATVNVAKPKKGQTVAIFGLGAVGLAAAEGARVCGASRIIAVDLNPRRFEEAKRFGITEFVNPKDYDKPVQEVIVE

SEQ ID NO: 8282 - protein, 78 aa, Zea mays
MDSSSGSQDKKFRDNDRPEAKEANSTAQHLVDFTEAEEDLVSRMHRLVGNRWEIIAGRIPGRTAEEVEMFWSKKYQER

SEQ ID NO: 8283 - protein, 359 aa, Neurospora crassa
MPELPASLKESVENSKCEYRQLGKSGLRVSVPIFGCMSFGDRRTLDWAIEEDEALPLLKAAYDRGLNTWDTANVYSNGTSEIIVGKALKKYAIPREKVVILTKCWGAVGETPDLRSFFFPSQIAASKDYVNQHGLSRAAILNAVEASLRRLDTPYIDLLQIHRFDPNTPIEETMKALHDLVQSGRVRYIGASSMWATQFAQMQFCAEKNGWTKFISMQNQYNLLYREEEREMIRFCNDTGVGLIPWAPLCRGHLARRPDQFGRTKRSQGEKEAQPGSHGTVEPDLTIINRVVEIADKHEWPISHVALAWIAKRVISPIIGFSSVERLEEAITARGKVLTVEEEKYLEEMYKPKAIHGHT

SEQ ID NO: 8284 - protein, 351 aa, Zea mays
  unsure (1)..(351): unsure at all Xaa locations
MYGWEMLSFNIHDGSLEAIVRGNRSGLLTAADYNILCQCETLDDIKMHLTATEYGPYLQNEPSPLHTTTIXEKCTLKLVDEYKHMLCQATEPLSTFLQYITYGHMIDNVVLIVTGTLHERDVNELLEKCHPLGMFDSIASLAVAQNMRELYRLVLVDTPLAPYFSECITSEDLDDMNIEIMRNTLYKAYLEDFYKFCQKLGGATAEIMCDLLSFEADRRAVNITINSIGTELTRDDRRKLYSNFGLLYPYGHEELAVCEDVDQVRGAMEKYPPYQSIFSRISYGESQMLDKAFYEEEVKRLCLSFEQQFHYAVFFAYIRLREQEIRNLMWISECVAQNQKSRVHDSVVFIF

SEQ ID NO: 8285 - protein, 70 aa, Glycine max
NSYAGQDSRDKVHDLKNYAGLFSMPDRKAQEIKTSPGIMWLMNAKARSPVPLKILSIEDGTGSEACSTTP

SEQ ID NO: 8286 - protein, 164 aa, Pseudomonas fluorescens PfO-1
MRTMSDNLLNIPCTTIKGEQKTLADFAGKAVLVVNTASKCGFTPQYKGLEELWQTYKDQGLVVLGFPCNQFGKQEPGNEGAISEFCELNYGVSFPLFKKIEVNGTGAHPLFVQLKKRAPGVLGSQGIKWNFTKFLIGKDGQLVKRFAPATKPQDLSREIEALLK

SEQ ID NO: 8287 - protein, 63 aa, Atriplex garrettii
PRPNIGIHRFAFILFKQNRRDSVNPPCNRDRFCTRKFAEENQLGLPVAAVYFNCQRETTARRR

SEQ ID NO: 8288 - protein, 154 aa, Glycine max
  unsure (1)..(154): unsure at all Xaa locations
MRSDPENPAASETEEDDDEVSPIEEVRLSVSNTDXDPTRPVWTFRMXFFAYHTERIIITQITVQVATLPIGHFMAALLPKTTFSIPGFGSKSFSFNPGPFNMKEHVLITIFANAGSAFGDGSPYAVGIVNIIKAFYGRSVSFVASWLLIVTTQA

SEQ ID NO: 8289 - protein, 135 aa, Zea mays
  unsure (1)..(135): unsure at all Xaa locations
KARPVHSSGFLFLFTAAWAAGDYDTFRHDALIFRLAHGSLLKKVLEAIPELCIDVLLDCSMTLFSLQAMDSSHVMLVELLLLSEGFEHYRCDQNLFMGMNLNNMXAKMLRCAGNEDIITIKADDRSDTVTFMFES

SEQ ID NO: 8290 - protein, 363 aa, Hypocrea jecorina
MATQTINKDAISNLSFVLNKPGDVTFEERPKPTITDPNDVLVAVNYTGICGSDVHYWVHGAIGHFVVKDPMVLGHESAGTVVEVGPAVKSLKPGDRVALEPGYPCRRCSFCRAGKYNLCPDMVFAATPPYHGTLTGLWAAPADFCYKLPDGVSLQEGALIEPLAVAVHIVKQARVQPGQSVVVMGAGPVGLLCAAVAKAYGASTIVSVDIVQSKLDFARGFCSTHTYVSQRISAEDNAKAIKELAGLPGGADVVIDASGAEPSIQTSIHVVRMGGTYVQGGMGKSDITFPIMAMCLKEVTVRGSFRYGAGDYELAVELVRTGRVDVKKLITGTVSFKQAEEAFQKVKSGEAIKILIAGPNEKV

SEQ ID NO: 8291 - protein, 330 aa, Clostridium thermocellum ATCC 27405
YNHSFELKEGLLGGCAIDATGEPFPKETLELCKSSDAVLLGAVGGPKWDNLPGDKRPEAGLLGIRGALGLYANLRPAVIYQALKGASPLRSDIVKDGIDIMVVRELTGGMYFGERGRVQTENMGQAAFDTEKYSEFEVERIARLAFETAMKRNKKLTSVDKANVLESSRLWREVVNRVASDYPEVELNHMYVDNAAMQLVRNPAQFDVIVTSNMFGDILSDEASMITGSIGMLPSASLGEGSLGLYEPIHGSAPDIAGQDKANPIATILSVAMMMKYSFGLEDAFRAIENAVVNVLGMGYRTADIASPDTPRENIVGTKEMGRLIISKLK

SEQ ID NO: 8292 - protein, 379 aa, Nepenthes alata
AVIGSGVLSLAWAIAQLGWVAGPAVLIAFSAITYFTSTMLADCYRAPDPVTGKRNYTYMDVVKAYLGGRKVQLCGLAQYGNLVGVTIGYTITASISMVAVKRSNCFHKHGHRDGCHTSNNPFMIAFACIQIVFSQIPNFHELFMASPIVAAAMSFAYSSIGIGLSIAKVAGGAHARTSLTGVAVGIDVTSTEKVWRTLQAIGDIAFAYAYANVLVEIQDTLKSSPPENKVMRRASLIGGRPPHSFYVLCGCMGYAAFVYDAPGNFLTGFGFYEPFWLIDFANVCIAIHLIGAYQVFGQPIFAFVEGWCRDMWPENKFITREHPIEVPFVGVYYLNLFRLVWRTTYVIITAIVAMLFPFFNDFLGLIGAASFWPLTVYFP

SEQ ID NO: 8293 - protein, 294 aa, Saccharomyces cerevisiae
TTPLVHVASVEKGRSYEDFQKVYNAIALKLREDDEYDNYIGYGPVLVRLAWHTSGTWDKHDNTGGSYGGTYRFKKEFNDPSNAGLQNGFKFLEPIHKEFPWISSGDLFSLGGVTAVQEMQGPKIPWRCGRVDTPEDTTPDNGRLPDADKDADYVRTFFQRLNMNDREVVALMGAHTLGKTHLKNSGYEGPWTANPNVFDNSFYLNLLNEDWKLEKNDANNEQWDSKSGYMMLPTDYSLIQDPKYLSIVKEYANDQDKFFKDFSKAFEKLLENGITFPKDAPSPFIFKTLEEQGL

SEQ ID NO: 8294 - protein, 256 aa, Zea mays
  unsure (1)..(256): unsure at all Xaa locations
MSSLYDVSCFAAGLAGNVFALALFLSPVPTFKRVLKAKSTEQFDGLPYLLSLLNCCICLWYGLPWVSDGGRALVATVNCTGALFQLAYISLFIFYADSRTTRLKVAGLLVLVVFAFALIAHASIAFFDQPLRQLFVGSVSMASLVSMFASPLAVMGXVVVRTECVEFMPFYLSLSTFLMSASFAVYGLLLRDFFIYFPNGARSHPGSQCSWCCTRTTSXDGKAATRQHRCLPDHVAEFVSPIARAVLSVVLCSAIL

SEQ ID NO: 8295 - protein, 344 aa, Streptococcus mutans UA159
MKKIVTLAGDGIGPEIMAAGLEVFDAVAQKINFDYEIEAKAFGGAGIDASGHPLPDDTLAAAKTADAILLAAIGSPQYDKAPVRPEQGLLAIRKELNLFANIRPVRIFDALRHLSPLKAERIAGVDFVVVRELTGGIYFGQHTLTENSACDINEYSASEIRRIMRKAFAIARGRSKKVTSIDKQNVLATSKLWRQIAEEVAKEYSDVTLEHQLVDSAAMVMITNPACFDVVVTENLFGDILSDESSVLPGTLGVMPSASHSESGPSLYEPIHGSAPDIAGKGIANPISMILSVAMMLRDSFGETAGAEMIEHAVNKTLTQGILTRDLGGLANTKQMTAAIIANL

SEQ ID NO: 8296 - protein, 499 aa, Glycine max
  unsure (1)..(499): unsure at all Xaa locations
MASQMAILFRTRTLLSSKPTTTLIKTITTFPFLSQEPQLVDPTPPPSSSSTPLPPNPASGSPLYHENWRSPIPPPPSSAGTSHALSPVGFYNRATSDTYDPRALLDLFGDWMASQQWHDVKFLFESWVRSLDKTGKPNKPDVNLFNHYLRANLMLGASAAELLDLVAQMAEFDNVAPNTASFNLVLKAMCQAKETLAADKLLQRMLQSGNDALPDDESYDLVIGMLFSMGQIDTALKYIDLILKSGNVLSMKVFMNCAGSCVNKGRLDTLVTIIERXSDQNKALCPNWDLCNFIVEIATREDNSKLAFYGLEFMAKWIVKGERQRPPIYISVDEGLVLSALLTAGRTYNTDLLVASWAVLDRSLRKKKAPNPESYLGKIYAHASLGNLQKAFGTLNEYESAYGDSGQEAEDLFCPFTSLHPLVVACSKKGFETLDNVYFQLENLNRAEPPYKSVAALNCVILGCANIWDLDRAYQTFESIGSTFGLIPDIHSYNGLIYA

SEQ ID NO: 8297 - protein, 271 aa, Triticum aestivum
  unsure (1)..(271): unsure at all Xaa locations
MALATNTAAAAAALTGGAAQPRRAGFLPLKRRTISAVHAADAARSGGASVPAAAAAKTSSPTVAPEAAAVTRPASWSVDSWRKKKALQLPEYPNKEELDAVLKTIETFPPIVFAGEARHLEDRLAEAAMGRAFVLQGGDCAESFKEFNANNIRDTFRVLLQMGAVLMFGGQVPVVKVGRMAGQFAKPRSDNFEEKDGVKLPSYRGDNVNGDAFDLKSRTPDPDRMIRAYAQSVATLNLLRAFATGGYAAMQRVIQWNLXDFMDHNEAGRQV

SEQ ID NO: 8298 - protein, 423 aa, Zea mays
MAQAVVPAMQCRVGVKAAAGRVWSAGRTRTGRGGASPGFKVMAVSTGSTGVVPRLEQLLNMDTTPYTDKVIAEYIWVGGSGIDIRSKSRTISKPVEDPSELPKWNYDGSSTGQAPGEDSEVILYPQAIFKDPFRGGNNVLVICDTYTPQGEPLPTNKRHRAAQIFSDPKVAEQVPWFGIEQEYTLLQKDVNWPLGWPVGGFPGPQGPYYCAVGADKSFGRDISDAHYKACLYAGINISGTNGEVMPGQWEYQVGPSVGIEAGDHIWISRYILERITEQAGVVLTLDPKPIQGDWNGAGCHTNYSTKTMREDGGFEEIKRAILNLSLRHDLHISAYGEGNERRLTGKHETASIGTFSWGVANRGCSIRVGRDTEAKGKGYLEDRRPASNMDPYIVTGLLAETTILWQPSLEAEALAAKKLALKV

SEQ ID NO: 8299 - protein, 616 aa, Candida albicans
ARASADQQQHQHNHHHHHHHHHHNENQSQQQVPIDPAANPANRIGRYQILKTLGEGSFGKVKLAQHLGTGQKVALKIINRKTLAKSDMQGRVEREISYLRLLRHPHIIKLYDVIKSKDEIIMVIEFAGKELFDYIVQRGKMPEDEARRFFQQIIAAVEYCHRHKIVHRDLKPENLLLDDQLNVKIADFGLSNIMTDGNFLKTSCGSPNYMPAPEVISGKLYSSVQKLMIWSAGVILGMSCCVVDYHSMTSSIPALFKKISNGVYTLPNYLSAGAKHLLTRMLVVNPLNRITIHEIMEDDWFKQDMPDYLLPPDLSKNKNSKIDVDEDVIRALSVTMGYDRDCKIVNVIEKANKQVAAGNSSSQQSKSSNEILDAYLLMKENHRLVKDLKKSKSENIESFLSQSPPPSPFPNAGSTSSAPGVQQSLTYQTLATVPDLSTLPNSTIAILPTSLPSIHRAYMAETKQNGDPSQQHAPPPTKKSKTRWHFGIRLRSYPLDVMGEIYRALKNLGAEWAKPTEEELWTIRVRWKYDTSAQFECGSAPNLMKMQIQLFQLEPNNYLVSFKFSGWESAHGNAGTDSPQSHRQQDLDEVGSFSAYPFLHLATRLIMELAVNSQSG

SEQ ID NO: 8300 - protein, 444 aa, Streptomyces avermitilis
MVPHAGDARDAEAKHDARTRGWETTMSALSPHLRQATPVVAVRGEGVHLYGEDGRRYLDFTAGIGVTSTGHCHPRVVAAAQEQAGTLVHGQYTTVLHPPLRRLVDRLGEVLPAGLDSLFFTNSGSEAVEAALRLARQATGRPNVLVCHGGFHGRTVAAAAMTTSGTRFRSGFSPLMSGVVVTPFPTAFRYGWDEETATRFALQELDYTLRTISSPDDTAAIIVEPVLGEGGYVPATRAFLEGLRERADRHGFVLILDEVQTGVGRTGRFWGHDHFGVTPDILITAKGLASGFPLSGIAASAELMGKAWPGSQGGTYGANAVACAAACATLDVVRDEKLVDNAEAMGARLRAGLAAVAATTPAIGDVRGLGLMLASEFVTEDGGPDPETAARVQRAAVDEGLLLLLCGAWNQVVRMIPALVIDEAEVDEGLRAWSAAVEVGVPAR

SEQ ID NO: 8301 - protein, 414 aa, Pseudomonas aeruginosa UCBPP-PA14
MTRSSRRGMPRACQPRWRSFPDRRTWCRWRPPSRSTACCSTSSASIEETTDMNSSPQANAAMRAAVWHGRHDIRVEDVPLPAEPPPGWVQIRVHWCGICGSDLHEYLAGPVFIPVEAPHPLTGLKDQCILGHEFSGEIVRLGNGVTGFALGQAVAADACQHCGTCYYCRHGLYNICENLAFTGLMNNGAFAEYVNVPANLLYALPAGFPSEAGALIEPLAVGMHAVKKAGSLLGQNVVVVGAGTIGLCTIMCARAAGAAQVIALEMSSARKAKALEVGASQVLDPSRCDALGEIRALTGGLGADVSFECIGNKHTAKLAIDAIRKAGKCVLVGIFEEPSEFNFFELVSTEKQLLGALAYNGEFADVIAFIADGRLDIAPLVTGRIGLEEIVERGFEELVNNKEHNVKIIVSPGG

SEQ ID NO: 8302 - protein, 170 aa, Marsilea vestita
MSNFRKGVGTGRRDKNKGRAQGLSEEQKQEIREAFDLFDTDGSGTIDAKELKVAMRALGFEPKKEEIKKMIADIDKDGSGTIDFEDFLQMMTTKMGERDSKEEIMKAFRLFDDDETGKISFKNLKRVAKELGENMTDEELQEMIDEADRDGDGEINEEEFYRIMKKTSLF

SEQ ID NO: 8303 - protein, 327 aa, Nostoc sp. PCC 7120
MAETLFFNALREAIDEEMARDSSVFVLGEDVGHYGGSYKVTKDLYKKYGELRILDTPIAENSFTGMAVGAAMTGLRPIIEGMNMGFLLLAFNQISNNAGMLRYTSGGNFKIPLVIRGPGGVGRQLGAEHSQRLETYFQAVPGLKIVTCSTPYNAKGLLKSAIRDDNPVLFFEHVLLYNLKEDLPEKEYYLPLDKAEIVRSGKDVTILTYSRMRHHVTQAVKTLEKQGYDPEVIDLISLKPLDLETIGASIRKTHKVIIVEEAMRTGGIAAELIASINDRFFDELDAPVLRLSSQDIPTPYNGTLERLTIVQPEQIVEAVQKMIALRV

SEQ ID NO: 8304 - protein, 473 aa, Agrobacterium tumefaciens str. C58 (Cereon)
MPVEILMPALSPTMEEGTLSKWLKKEGDKVTSGDVIAEIETDKATMEVEAVDEGVIGKLLIDAGTEGVKVNTPIAVLIQEGESADDISSSAKKEEPKAEAANSGSDAAGGKTREAAEEPSAAKEAAKVPAAPKIEVAADPDIPEGTEMVMTTVREALRDAMAEEMRADEKVFVMGEEVAEYQGAYKITQGLLQEFGERRVIDTPITEHGFAGIGVGAAMTGLKPIVEFMTFNFAMQAIDQIVNSAAKTLYMSGGQMGAPMVFRGPSGAAARVGAQHSQCYAAWYSHIPGLKVVMPYTAADAKGLLKAAIRDPNPVIFLENEILYGQSFEVPKLDDFVLPIGKARIHRKGKDATIVSFGIGMTYAIKAVAELEKLGIDVELIDLRTIRPMDLPTVIESVKKTGRLVTVEEGFPQSSVGDFIANQVMRAAFDYLDAPILTIAGKDVPMPYAANLEKLALPNVDEVVQAVKTVCYK

SEQ ID NO: 8305 - protein, 163 aa, Glycine max
QASASVASGQDNSPQEASPRLSPTGISSWAKNLKGGQPGGGGGDDSSSGKGGKSTFARITRGVFGFSFPPKSPVEDDSSSETAGQSNLFGTITKGLVDSSKNAVKAVQVKARHVVSQNKRRYQVLFLFKLIYFVCILVKLIFTKSCSFKKFIVFSTGNSALIP

SEQ ID NO: 8306 - protein, 450 aa, Bacillus subtilis subsp. subtilis str. 168
MEMMGMENIQQNQGLKQKDEQFVWHAMKGAHQADSLIAQKAEGAWVTDTDGRRYLDAMSGLWCVNIGYGRKELAEAAYEQLKELPYYPLTQSHAPAIQLAEKLNEWLGGDYVIFFSNSGSEANETAFKIARQYHLQNGDHSRYKFISRYRAYHGNTLGALSATGQAQRKYKYEPLSQGFLHAAPPDIYRNPDDADTLESANEIDRIMTWELSETIAGVIMEPIITGGGILMPPDGYMKKVEDICRRHGALLICDEVICGFGRTGEPFGFMHYGVKPDIITMAKGITSAYLPLSATAVKRDIFEAYQGEAPYDRFRHVNTFGGSPAACALALKNLQIMEDEQLIQRSRDLGAKLLGELQALREHPAVGDVRGKGLLIGIELVKDKLTKEPADAAKVNQVVAACKEKGLIIGKNGDTVAGYNNVIHVAPPFCLTEEDLSFIVKTVKESFQTI

SEQ ID NO: 8307 - protein, 755 aa, Deinococcus radiodurans
MSRDPLPFFPPLYLGGPEITTENCEREPIHIPGSIQPHGALLTADGHSGEVLQMSLNAATFLGQEPTVLRGQTLAALLPEQWPALQAALPPGCPDALQYRATLDWPAAGHLSLTVHRVGELLILEFEPTEAWDSTGPHALRNAMFALESAPNLRALAEVATQTVRELTGFDRVMLYKFAPDATGEVIAEARREGLHAFLGHRFPASDIPAQARALYTRHLLRLTADTRAAAVPLDPVLNPQTNAPTPLGGAVLRATSPMHMQYLRNMGVGSSLSVSVVVGGQLWGLIACHHQTPYVLPPDLRTTLEYLGRLLSLQVQVKEAADVAAFRQSLREHHARVALAAAHSLSPHDTLSDPALDLLGLMRAGGLILRFEGRWQTLGEVPPAPAVDALLAWLETQPGALVQTDALGQLWPAGADLAPSAAGLLAISVGEGWSECLVWLRPELRLEVAWGGATPDQAKDDLGPRHSFDTYLEEKRGYAEPWHPGEIEEAQDLRDTLTGALGERLSVIRDLNRALTQSNAEWRQYGFVISHHMQEPVRLISQFAELLTRQPRAQDGSPDSPQTERITGFLLRETSRLRSLTQDLHTYTALLSAPPPVRRPTPLGRVVDDVLQDLEPRIADTGASIEVAPELPVIAADAGLLRDLLLHLIGNALTFGGPEPRIAVRTERQGAGWSIAVSDQGAGIAPEYQERIFLLFQRLGSLDEALGNGLGLPLCRKIAELHGGTLTVESAPGEGSTFRCWLPDAGPLPGAADA

SEQ ID NO: 8308 - protein, 164 aa, Zea mays
MMMACALAVAQPAASLAPPSGKRTLSGGRPPRLPPPRLSGKLAFATPCCVRGAGKLIRSRAVVAKAAQDGSESSGSIVKYVASSISTAEDIFALAGIGFAAVAALWASVNLIEIIDKLPVLPLLFELVGILVAWLFIYNNLLFKPKRKEFLENIKSSGSRILGQ

SEQ ID NO: 8309 - protein, 132 aa, Zea mays
SLITVSVYGSENFSALRCRTTRIEYALSMQLFFFFFGHVILLKSPSNYSRYIRRGQPDAGFPLFESESLKWPGFVEFDDVNGKVLTYSAQDSTYKVFDLKNYTLLYSVSDKNVQEIKISPGIMLLIYTRTNS

SEQ ID NO: 8310 - protein, 550 aa, Glycine max
MALFLLYESASGYSLFEVHGVDEIGQNTEAVRNSVSDLNRFGKVVKLRSFNPFTSALDALKQCNAVSEGILTDELRTVLETNLPKVKEGKKSKFSLGVSDPKIGSQISEVTKIPCQSNEFVSELLRGVRFHFDTFVGDLKSGDLEKAQLGLGHSYSRAKVKFNVNRVDNMVIQAIFLLDTLDKDINSFSMRVREWYSWHFPELVKIVNDNYLYAKVAKFIEDKAKLAEDTIPGLTDIVGDEDKAKEIVEAAKASMGQDLSPVDLINVHQFAQRVMDLSEYRKNLYDYLVAKMNDIAPNLATLIGEVVGARLISHAGSLTNLAKCPSSTLQILGAEKALFRALKTRGNTPKYGLIFHSSFIGRASAKNKGRMARYLANKCSIASRIDCFAERGTTVFGEKLREQVEERLDFYDKGVAPRKNIDVMQAAIESAENKDTEMETEAPAEVSGKKTKKKKQKAAAAEGDDMAVDTNGDAVEDHKSEKKKKKEKRKLEQEMEVDDQAEDDGANGVTSEQEGTVKKKKNKKDSNGEALEAGGESKKKKKKSKKKDTE

SEQ ID NO: 8311 - protein, 382 aa, Pseudomonas syringae pv. syringae B728a
MQLIHRTPVMDRFRESAAMNNNKLRIAAIAGDGIGLEVLPEGVRVVQAAAARHGLELEFEYFEWASCDYYLKHGKMMPDDWFEQLKGFDSIFFGAVGWPEKVPDHISLWGSLLKFRREFDQYANIRPVRLFPGVPCPLANRKPGDIDFVVVRENTEGEYSSLGGIMFENTENEFVLQESVFTRRGVDRILKFAFEMASKRERKHVTSATKSNGMAISMPYWDKRTEAMASQYPGISWDKQHIDILCARFVLQPERFDVVVASNLFGDILSDLGPACAGTIGIAPSANLNPERHFPSLFEPVHGSAPDIFGQNIANPIAMIWSGALMLEFLGQGDQRFTAAHDEIITAIEQVIANGDVTPDLGGTLSTQHVGAAIAERVSAGH

SEQ ID NO: 8312 - protein, 394 aa, Zea mays subsp. mays
  unsure (1)..(394): unsure at all Xaa locations
LGAERRARLPPXDMGWPLVGGMWAYLRAXKSGKPDXFIASFVRRFGRTGVYRSFMFSSPTVLVTTAEGCKQVLMDDDAFVTGWPKATVALVGPRSFVAMPHDEHRRIRKLTAAPINGFDALTGYLPFIDSTVTSSLRAWADHGGSVEFLTELRRMTFKIIVQIFLGGADQATTRALERSYTELNYGMRAMAINLPGFAYRGALRARRRLVAVLQGVLDERRAARAKGVSGGGVDMMDRLIEAQDERGRHLDDDEIIDVLVMYLNAGHESSGHITMWATVFLQENPDMFARAKAEQEAIMRSIPSSQRGLTLRDFRKMEYLSQVIDETLRLVNISFVSFRQATRDVFVNGYLIPKGWKVQLWYRSVHMDPQVYPDPTKFDPSRWEGHSPRAGTFL

SEQ ID NO: 8313 - protein, 98 aa, Zea mays
  unsure (1)..(98): unsure at all Xaa locations
EIQSLRDLDLYDNQIKKIENLEAXLTELEILDISFNLLRNIEGVEKLTRLKKLFLVNNKISTIVNLSNLHQLXMLELGSSRIRAIANIGTLSILESLF

SEQ ID NO: 8314 - protein, 484 aa, Brucella suis 1330
MKSTIHSEGAAVSASVANHTPKPPLLSVDDAKALDLPRMTELFTAHLNPGQLHFMKLLGFHKVKVERAEGMYYYDQNGRRILDFFGGFGSLAFGHNHPRIIAARRKFQEELRHEIAIAFMSQYAAALAYDLAACSPGDLDMVFLGSSGSEAMEAAIKVAERAAGPKKPKIVYAENSFHGKTKGVLSITDGGLYRGEFKLVDNTVRVPFGDITAIENAFRSDPEIGTIVLETVQGGGGIIQADAEFWQKLRQLCDRYGVIWVADEVQCGFGRTGKFYAFEHYGVIPDVTALAKSLGGGKAAMAAMIARRDIYMKAYGTPKTAMIHAMATFGGIGEACITAIEAVNILYDEQLIDNSAEVGDYLLERLKELQVRYPGLLKDVRGKGMMVGLEFHDFSQAMPMVLRPMLAMLDDKLKGSLPGFIGSHLLRGHGVLVAFTEYNRNVIRLEPPLICQRAHVDEFIKALDEVLSRGIVKIVKDFIKAQIK

SEQ ID NO: 8315 - protein, 169 aa, Synechocystis sp. PCC 6803
MDLSRIPAQPKAGLINVLIEIPAGSKNKYEFDKDMNCFALDRVLYSSVQYPYDYGFIPNTLADDGDPLDGMVIMDQPTFPGCVITARPIGMLEMIDGGDRDEKILCVPAKDPRYTYVKSINDLAGHRLDEIAEFFRSYKNLEKKVTEILGWKDVDAVLPLVEECVKNYK

SEQ ID NO: 8316 - protein, 106 aa, Glycine max
SVNEGLVISALSAAGRTYNTDLLNAAWSLLRKSLRQKRAPTPETYLAKIYAHSSIGQLQRAFGTLREFENAYGNSEDIDLELFSPFTSLHPLVVACCKDGFSTLDS

SEQ ID NO: 8317 - protein, 259 aa, Poa annua
MGRGRVELKRIENKINRQVTFSKRRNGLLKKAYELSVLCDAEVALIIFSSRGKLYEFGSAGTTKTLERYQHCCYNAQDSNSALSETQSWYQEMSKLKAKFEALQRTQRHLLGEDLGPLSVKELQQLEKQLECSLSQARQRKTQLMVEQVEELRRKERQLGEINRQLKHKLDAEGSSSNNYRAMQQLTWAAGTVVDEGAAAYHMQHQQQQQPNHSAAMDCEPTLQIGYPHQFAAPEQAANNIPRSSGQGGENNFMLGWVL

SEQ ID NO: 8318 - protein, 364 aa, Oryza sativa
  unsure (1)..(364): unsure at all Xaa locations
XEWFGWHFPELVKIVNDNYIYAKLADYIKDKSELAEKDISKLADLIGDEDKAKEVVEAAKASMGQDLSEVDLMNVKQFAQRVMNLSEYRKNLYEYLVTKMNDIAPNLTSLIGEVVGARLISHAGSLSNLAKCPASTLXQILXVLEKALFRALKTRGGXRPKYXGLIFHSSFIGRASTKNKGRMARYLANKCSIASRIDCYSESATAVFGQKLREQVEERLDFYDKGVAPRKNLDVMKAAIDSMVNDATNDVDDGEKVDASAKKSKKKKSKAEADGEAMDLDKPSNVADEAEPGTEKKKKKKKHKLEEEPQEQEKSVAHANGDAEENGTPKKKKKKNREVSEDAEPKTATEGKKKKKKSKTEDSD

SEQ ID NO: 8319 - protein, 897 aa, Bacillus anthracis str. A2012
MSDNYRSRTERNHVKNQKQETNKEKKPKKKGSFFKKFLIGCLLLGIVGLVAGVSAFFVMVKDAPKLDKSKLVNPLSTKFLDKDGNFFYEYGAEKRTHVTYDQIPKVVENAFLATEDSRFYDHNGIDFKRTTKAVMENVTGGFGSQGGSTITQQVVKNYFLTMDKTAKRKVQEWYLSYKLEQQYSKHEILEMYLNKINLGNRSYGIATAAQKYYGKDLKDLQLHEAAMLAGLPQGPNIYDPTKKENVERATNRRNVVLSLMNRHGYITKEEMNNAVKIPVTEGLQPSSEITEMKYQAFLDAVVKEVEKEYPDVNIGSDGLTIHTTLDQDAQDYAEKIMDGNLIKYPNDQFQGSFVFMDTQSGEVRAIGAGRKGSKSTFKGHNMATDLKRQVGSTMKPIFDYGPAIENLQWSTYHQLNDSEYTYSNGKKIRNATNSYKGDVSLREALKKSLNIPALKTAQAVGLPKSQAFAEGLGMTFKDGKTFESTAIGSNDSSPLQLAGAYAAFGNGGNYNKPHFVKEVTFPDGKKKSFKPKEQRAMQDYTAYMVTDVLRDVVKPGSGGTGPTAYVSGVDVAGKTGTQNFDADVIKEYGIPADANRDSWFAGYTPQYTMAVWTGYEKNGPENYISDRYTRIAQQMFQVMMSKFATDKTRFERPSSVQEINGELYVKGAKKDAIKQIKVDAPSGLNVTFDGASTVTLNWSGPTEVDAYAASYKATDGSSGSLSVKGTTATLGGIKPGVTYSFSVVAKKGTGTSPAVGASFTAPGGTPDAKKAEEEAKKKAEEEAKKKADEEAQKKANEDKLKQEEATKKAEEEAKKQQEQQRKQQEEAQKKAEEEARKKAEEEAKKQQEEAQKKAEEEARKKAEEEAKKQQEQQQQEQQQNTGGNTPHADGNFVTTES

SEQ ID NO: 8320 - protein, 273 aa, Pseudomonas syringae pv. syringae B728a
MSVQQRNNVNIMGDGPITLIFAHGFGCDQNMWRFIAPHFAERFKVVLFDLVGNGNSDVSAWYPHKYSSLKGYATDLLEVVNEFAAEGPVVHVGHSVSCMIAVLAELQSPGRFDSHIMIGPSPRYLNEEGYLGGFTRADVDSLLETLESNYLGWSSTIAPTLMGASDRPELSEELANSFCRTNAEIARQFAHVTFLSDHRADVAQLKSRTLILQSSDDMVVPVEVGEYLHRVITDSTLHMIDNVGHYPHMSAAQECITAMNQFLASCESAAHDR

SEQ ID NO: 8321 - protein, 305 aa, Miscanthus sinensis var. sinensis
IESVGEGVTDVAPGDHVLPVFTGECKECPHCKSAESNMCDLLRINTDRGVMIGDGKSRFSINGKPICHFVGTSTFSEYTVMHVGCVAKINPQAPLDKVCVLSCGISTGLGASINVAKPPKGSTVAIFSLGAVGLAAAEGARIAGASRIIGVDLNPSRFEEARKFGCTEFVNPKDHKKPVQEVLAEMTNGGVDRSVECTGNINAMIQAFECVHDGWGVAVLVGVPHKDAEFKTHPMNFLNERTLKGTFFGNFKPRTDLPNVVELYMKKELEVEKFITHSIPFAEINKAFDLMAKGEGIRCIIRMEN

SEQ ID NO: 8322 - protein, 245 aa, Gymnosporia polyacantha
ALSIAGAVQSQKLAVRAISQLQSLPGGDIKLPCDTVVESVRNLTGYDRVMVYKFHEDEHGEVVAESKRSDLEPYIGLHYPASDIPQASRFLFKQNRVRMIVDCHASPVRVIQDDGLMQPLCLVGSTLRAPHGCHAQYMENMGSLASLAMAVIINGNEEEAIGGRSPTRLWGLVVCHHTSARCIPFPLRYACEFLMQAFGLQLNMELQLAAQLLEKHVLKTQTLLCDMLLRDSPTGIVTQSPSIMD

SEQ ID NO: 8323 - protein, 173 aa, Helicobacter pylori
MNLDQLEVSHDADSLCVVIEISKHSNIKYELDKESGALMVDRVLYGAQNYPANYGFVPNTLGSDGDPVDALVLSDVAFQAGSVVKARLVGVLNMEDESGMDEKLIALPIDKIDPTHSYVKDIDDLSKHTLDKIKHFFETYKDLEPNKWVKVKGFENKESAIKVLEKAIKAYQC

SEQ ID NO: 8324 - protein, 392 aa, Houttuynia cordata
  unsure (1)..(392): unsure at all Xaa locations
DLEPVNPSDVPVTAAGALKSYKLAARAISRLQSLPSGDISLLCDVLVREVSDLTGYDRVMAYKFHEDEHGEVVAECKRADLEPYLGLHYPATDIPPASRFLFMKNKMRMICDCLAQPVKVIQDKRLPQPLSLAGSTLRAPHGCHAQYMSNMGSIASLVMSVVVSEGDDDSNNGEKTGRKLWGLVVCHHTSPRFIPFPLRYACEFLIQVFAIQLSKEVELAAQMKEKHILRMQTVLCDMLLRDAPMGIXTQSPNVMDLVKCDGAALYYRCQCWLLGTTPTENQIRDLAEWLLQYHNSSTGLSTDSLVDAGYPGAHELGDAVCGMAAIRITSRDFLIWFRSHTAKEIKWGGEKHDPSDKDAFESKMNPRTSFKTFLEVVKRRSLPWEDVEMDAI

SEQ ID NO: 8325 - protein, 382 aa, Yersinia pestis KIM
MCDKKPLKESSMSHENLKGAQMAEGIPETMRAVVAYGPRDYRFERVPVPTIDAKEILVKVEGCGICAGDTKAFEGAPSFWGDDKQPAYIKAPMIPGHEFIGHVVGLGADVEGFELGDRVTSEQIVPCWGCRFCNHGQYWMCEKHDLYGFQSNVNGAMAEYLKFTKEAINYHVPDHLPLEKAILIEPYACAFHAVQRAKIKLGDVVVLAGSGTLGLGMIGAIKKSGAAKLIVLDLSDDRLALAKKFGADLVLNPSRDDVNTLIKEMTGGYGCDIYIDATGAQKAVEQGLTLLRKLGTFVEFSVFKDPVTVDWSIISDRKELDVLGSHLGPYCFPLVIEGISNGDLPTEGVVTHILPLEKYAEGIELVKRGVDSLKVVLNPNLT

SEQ ID NO: 8326 - protein, 108 aa, Capsicum annuum
QNPTEAELQDMINEVDADGNGTIDFPEFLNLMARKMKDTDSEEELKEAFRVFDKDQNGFISAAELRHVMTNLGEKLTDEEVDEMIREADVDGDGQINYDEFVKVMMAK

SEQ ID NO: 8327 - protein, 173 aa, Synechocystis sp. PCC 6803
MKPMRESSPQICPVPIDQQPVNEYEALKSAWLYSWGQVDLLSYGKNLTRLALLISFIVSPIASASFSVEKQPVQCGFLIVLGICLLLSLFVLRLMLGWRYVGDRLGAETVTYEESGWYDGQVWRKPLEVQTRDQLILRYQVNPVLQRWQNTLKLLGATMAIDILIWTIFRFLH

SEQ ID NO: 8328 - protein, 267 aa, Synechocystis sp. PCC 6803
MEKYNIQVLGNVNSQETLVFAHGFGSEQNAWRSIYPAFEENYRIVLFDFPGSKPANSKDFDIQNYNSLKDYADDLMEIAHLAGVRQGILIAHSASCMIGVLASLRDPNLFKGMVFICGSPRYRDDGDYKGGFSQEKIATILNEMSHNYAEWIRTYAPAAVNDPNKPELVEEFSHCLLQLRPDIGLVVFSLIIMSDYRREVAQVEIPTLIVQPQEDIFVPPTVGAYLYRIMKNSELYWIDTPGHFPHLANPTEITKAIADYLQENEFV

SEQ ID NO: 8329 - protein, 198 aa, Triticum aestivum
  unsure (1)..(198): unsure at all Xaa locations
GFAVYADRFVDPALGFSLGYTYWFKYIITTPNQLTAGALVISYWLPADRVNPGVWITIFXVLIVTINVLGIKYFGEIEFWLSSIKVLVILGLILLSLIIALGGADGDVRGFRYWNNPGAFNPYKGSGSWGRFLAVWQSMVTAVFAYLGTELVGVTVGEAQNPRKNVPRAIKLTFYRICVFYICSVILLGMCVPRPRPR

SEQ ID NO: 8330 - protein, 170 aa, Triticum aestivum
MAAADVEYRCFVGGLAWATNNETLEQAFANFGQVIDSKVITDRETGRSRGFGFVTFSSEQSMLDAIENMNGKELDGRNITVNQAQSRGGGGGGGGYGGGGGGYGGRREGGGYGGGGGGYGGRREGGGGYGGGGYGGGGGGYGGRREGGGGYGGGGGYGGNRGDSGGNWRN

SEQ ID NO: 8331 - protein, 185 aa, Thermoanaerobacter tengcongensis
MIIKEYKGIKPQIDEEAYIAETAEIIGDVEIKKNVNIWYGAVLRGDVDKIVVEEGTNIQDNCVVHVTDGHPCYIGKYCTIGHGAIVHACKVGNNVLIGMGAIILDDAEIGDNCIIGAGALVTGGKKIPPGSLVIGSPAKVVRQLTEEEIESIHKSYEHYVELAKLHFSEFGQLTVYNKSNIIENS

SEQ ID NO: 8332 - protein, 429 aa, Raphanus sativus
DKSYTLSFLLVFFVLILFGPAHSINTLSSTESLTISSNRTLLSPGNVFELGFFKPGSSSRWYLGIWYKKLPDRTYVWVANRDDPLSNSIGTLKISNMNLVLLDHSNKSVWSTNLTRGNERSPVVAELLANGNFVTRYSNNNDASEFLWQSFDFPTDTLLPEMKLGYDLKKGLNRFLTSWKNSDDPSSGEISYQLDIQRGIPEFFLLKDGFRGYRNGPWNGVRFNGIPEDQNLSYMVYNFTDNSEEVAYTFLITDKNIYSRLIISNDEYLARLTLTPASWDWNLFWTSPEEPECDVYMTCGPYAYCDVNTSPVCNCIQGFKPLNVQQWDLRDGSGGCIRRTELSCSGDGFIRMKNMKLPDTTMATVDRSIGVKECEKRCLSDCNCTAFANADVRNGGTGCVIWTGKLDDIRNYFEDGQDLYVRLAAADLV

SEQ ID NO: 8333 - protein, 256 aa, Magnetospirillum magnetotacticum
MTESIIPSLRHKRVLVTGAGSGIGAAIASAFGRQGALVGLHHRGEPDKVLAVAAEIEASGSRALCFKADLADPTQVTRLGREFLEAVGGIDILVNNAGGIGDYPDFLDLTEESWNQAMTVNAQAPLWLIRAVWPAMVEARSGRIINISSAAVGYGGSVNGIHYVAAKAALETMSLTLAKEGARHNILVNVVRPGLTDTGNYRKIAGYTEERYAKRTALVPLGRAGRPDEIAAMVTHLASGDGGFITGQIIAVAGGD

SEQ ID NO: 8334 - protein, 365 aa, Helicobacter pylori J99
MHNACNCNSQRVPFKGFAIDGKDGKFHEWEHSRHAMGEYDVVIDTHFSGICHTDIHFAHSDWLPGIYPMVPGHEIAGVVSAVGSKVTKFKVGDHAGVGCMVNSCGECHTCKHEHQEQWCENNKTIYTYSWEDSFHNNEPTYGGYSNNIVVSENFVISIPKEAPLDKAAPLLCAGITVYSPLKFSKVTKGSKVGIAGFGGLGHMALKYAVAMGAQVSVFARNDKKKQMAQKLGATNFYTSVGECKEKFDLIVSSIPTQYDLLAYTKLLKYGGEVAIVGIPPKDPQRNLDFGDLVLFSGNHKVYGSWIGGVKETQEMMDFSVKHGIYPEIELVTGQEIDATWDKLLNGQGNFRYVIDMKKSMENFKK

SEQ ID NO: 8335 - protein, 296 aa, Rhizobium sp. USDA 4004
RGKTQIKEFAEFPTLEQLPLWGFDGSSTQQAEGHSSDCVLKPVAVYPDPARTNGVLVMCEVMMPDGVTPHASNKRATILDNKGAWFGFEQEYFFYKDGRPLGFPESGYPAPQGPYYTGVGYSNVGSVARQIVEEHLDQCLAAGINHEGINAEVAKGQWEFQIFGKGSKKAADQMWMARYLMQRLTEKYGIDIEYHCKPLGDTDWNGSGMHANFSTAYMREVGGKGYFEALMAAFDKNLMDHIAVYGPDNDKRLTGKHETAPWNRFSYGIADRGASIRVPHSFINNGYKGYLEDRRP

SEQ ID NO: 8336 - protein, 319 aa, Streptomyces sp.
MSGKYLVTGGAGYVGSVVAQHLVEAGNEVVVLHNLSTGFREVCRRVPRSSRRHPGRRQVRGRLSFDGVLHFAAFSQVGESVVKPEKYWDNNVGGTMALLEAMRGAGVRRLVFSSTAATYGEPEQVPIVESAPTRPTNPYGASKLAVDHMITGEAAAHGLGAVSVPYFNVAGAYGEYGERHDPESHLIPLVLQVAQGRREAISVYGDDYPTPDRPVCATTSTSPTWPRPTCWPCAAAPGEHLICNLGNGNGFSVREVVETVRRVTGHPIPEIMAPRRGRDPAVLVASAGTAREKLGWNPSRADLAIVSDAWELPQRRAGQ

SEQ ID NO: 8337 - protein, 327 aa, Bacillus halodurans
MREITYLEAIREAMTLEMRKNEDVFILGEDIGVYGGAFGVTRGMIEEFGSERVRNTPISEAAISGTAIGAALTGMRPILELQFSDFITIAMDNMVNQAAKLRYMYGGKAKVPMVLRTPAGSGTGAAAQHSQSLEAWMTHIPGLKVVQPATAYDAKGLLKAAIDDNNPVIFYEHKLCYRTKCHVPEEEYSIPLGKADVKRKGTDVTVVATAVMVHKALEAAVELEKEGISVEVIDPRTLVPLDEETIIRSVKKTSRLIVVHEAVKRGGFGGEIASIIAESEAFDYLDAPIKRLGGKPVPIPYNPTLERAAIPQVPDIIEAVKETLNWS

SEQ ID NO: 8338 - protein, 326 aa, Rickettsia prowazekii
MQITVREALRDAMQEEMLRDEKVFVIGEEVAEYQGAYKVTQGLLEQFGSKRVIDTPITEYGFAGLAVGAAFAGLRPIVEFMTFNFAMQAFDHIVNSAAKTHYMSGGQVKCPIVFRGPNGAASRVAAQHSQNYTACYSHIPGLKVVAPYSAEDHKGLMLTAIRDDNPVIFLENEILYGHSFDVPDIIEPIPFSKAKILKEGSNVTIVTFSIQVKLALDVVNILQNDNIDCELIDLRTIKPLDTDSIIESVKKTNRLVIVEEGWFFAGVGASIASIVMKEAFDYLDAPIEIVSGKDVPLPYAVNLEKLAMPSANDLIEAVKKVCYYSI

SEQ ID NO: 8339 - protein, 305 aa, Miscanthus transmorrisonensis
IESVGEGVTDVAPGDHVLPVFTGECKECPHCKSAESNMCDLLRINTDRGVMIGDGKSRFSINGKPIYHFVGTSTFSEYTVMHVGCVAKINPQAPLDKVCVLSCGISTGLGASINVAKPPKGSTVAIFGLGAVGLAAAEGARIAGASRIIGVDLNPSRFEEARKFGCTEFVNPKDHKKPVQEVLAEMTNGGVDRSVECTGNINAMIQAFECVHDGWGVAVLVGVPHKDAEFKTHPMNFLNERTLKGTFFGNFKPRTDLPNVVELYMKKELEVEKFITHSIPFAEINKAFDLMAKGEGIRCIIRMEN

SEQ ID NO: 8340 - protein, 394 aa, Glyceria grandis
EPARTEDPALSIAGAVQSQKLAVRAISRLQALPGGDVKLLCETVVEHVRELTGYDRVMVYKFHDDEHGEVLAESRRPDLEPYLGLHYPATDIPQASRFLFRQNRVRMIADCHAAPVRVIQDPAMPQPLCLVGSTLRSPHGCHAQYMANMGSIASLVMAVIISSGGDDEHHMARGNIPSAMKLWGLVVCHHTSPRCIPFPLRYACEFLMQAFGLQLNMELQLAHQLSEKHILRTQTLLCDMLLRDSPTGIVTQSPSIMDLVKCDGAALYYHGKYYPLGVTPTEAQIKDIIEWLTACHGDSTGLSTDSLADAGYSGATVLGDAVCGMAVACITPSDYLFWFRSHTAKEIKWGGAKHHPEDKDDGQRMHPRSSFKAFLEVVKSRSLPWENAEMDAIH

SEQ ID NO: 8341 - protein, 379 aa, Arabis gemmifera
MSTTGQIIRCKAAVAWEAGKPLVMEEVEVAPPQKHEVRIKILFTSLCHTDVYFWEAKGQTPLFPRIFGHEAGGIVESVGEGVTDLQPGDHVLPIFTGECGDCPDCHSEESTMCDLLRINTERGGMIHDGESRFSINGKPIHHFLGTSTFSEYTVVHSGQVAKINPDAPLDKVCIVSCGLSTGLGATLNVAKPKKGQGVAIFGLGAVGLAAAEGARIAGASRIIGVDLNSQRFDQAKEFGVTEFVNPRDHDKPVQQVIAEMTNGGVDRSVECTGSVQAMIQAFECVHDGWGVAVLVGVPSKDDAFKTHPMNFLNERTLKGTFFGNYKPKTDIPGVVEKYMNKELELEKFITHTVPFSEIKKAFDYMLKGESIRCIITMGA

SEQ ID NO: 8342 - protein, 366 aa, Triticum aestivum
  unsure (1)..(366): unsure at all Xaa locations
MERVSPRLLLLVLLVAGSGXVRAAVPRVPCYVVFGGALVGNGNXNDIASLALANYPPXHGIDFPGGPTGRSTQRPHPPPHAISRLLGFDHYIPAYAAANNHQLLXGVNLASAAAXGIRDETGQQLGQRISFGGQLQNYQAAVQQLVSIVGDEDYAANHLSQXCIFTVGMGSNDYXNNYFMPAVYATSRQYTPEQYADVLVSQHQQQLRILYNNGARKVALMGVGQVGCSPNELAQQSSDGVTCVARINGAIEIFNQKLVELVDQFNTLPGAHFTYINAYGIFQDIIRSPGANGLTVLDKGCCGVGRNNGQVTCLPFQTPCANRNEYLFWDAFHPTEAANILVGRRAYSAAQPSDVHPVDLQTLARL

SEQ ID NO: 8343 - protein, 327 aa, Thermosynechococcus elongatus BP-1
MAETLMFNALRAAIDEEMERDPTVFVLGEDVGHYGGSYKVTKDLYKKYGELRLLDTPIAENSFTGMAIGAAMTGLRPIVEGMNMGFLLLAFNQIANNAGMLRYTSGGNFKIPIVIRGPGGVGRQLGAEHSQRLEAYFQAVPGLKIVACSTPYNAKGLLKSAIRDPNPVLFFEHVLLYNLKEDLPEEEYLLPLDKAEVVRTGEDVTILTYSRMRHHVLQAVKTLEKEGYDPEVIDLISLKPLDFETIGASIRKTHRVVIVEECMKTGGIGAELSASIMERYFDELDAPVIRLSSKDVPTPYNGTLENLTIVQPPQIVAAVQKLVQGQV

SEQ ID NO: 8344 - protein, 392 aa, Hiraea fagifolia
DLEPVDPADVPVTAAGALKSYKLAAKAISRLQSLPSGNISLLCDVLVKEVRDLTGYDRVMVYKFHEDEHGEVVSECRRPDLESYLGLHYPATDIPQASRFLFMKNKVRMICDCLAPPVKVIQDKRLPQPLSLCGSTLRSPHGCHAQYMTNMRTIASLVMSVTINEDDDTMDGDQQQMTGKLWGLVVCHHTSPRFVPFPLRYACEFLIQVFGVQINKEVELAAQVREKHILQIQTMLCDMLLRDAPVAIITQSPNVMDLVKCDGAALYFKNKIWLLGVTPKEEQIRDIAEWLLEYHSGNTGLSTDSLMEAGYPGASVLGDAVCGMAAVSITSRDFLFWFRSHTAKEIKWGGAKHDPGDKDDGRKMHPRSSFKAFLEVVKWRSMPWEDVEMDAI

SEQ ID NO: 8345 - protein, 144 aa, Gossypium davidsonii
LGTSTFSEYTVVHVGQVAKINPEAPLDKVCVLSCGISTGFGATVNVAKPKKGGSVAVFGLGAVGLAAAEGARVCEASRIIGIDLNPNRFEEAKNFGCTEFVNPKDHNKPIQEVIAGMTGGGVDCSIECTGSTQAMVSAFECVHD

SEQ ID NO: 8346 - protein, 349 aa, Desulfitobacterium hafniense
MQKAQEILGGFELDCRYYEAGVEYAVKTGKMCEDNLGEDIAKADAMLCGSAGHYDADMSKSEYPGYKTGMQVLQFLRSGMGNSIGLRPLRLRKGIDCPLRNREEIDVLLVRQLAEGFYIRPGHMIGEDAAYDTIVVTRNVTEKFADTCFRLARGRHGRRQDGKKMVTLGNKHGNVTCFDFYRKIFTEVSAGYPDIGLQFTQVDALAEHLIKDPDRFDVIACENMIGDIIGDIGAYITGGMGITPTADVGGVTPQFRPNHGTFPRAVGKGFANPLASILTAGLLLDTLGNERGDDNLRRGARLIEKAVEYNLTTGGPRTKDLGGTANTFATAEAVFKAMEVVKICSKGER

SEQ ID NO: 8347 - protein, 254 aa, Serratia marcescens
MGDLAGKKVFITGAEQGIGRATAERLIKAGCDIYFHYHSDESGPKALVALAHSLGQKAAYGYADLIDTDETLRCVSAGAEFLGGIDILINNVGGIVGRKWLGEIDRAFWQTVIDVNMTTMLNVTQSALPHLKAAPNGASIINLASLAGRAGGHAGSLVYSATKGAVLTWTRSLAAELGEHGIRVNAVAPGLILGTRFHNRHTTQASAEETVRAIPLGRAGTPDDVARAIAFLAAEYDGFISGATLDINGGIYRM

SEQ ID NO: 8348 - protein, 419 aa, Neurospora crassa
MPRDPLIGLVGKPSAGKSSTLNSLTDASSKVGNFPFTTIDPQRAIGYLQIDCACARYNVSERCKPNYGSCVNGKRSVPIELLDVAGLVPGAHEGKGLGNKFLDDLRHADALIHVVDASGTTDAEGKVTRGYDPSVDIAWLRSEIVAWIKGNLWEKWGSIKRRHIAVKATAVETLQAQFSGYGSTAAVVARTLDKLGLKEPLEEWSEETVDRVVNAFTDEKFPTVIALNKIDHPDADKNIAKIAKMQDPNSIVLCSAISEIFLRKMAKQGYIKYTEGSEFVDTREDLIADGDPDGGGLKELDEKNRNRIENLKDMVLYRFGSTGVNQVLSKAAEILGLVPVFPVRNTTTFTSGANESANKAVFRDCVLVKKNSTVADVARKIMGDAPIAYVEGAGGIRVAEDQIVTVGKNDILSFRVGRA

SEQ ID NO: 8349 - protein, 183 aa, Fusobacterium nucleatum subsp. nucleatum ATCC 25586
MNAEIDISNVKLETERLILRAWKITDLDNFFEYTSVNGVGEKAGWEHHKSKDESLEILKMFIDEKKVFAIVLKENQKVIGSIGIEECRQDLDTNLENLLGRELGYVLSKDYWNKGIMTEAVSKVIEYCFKILKLNYLIATCFNYNIASKRVLEKLNFKFYKDIIIKTKYNTVEKSTLMILKNN

SEQ ID NO: 8350 - protein, 110 aa, Glycine max
  unsure (1)..(110): unsure at all Xaa locations
MEDASASKFIPHQIGGVQNDVLRFGLHGVKSDIVGSHPLQSSLQXFQRPPGPIPSSMLGLETVTGSVDHFGFEDCLNDPRESETFRPLDMHHGMEVRLGLSKGPVYPSII

SEQ ID NO: 8351 - protein, 211 aa, Novosphingobium aromaticivorans
MLWRADLPRSPRCTPDGRLKDRRHMHPDVSIIPLNGKTPRIHESAFIAPGCRIIGDVEIGPDVSIWYNCVLRGDVNFIRIGARTNIQDGSVIHVDSPAPGKPEGFPTIIGEDVLVGHLAMVHGCVIEDRGFVGLGAIVMSGAHIESDGMLAAGAMLTGGKRIGARQLWGGRPATYMRDLTEPALVEMQRGVQHYVRNGQAHKAAVLGASEG

SEQ ID NO: 8352 - protein, 352 aa, Glycine max
  unsure (1)..(352): unsure at all Xaa locations
MPSQSVLVTGGAGYIGSHTVLQLLLSGYHVFAVDNFDNSSETAINRVKELAGEFANNLSFSKLDLRDRAALEKIFSTNKFDAVIHFAGLKAVGESVDKPLLYFDNNLIGTIVLFEVMAAHGCKKLVFSSSATVYGWPKEVPCTEEFPLSATNPYGRTKLIIEEICRDIYRADSDWKVILLRYFNPVGAHPSGYIGEXIPRGIPNNLMPFVQHVXAVGRRPALTVFGSDYKTTDGTGVRDYIHVLDLADGHIAALRKLNDPKIGCEVYNLGTGKGTSVLEMVNAFEQASGKKIPLAMAGRRPGDAEIVYASTEKAERELNWKTKYSIDDMCRDQWNWASKNPYGYGASADSSN

SEQ ID NO: 8353 - protein, 335 aa, Zea mays
MAPGSKAERKAALDAGAWMFNVVTSVGIIMVNKALMATHGFSFATTLTGLHFAMTTLMTLVMKWLGYIQPSYLPLPELVKFAFFANLSIVGMNVSLMWNSVGFYQIAKLCIIPVLCILEIMFDKVRYSRDTKLSIVLVLVGVAVCTVTDVSVNSQGLLAAVIAVWSTALQQHYVHHLQWKYSLGSFNLLGHTAPAQAASLLILGPFVDFWLTNKRVDAFNYTSIVTFFIVLSCIIAVGTNLSQFICIGRFTAVSFQVLGHMKTVLVLTLGFLFFGKEGLNFHVALGMLLAVIGMIWYGNASSKSGGKERQVYPTPSEKTQKHGALSSQSELDQKV

SEQ ID NO: 8354 - protein, 754 aa, Clostridium stercorarium
MQRDIKKIISQMTLEEKASLCSALDAWTLKGVERLGIPSIMVSDGPHGLRKRQRDPTDPGKKTTVPATCFPTAVGLASSWNRELVEKVGPALGEECQAEGIAVLLGPGTNIKLSPLSGRNFEYFSEDPYLSSEMARSHIKGVQSRGVGTSLKHFAANNQEHRRMSVDAVIDERTLREIYLASFEGAVKKAKPWTIMCSYNRVNGEYASENKFLLTDVLRNEWGFEGIVVSDWGAVNERVKGLEAGLDLEMPSSFGIGDQKIVEAVKKGELPEEVLDRTVERILNLIFKAVDNRKENAGYDREAHHKLAREAARECMVLLKNEDKILPLRKQGTIAVIGEFAKRPRYQGGGSSHVNPTIMDSPYEEIKKSAGNNADVIYAQGYIIEKDEPDEKLLEEAKQTALKADVAVIFAGLPEHYECEGYDRTHMRMPESHCTLIEEVAEVTTNVVVVLCNGSPVEMPWIDKVKGLLEAYLGGQAMGGPLPIFCSETPIPGKLAETFPKQLSDNPSYLNFRERDRVEYREGIFVGYRYYDKKNMEPLFPFGYGLSYTTFEYGDLKISRKEISDNETVTVSVKVKNTGDMAGKEIVQLYVRDIETSVIDRRRTEGFEKVELQPGEEKTVVFELDKRAFAYTHRYKDWHVETGEFRDFIGRSSRDIVLKDKIFVKSTVTIKKRWTVNTLVGDLLSDRVLEPVFREFIINEIKTWYLLDLLDEDNHLLSVWMRYTPLRSLANSTGGELNEEKLNRLIDTLNANIK

SEQ ID NO: 8355 - protein, 146 aa, Triticum aestivum
MIYLFKYKGFPFERVTPADAAETLLLFATGTGISPIRSLIEFGFAAKQRADVRLYYGARNLETMAYQERFAEWESSGLKIVPVLSRPDDGWKGERGYVQRAFLEAKNIANPASTGAVLCGQSQMIEEVTSALTADGVSQDKILKNF

SEQ ID NO: 8356 - protein, 255 aa, Petunia integrifolia
MSTSNASTSGVRKGAWTEEEDLLLRECIEKYGEGKWHLVPVRAGLNRCRKSCRLRWLNYLRPHIKGGDFSLDEVDLILRLHKLLGNRWSLIAGRLPGRTANDVKNYWNTHLRKKLIAPHDQKQESKNKAMKITENSIIKPRPRTFSRPAMNHVSCWNGKSCNKNTIDKNEGDTEIIKFGDEKQKPEESIVDGLQWWANLLANNIEIEELVSYNSPTLLHEETAPSVNAESSLTQEGGSGLSDFSVDIDDIWDLLS

SEQ ID NO: 8357 - protein, 214 aa, Paeonia officinalis
IVESVGEGVTDVKPGDHVLPIFTGECKECRHCKSEESNMCDLLRINTDRGVMLNDGQSRFSINGQPIFHFVGTSTFSEYTVLHVGCLAKINPEAPLDKVCVLSCGISTGLGATLNVAKPKKGSTVAIFGLGAVGLAAAEGARIAGASRIIGVDLNPKRFDEARKFGVTEFVNPKDYNKPVQEVIAEMTGGGVDRSVECTGSIMAMMSAFECVHD

SEQ ID NO: 8358 - protein, 611 aa, Candida glabrata
MENKEHHHHHHHHHHHHSNGSYVSNKVSSLADGSRVGNYQIVKTLGEGSFGKVKLAYHVTTGQKVALKSINKKVLAKSDMQGRIDREISYLRLLRHPHIIKLYDVIKSKDEIIMVIEYAGNELFDYIVQRNKMSEQEARRFFQQIISAVEYCHRHKIVHRDLKPENLLLDEHLNVKIADFGLSNIMTDGNFLKTSCGSPNYAAPEVISGKLYAGPEVDVWSCGVILYVMLCRRLPFDDESIPVLFKNISNGVYTLPKFLSPGASDLIKRMLIVNPLNRISIHEIMQDEWFKVDLAEYLVPQDLKQQEQFNKKSGNEENVEEIDDEMVVTLSKTMGYDKDEIYEALESSEDTPAYNEIRNAYILIKDNKSLIKDMKQDNNVTQELDTFLSQSPPTFQQNGDGMKASEDQKKKHSGRRLASSVTQQRTFHQPPFMDQSKEEDSTISIPTSLPQIHRANMLAQGLPAASKISPLVTKKSKTRWHFGIRSRSYPLDVMGHIYIALKNLGAEWANPSEEDLWTIRVRWKYDSDESRLIEDGVKKIPNLMKIVIQLFQIETNNYLVDFKFDGWESTYGDSTISTNMSEDEMSTFSAYPFLHLTTKLIMELAVNSQGN

SEQ ID NO: 8359 - protein, 123 aa, Triticum aestivum
MGYVGSHGVATLRKYKYSGVDHSIVAKYILQPFWSRFVNVFPLWFPPNMITLTGFMFLLTSAFLGFLYSPHLDTAPPRWVHLAHGILLFLYQTFDAVDGKQARRTNSSSPLGELFDHGCDALA

SEQ ID NO: 8360 - protein, 358 aa, Magnolia x soulangeana
PFYAIVHRIDIGLVIDLEPVNPADVPVTAAGALRSYKLTAKAISRLQSLPSGNISLLCDVLVREVSELTGYDRVMAYKFHEDEHGEVIAECRGSDLEPYLGLHYPATDIPQASRFLFMENKVRMTCDCLAPPVKVIQDKKLAQPLILCGSTLRAPHGCHSQYMANMGSIASLVMSVTINEDDDDDTSVSNGRRRKLWGLVVCHHTSPSFVPFPLRYACEFLVQVFGIQLNKEVELPAQMREKHILRMQTVFCDMLLRDAPVGIITQSPNVMDLVKCDGAAFYYRNQFRLLGTTPTEAQIRDIAGWLLEYHDGTTGLSTDSLTEAGYPGAADLGDDVCGMAAIKITSKDYLFWFRSHTA

SEQ ID NO: 8361 - protein, 196 aa, Zea mays
  unsure (1)..(196): unsure at all Xaa locations
KRSEAMSMSKTGQAAEKDEQQQSRGIALMQGICAAXYRKADNTPCPIKQGLYLGSVGAAFNKDALKSLNITHILIVAKSLDPVFPAEFNYKKIEVLDIPDTDLLKHSDECFGFIDEAISSGGNVLVHCFAGRSRSVTIVVAYLMKKHQMSLESALSLVRSKRPQVAPNXEGLFPSWEKFQKSLQVEQERRMQPVQH

SEQ ID NO: 8362 - protein, 470 aa, Corynebacterium glutamicum ATCC 13032
MEMVMKNKRVAIIGAGPSGIAQLRAFESAEKQGHEIPELVCFEKQDTWGGQWNYSWRTGTDSYGEPVHSSMYRNLWSNGPKEVLEFAEYSFDEHFGKPISSYPPREVLWDYIAGRAKKSNVEKYIKFAHVVRWVSFDEATKLFTVTVENLRTGETSSDTYDNVIVGAGHFSFPNVPHFDGVETFPGQIMHAHEFRGAEAVADKDILLIGASYSAEDIGTQAYKMGARSVTFSYRSNPMGYEWPEEMTELPLVERFDGSEVHFVNGEKRKVDIVVFCTGYLHHYPFMPSELTLSSPNNLYPDTLYRGVVSEANNQLFWLGAQDQWLTFNMFDAQAWYVRDVILGRVALPSKEAQRNHMDKWLSRFEGLKSENDQIDFQCDYVEDLIDQTDYPSFDLKEVANILKGWVKSKEEDILNYRDYTYTSVMTGTTSVEHHTPWMIELDDSLERYLSEPQEDEARQVYRGKKVRDKA

SEQ ID NO: 8363 - protein, 476 aa, Glycine max
MSWSSGSESEESASPNNLIPSLPDDVALNCLGRIPRSQHPTLSLVSKPIRTLLSSPILFTTRTLLQCTQPLLYLTLRSRHSSLLQFFTLHHTNPNNPLRVPQSIAIHLLPEGNCSGKMMSWACRSEESESPNNLIPYLPNDVALNCLARIPRSHHPTLSLVSKPIRSLLYSPLLFTTRSLLQCTQPLLYLTLRSRDSSLQWFTLHRTNPNPLLAPLPPIPSPAVGSAYAVLGPTIYVLGGSIQDVPSSHVWLLDCRFHRWLRGPPMRVAREFAAAGVLHGKIYVLGGCVADTWSRSANWAEVLDPASGRWERVASPTEVREKWMHASAVVGDRIYAMADRGGIAFEPRSCAWESVGGELDHGWRGRACVVKGILYCYDYLGKIKGFDVGRGVWEELKGLENALPRFLCGATMADLGGKLCVVWECQCNGKEMEIWCAEIGVKKNSDGELWGQLGWFGKVLSVPKGSSIVNCSSVSL

SEQ ID NO: 8364 - protein, 447 aa, Bacillus subtilis subsp. subtilis str. 168
MKNDNQTLKRTMTSRHIMMMALGGAIGAGLFKGSSSAIDVAGPSVIIAYLLGGIILLFIMQGLAEMAVRNRNARTFRDLVQQVLGNYAAYFLDWIYWKMWVLNIAAEAVVAAIFIQYWLPGCPIWVLALGISLIVTIVNLLSVKIFAETEYWLAMIKITVIIIFIILGLLLLFVSFGDHTASGFSNLTDHGGFFPHGGTGLITAMLVVIYSYGGTEIIGVTLAETKNPEKVVPKAVRSTLTRIVAFYLLPFFIIVSLIPWNQVNSVPESPFVMVFKMVGIPGADHIMNAVILLAIISSMNSGLYGSSRILYTQASDGRLPKVFSKLSSKNVPMFAILMCTSSLYIGVLISLFAGSQTFNYLMGSLGYTVLFIWLIIGFAHLKSRKQQTETPAYYVKWFPYTTWFAIVALLAILIGVIMTTSIVITGITAAIYLLITVAYLVKGRKHQ

SEQ ID NO: 8365 - protein, 191 aa, Triticum aestivum
  unsure (1)..(191): unsure at all Xaa locations
ASGLLMKDLGTGLSQIQLHASGYPINPDLFLVLEQRKSGWTSKPEGXHQSRRSDDPKRAHRXKLMFDAVEXLLLDKFEKETSVHAASSLTGAREVSSGQQLVKAICSEIEYLKTERSRMCQEKSSSVIPDAEILHRLEGWTTSFGQQQLPGMILEIERSIFKELVDEVVRGEAADGPQARAGRRGRRRLFT

SEQ ID NO: 8366 - protein, 454 aa, Escherichia coli
MSLRKLIINKSLAKEDKIMSGPKKIGLITCIAVVAGNMMGSGIALLPASLAKIGSVAIWGWIIAAIGALSLAYVFARLATNNPQTGGPIAYAGEVAPIFGHQTSILYYHANWIGNLAIAITAVAYLSVFFPVLNNPVPAAITSIAMVWLFTFVNLLGGAWVSRLTSIGLVLVLIPVVGTALFGWGSFDIEVYRQNWMAQPDGNVHQAVINSVLLCLWAFVGVESAAVSSDLVHNPSRTVPLATLGGTALAGIVYIAASQVIAGMFPNEVVANSGAPFALSASRIVGDWAAPFVSAFTAIACLTSLGSWMMLVGQAGRRAAMDGNFPAVFGETDNNGVPKKGLLIASTMMSILMVLLTILSASGSNAADLFTQLTSIAVLLTMFPYFYSAIDLIRFESATSKSILSLIASAFAMLFCFAALAGAEHYEITATIIISLLIFAFYARKLGGIQHKNI

SEQ ID NO: 8367 - protein, 463 aa, Oryza sativa; identical to SEQ ID NO: 4637

SEQ ID NO: 8368 - protein, 751 aa, Geobacillus stearothermophilus
MENQNRQNAAQCPFHGSVTNQSSNRTTNKDWWPNQLNLSILHQHDRKTNPHDEEFNYAEEFQKLDYWALKEDLRKLMTESQDWWPADYGHYGPLFIRMAWHSAGTYRTGDGRGGASTGTQRFAPLNSWPNNANLDKARRLLWPIKKKYGNKISWADLFILAGNVAIESMGGKTIGFGGGRVDVWHPEEDVYWGSEKEWLASERYSGDRELENPLAAVQMGLTYVNPEGPDGKPDPKAAARDIRETFRRMGMNDEETVALIAGGHTFGKAHGAGPATHVGPEPEAAPIEAQGLGWISSYGKGKGSDTITSGIEGAWTPTPTQWDTSYFDMLFGYDWWLTKSPAGAWQWMAVDPDEKDLAPDAEDPSKKVPTMMMTTDLALRFDPEYEKIARRFHQNPEEFAEAFARAWFKLTHRDMGPKTRYLGPEVPKEDFIWQDPIPEVDYELTEAEIEEIKAKILNSGLTVSELVKTAWASASTFRNSDKRGGANGARIRLAPQKDWEVNEPERLAKVLSVYEDIQRELPKKVSIADLIVLGGSAAVEKAARDAGFDVKVPFFPGRGDATQEQTDVESFAVLEPFADGFRNYQKQEYSVPPEELLVDKAQLLGLTAPEMTVLVGGLRVLGANYRDLPHGVFTDRIGVLTNDFFVNLLDMNYEWVPTDSGIYEIRDRKTGEVRWTATRVDLIFGSNSILRSYAEFYAQDDNQEKFVRDFINAWVKVMNADRFDLVKKARESVTALQGYLTVRSMTRSNLQ

SEQ ID NO: 8369 - protein, 196 aa, Pyrobaculum aerophilum str. IM2
MFTTLIARVKILIIAGDAVEALEIFYPYFRLKEEGWDVDVAAPTKKDLRTVVHDFEPGWETYSEKPGYLFKWVTKTSAEVKPEEYDGLVIPGGRMPEYVRVVASEDVKRIVRHFFEAGKPVAAICHAPQILAAVGVVNGRRMTSYIAVKPEVENSGGIWVDQEVVVDGNLVTSRAWPDNPAWMREFIKLVKAKKGI

SEQ ID NO: 8370 - protein, 463 aa, Pseudomonas syringae pv. tomato str. DC3000
MSSTANSSELEQGLKPRHITMLSIAGVIGAGLFVGSGHAIAEAGPAVLLAYAAAGTLVVLVMRMLAEMAVASPDTGSFSTYADRAIGHWAGFTIGWLYWWFWVLVIPLEANAAATILHAWFPDIAIWMFTLVITLLLTATNLFSVKNYGEFEFWFALIKVVAIIAFVVLGVAAIFGLLPTSSVSGVSHLFDTGGFLPNGMGAVLAAMLTTMFSFMGTEIVTIAAAESRNPGKQITKATNSVIWRIFLFYLVSIFIVVSLVPWNDPRLAEVGSYQTVLDAMGIPNAKLIVDLVVLVAVTSCLNSALYTASRMLFSLGKRGDAPALSKRTSKGGTPYWAVIMSTAAAFLTVFANYVAPAAVFDFLLASSGAIALLVYLVIAVSQLRMRQKRIAAGETIDFKMWLFPWLTWAAIAFIVAVLTIMLIQQEHRVEIIATGVLSLLVIGAGLIVSRRRKAGPVGAAALG

SEQ ID NO: 8371 - protein, 380 aa, Solanum tuberosum
MSTTVGQVIRCKAAVAWEAGKPLVMEEVDVAPPQKMEVRLKILYTSLCHTDVYFWEAKGQNPVFPRILGHEAAGIVESVGEGVTELAPGDHVLPVFTGECKDCAHCKSEESNMCSLLRINTDRGVMINDGQSRFSINGKPIYHFVGTSTFSEYTVVHVGCVAKINPLAPLDKVCVLSCGISTGLGATLNVAKPTKGSSVAIFGLGAVGLAAAEGARIAGASRIIGVDLNASRFEQAKKFGVTEFVNPKDYSKPVQEVIAEMTDGGVDRSVECTGHIDAMISAFECVHDGWGVAVLVGVPHKEAVFKTHPMNFLNERTLKGTFFGNYKPRSDIPSVVEKYMNKELELEKFITHTLPFAEINKAFDLMLKGEGLRCIITMED

SEQ ID NO: 8372 - protein, 651 aa, Aeropyrum pernix
MEARSVERRREKPWEGEVYESTFPWLLEWRARTQPGRVAFRWKRYGIWRRYTWRDYYLRVAYAALALENLGLGPGDTGAFITFNRPSWVIYEVGVQLLGGRAMGIYRDSLSDEVGYLLDSGDAKFVLVEGQEQLDRVLDSGVDVDKIIVDEAKGLHQYRGMVGSKLVTFGDVMRLGRKLYSDGGDQQVKKLMGELEPDMVCGLFTTSGTTGLPKLAMISFKNMLAMAHQLNTVDPVREDWEYVSFLPTAWIGEQMMSIPYHMIGGFKVNFPETPHTLWRDFREIAPHFMFSPPRVWERIAKDIMARVDDADPIKRAAFRLAYKIGYEAARRRLVKGRSRPPTLWRALYYLAYWLALRAVLDKAGLKRIVRAYTGGAMIGEDYVIFYHSLGVNLKQIYGQTEVAGIAVVHPDDDVRPDTVGKPLPLTEVKIAEDGEILMRSPAMMKGYYKNEEATAKTIVDGWLRTGDVGVLTEDGHLKVLDRAKEIIILSDGTKVAPQVIQNKLKFSPYIGEAAIVGSGKPYLAALVNIDFEIVSRWAERRRIPFTSYSDLSQKPEVLQLLKREIEKVNRRLPEKERIRRFVSLFKEFHPDDEEMTRTRKLRRMVIESRYAGLIEAIYSGDEEYELTVTMKLEDGRRVQVTRRVKIIDVEG

SEQ ID NO: 8373 - protein, 350 aa, Zea mays
MRSMESTDSSSGEAPPQKQPSSAPDLPPGFRFHPTDEELVVHYLKKKAASVPLPVAIIAEVDLYKFDPWELPDKATFGEQEWYFFSPRDRKYPNGARPNRAATSGYWKATGTDKPIMASGGNREKVGVKKALVFYRGKPPKGLKTNWIMHEYRLADAASSTTSRPPPPCNAGGKATSLRLIKLYLVSQLDDWVLCRIYKKIDKLGVGDPPRIMECGEDSVENAVAAYPTHAAAAAMAVAVAGGGGAYHTGNYTSLIHHHHEDSFLVDGLLTAEDAGGSSLSQLAAAARAAAPTDTTKQLLVPSSTTPFNWLDASALTILQPAKRFHGYNRDTTDGGGTSLPSPSERNNLQ

SEQ ID NO: 8374 - protein, 380 aa, Aquifex aeolicus VF5
MKLGVLGSTGSVGSQTLQVYENFRDEIELVGILANRASEKLLQQAKKYKPKYVVSYQEPAKEWLESLPEGVKYLKGDEGLKAIIEESERLMNAISGIYGIKPAYEVIKAGKTLLASNKESILCLGEIIRKNRERVIPVDSEHNALFQLLSSVKREEVKHVYLTASGGPFKDKSLEELKTASVEEALRHPRWNMGAKITIDSATLMNKGFEMLEAHFLFDFPIENIKVVIHPQSFVHGILELIDNSFLMHTSQTDMKIPIMHALFYPKRKEYPFKKVSLLELSPITFEKVDTTKFKAIDLAKWAGFMGGVYIPVLVGADEEAVNLFLNKKIGFLDIVDLIEQALSEVNIKDPQSVEEILEAVEWGRQKVREIYERKYAGKG

SEQ ID NO: 8375 - protein, 118 aa, Oryza sativa
  unsure (1)..(118): unsure at all Xaa locations
RRHILKYXERLGEKITALQQIVSPFGKTDTASVLLETITYIKFLHEQIQVTPSIYIYHXSFLQGHIHWGGEGKRKAGLEHDLRGRGLCLVPVSWTSQEYCDSILPECWAPAYRNYFYR

SEQ ID NO: 8376 - protein, 446 aa, Brassica rapa
MKGVIPHYHHSYTFFFVILVLFPHAFSTNTLSSNEALTISSNKTLVSPGDVFELGFFKTATKNSQDGSTDRWYLGIWYKTTSDKRTYVWVANRDNPLHNSIGTLKISHASLVLLDQSDTTVWSTNLTGVAHLPVTAELLANGNFVLRDSKTNDLDRFMWQSFDYPVDTLLPEMKIGRKHKSSEKEKILTSWKSPTDPSSGDYSLILETEGFLHEFYLFKNEFKVYRTGPWNGVRFNGIPKKMQNWSYIDNSFIDNNEEVAYTFKVHNNNNMIHSRFRMSSTGYLQVITWTKTVPQRNMFWSFPEDTCDLYKVCGPYAYCDMHTSPTCNCIKGFVPKNAGRWDLRDMSGGCVRSSKLSCGEGDGFLRMSQMKLPETSEALVEKRIGLKECREKCVRDCNCTGYANMDIMNGGSGCVTWTGELVDMRKYDAEGQDLYVKVAEASLVPS

SEQ ID NO: 8377 - protein, 107 aa, Glycine max
  unsure (1)..(107): unsure at all Xaa locations
RFKIDLNWTQHLTHEGDSYCSVVTDLGLPRLLMHLAXCEHAYVKEPALRCIFELASNTXDGKDGYNQDSEKMKQLLQERLNYISRMTVYDLHVGRLDSYILYTVMSS

SEQ ID NO: 8378 - protein, 383 aa, Neurospora crassa
MATDGKSNLSFVLNKPLDVCFQDKPVPKINSPHDVLVAVNYTGICGSDVHYWLHGAIGHFVVKDPMVLGHESAGTIVAVGDAVKTLSVGDRVALEPGYPCRRCVHCLSGHYNLCPEMRFAATPPYDGTLTGFWTAPADFCYKLPETVSLQEGALIEPLAVAVHITKQAKIQPGQTVVVMGAGPVGLLCAAVAKAYGASKVVSVDIVPSKLEFAKSFAATHTYLSQRVSPEENARNIIAAADLGEGADAVIDASGAEPSIQAALHVVRQGGHYVQGGMGKDNITFPIMALCIKEVTASGSFRYGSGDYRLAIQLVEQGKVDVKKLVNGVVPFKNAEEAFKKVKEGEVIKILIAGPNEDVEGSLDTTVDEKKLNEAKACGGSGCC

SEQ ID NO: 8379 - protein, 327 aa, Chlamydomonas reinhardtii
MQSARVSRTARHTRPSCRPQRAVAVRVSAKVNVEQLKALKAELYNYINSRGCNPISVRLGWHDSGTYDKNIAEFPARGGANGSIRFKPEIDHGANKGLAIALAILNPIKKKYPDVSYADLFQMASATAIEASGGPKIPMRYGRKDAKGPEECSPDGRLPGAAHPFADGSGSPAEHLRRVFYRMGLNDQDIVVLSGGHTLGRARPERSGFGAEKTKYTDVGPGTSTASPSGATDRPVTPKPVGQQGTSWTVNWLEFDNSYFKEIKAKRDSDLLVLPTDACIFEDDQFRPYAEKYAADQAAFFADYCVSHQKLSELGVEWEEGAPVTLD

SEQ ID NO: 8380 - protein, 190 aa, Microbulbifer degradans 2-40
MKRKTNTIKQLLAPSFLLACTFTASTHAAEESAQCPSYLDHSFKKLHSTQTVNLCELYTGKPLLIVNTASHCGYTKQFGGLEKLYQSYKDQGLQVIGFASDDFKQAAKSEMEAATICYKNYGVTFTMLAPTTVTGEKANAVFSHLNANTSAPSWNFNKYLITKNGQNIEKFNSDVTPLASDLEKKVQKAL

SEQ ID NO: 8381 - protein, 447 aa, Salmonella enterica subsp. enterica serovar Typhi
MKKVKKLSLTDLVLYGLVFMVPIAPVSLYGVVYNLSHGMVALVYIIGAIAMFFTAYSYSTLSQHISSSGSAYAYAGVCINPAVGFLTGWILLLDYLLFPTLVAVLGGVAVHAILPQIPVWVWPLIYVAIGTGVNYLGIQQTAKFDKLLVFIQLGILAIFVLLIIRLMMQDSSQITLSFRPFFDSQWFTPGLIATAISVAALNFLGFDAISTLSEESEGGGRAVSKATLLALVLATVLFIIVVAFAAFATGNVDRFAEGNATNEAFFTIAGNVGGIWLKVAFSIIVAFVCAVGNIITAQTAVSRVLFSMGRDRMLPAFLAHVHTTRKTPDYAILFTGGVTLLLSYLFSGKIESISTLVNFGALFAFFVVNLCVFILFNFRMKAQRRIFAHVISPIMGMIVIGYVCLNMNIHALILGISWAAIGIAILCYRKAYNQNIAIDLEGKKLLD

SEQ ID NO: 8382 - protein, 160 aa, Zea mays
MAMAYKMATEGMNVKEECQRWFMEMKWKKVHRFVVYKIDERSRAVLVDKVGGPGEGYEELVAALPGDDCRYAVFDFDFVTVDNCQKSKIFFIAWSPAASRIRAKILYATSKQGLRRLLDGVHYEVQATDPSEMGYRRHQRPRAMRPALRSALLLPVRVRV

SEQ ID NO: 8383 - protein, 201 aa, Yersinia pestis CO92
MKLSTLLLPVILYSSATLAANMAGMNDKASMNDKASMNDMASMNGKASMTVKINESLPQGNGKALGTVTVTETAYGLLFTPHLTGLAPGIHGFHLHEKPSCAPGMKDGKAVPALAAGGHLDPNKTGVHLGPYNDKGHLGDLPGLVVNADGTATYPVLAPRLKSLSEVKQHALMIHAGGDNYSDHPMPLGGGGARMACGVIE

SEQ ID NO: 8384 - protein, 347 aa, Gibberella fujikuroi
MAQQTTLQEFNSVYPKLEEALLDHARSYKLPQEQLDWYKRSLEVNPLGGKCNRGMSVPDSVSLLLEKPLTEEQYFQAATLGWMTELLQAFFLVSDDIMDSSITRRGQPCWYRQEGVGMIAINDAFMLESAIYTLLKKYFRSHPAYFDLIESFHETTFQTELGQLCDLLTAPEDNVNLDNFSLEKYSFIVIYKTAYYSFYLPVALALHQLNLATPSNLKQAEDILIPLGEYFQIQDDYLDNFGKPEHIGKIGTDIKDNKCSWLVNQALAVATPEQRKILEENYGRKDDEKEKVVKKLYDDLNLEQRYLDYEEKVVGQIRERIANIDENDGLKKTVFEAFLAKIYKRSK

SEQ ID NO: 8385 - protein, 250 aa, Brassica juncea
MTKNYPTVSEVYQKVYEKCKRKLRGLIAEKNCAPIMVRLAWHSAGTFDCASRTGVPFGTMRFDGELAHGANSGLHIALRLLEPIREQFPTISFADFHQLAGVVAVEVTGGPDIPFHPGREDKPQPPPEGRLPDATKGCDHLRQVLLKQMVLTDQDIVALSGAHTLGRYRAAPSGFEGAWTSNPLIFDNSYFKELLTGEKEGLLQLVSDKALLDDPVFRPLVEKYAADEEAFFADYAEAHLKLSELGFADA

SEQ ID NO: 8386 - protein, 336 aa, Oryza sativa
  unsure (1)..(336): unsure at all Xaa locations
MAAARFAGVPRRAAQSSSSSSQAPLDEPPPPALTPEQVGLCREALEYFEGMCGRPEAMSDEFRRLQRISYHLHELMRSSNEARNAANREKNRYIDVVPFDTTRVRLKRSTTSQTSSNDYINASFIKVTEDNRVAKFISTQGPLAKTFDDFWEMVYEYQCPVIVMLTQXXDSLKLLICDEYLPLRKQREAYGKYNVKITNAKRDSHQLWLRDVMVQCNESSRVHSVRHIEYPDWPDHGVPTNTDAVRQIRKWLQNTPMEXXPIVVHCSAGIGRTGAYITIHSTIERLLLGDKSSYHLDETVKTLRTQRVGMVQTEKQYMFCYRAIADELKDLLESNR

SEQ ID NO: 8387 - protein, 388 aa, Triticum aestivum
  unsure (1)..(388): unsure at all Xaa locations
MPVPQHWAELGFFRPAAPPPDMRILQLQQQQAHAPPPPPPPAQPPVAKKSRRGPRSRSSQYRGVTFYRRTGRWESHIWDCGKQVYLGGFDTAHAAARAYDRAAIKFRGVDADINFNLSDYEDDMKQMKGLSKEEFVHVLRRQSTGFSRGSSKYRGVTLHKCGRWEARMGQFLGKKYIYLGLFDNEVEAARAYDKAAIKCNGREAVTNFEPSTYIAELLNEVAAEVXDVDLNLSISQPNXQSPKRDKSSLGLQLHHGSYDGSELKRPKVDAPPEMVAIPHRYPLLTEHPPIWHGQSYPLFLNNEEAARDHSRRPEVATGAVPTWAWRVSHPPPTQPMPLFSSSSSAAASSGFSKTAAAAAPGAPSASFRFDPMAPSSSSSNQHHHHHPR

SEQ ID NO: 8388 - protein, 178 aa, Vibrio cholerae
MFIESLKIRLRSLEVEDAESFYQWSGDREVTQFSLSAYAYPQSRSDIAKWLSEINSSSKTISFGIECKESQKLIGYAGISGISSLNRSGEYFILIGDKAFWGKGLGTEVTRLVTNYGFRELGLHRIELTAYCDNVAAVKAYENAGYQHEGIKRESGYRNGRFMDKVQMSVLSREWPAT

SEQ ID NO: 8389 - protein, 361 aa, Rhizobium leguminosarum bv. viciae
MVLAQRDYSLVGRGSRAAVASGLAAAEWYHTDVPRKEMKALMQRSDAPAIRDTALWLGSMAVFAGLGIYFWGSWIALPFFLAYGVLYGSASDSRWHECGHGTAFKTRWMNAIVYQIACFMIMRNPVTWRWSHARHHTDTVIVGRDPEIAVMRPPDLLRLILDFFGILDVWHAVVDTLRNSAGNVSEEEKTFIPETEQRKVVRVARIWLASYAGTIALSMWLGSVLPLLLIGLPRLYGAWHAAMTGLLQHGGLADNVTDYRLNSRTVYMNPISRFIYWNMNYHVEHHMFPMVPYHALPKLHALIKHDLPAPNTSIIDGYREMIPAFIRQLRYEDYYVKRELPPTAKPYHEELHGAQRVSAAE

SEQ ID NO: 8390 - protein, 63 aa, Brassica rapa
MRGILVDWLVEVAEEYTLVPDTLYLTVYLIDWFLNGNYVERNRLQLLGVTCMLIASKYEEIYP

SEQ ID NO: 8391 - protein, 540 aa, Candida tropicalis
MSSSPSFAQEVLATTSPYIEYFLDNYTRWYYFIPLVLLSLNFISLLHTRYLERRFHAKPLGNFVRDPTFGIATPLLLIYLKSKGTVMKFAWGLWNNKYIVRDPKYKTTGLRIVGLPLIETMDPENIKAVLATQFNDFSLGTRHDFLYSLLGDGIFTLDGAGWKHSRTMLRPQFAREQVSHVKLLEPHVQVFFKHVRKHRGQTFDIQELFFRLTVDSATEFLFGESAESLRDESIGLTPTTKDFDGRRDFADAFNYSQTYQAYRFLLQQMYWILNGSEFRKSIAVVHKFADHYVQKALELTDDDLQKQDGYVFLYELAKQTRDPKVLRDQLLNILVAGRDTTAGLLSFVFYELSRNPEVFAKLREEVENRFGLGEEARVEEISFESLKSCEYLKAVINETLRLYPSVPHNFRVATRNTTLPRGGGEDGYSPIVVKKGQVVMYTVIATHRDPSIYGADADVFRPERWFEPETRKLGWAYVPFNGGPRICLGQQFALTEASYVTVRLLQEFAHLSMDPDTEYPPKLQNTLTLSLFDGADVRMY

SEQ ID NO: 8392 - protein, 329 aa, Staphylococcus carnosus
MSVLVLGGAGYIGSHAADQLIEQGYDVAVVDNLGTGHRQAVPETARFYEGDIRDKAFLNHVFEQENVEGVFHFCAYSLVGESVEKPLEYFNNNVYGMQVLLEVMKAHDVNEIIFSSTAAVYGEPEIIPIQEDAPKAPTNPYGESKLMMEKMMHWCHNAYGVNYAALRYFNVAGAKEDGSIGEDHNPETHLIPIVLQAALGQRDAITIFGTDYDTEDGSCVRDYLHVTDLIAAHILAYQYLKDGGESGAFNLGSSQGYSVIEIVEAARKATGIDIKAEIGERRAGDPSKLVASSDKAQRVLGWKPKHDDIHEIIETAWNWHQSHPNGYSN

SEQ ID NO: 8393 - protein, 751 aa, Geobacillus stearothermophilus
MENQNRQNAAQCPFHGSVTNQSSNRTTNKDWWPNQLNLSILHQHDRKTNPHDEEFNYAEEFQKLDYWALKEDLRKLMTESQDWWPADYGHYGPLFIRMAWHSAGTYRIGDGRGGASTGTQRFAPLNSWPDNANLDKARRLLWPIKKKYGNKISWADLFILAGNVAIESMGGKTIGFGGGRVDVWHPEEDVYWGSEKEWLASERYSGDRELENPLAAVQMGLIYVNPEGPDGKPDPKAAARDIRETFRRMGMNDEETVALIAGGHTFGKAHGAGPATHVGPEPEAAPIEAQGLGWISSYGKGKGSDTITSGIEGAWTPTPTQWDTSYFDMLFGYDWWLTKSPAGAWQWMAVDPDEKDLAPDAEDPSKKVPTMMMTTDLALRFDPEYEKIARRFHQNPEEFAEAFARAWFKLTHRDMGPKTRYLGPEVPKEDFIWQDPIPEVDYELTEAEIEEIKAKILNSGLTVSELVKTAWASASTFRNSDKRGGANGARIRLAPQKDWEVNEPERLAKVLSVYEDIQRELPKKVSIADLIVLGGSAAVEKAARDAGFDVKVPFFPGRGDATQEQTDVESFAVLEPFADGFRNYQKQEYSVPPEELLVDKAQLLGLTAPEMTVLVGGLRVLGANYRDLPHGVFTDRIGVLTNDFFVNLLDMNYEWVPTDSGIYEIRDRKTGEVRWTATRVDLIFGSNSILRSYAEFYAQDDNQEKFVRDFINAWVKVMNADRFDLVKKARESVTALQNNCDNRSDVVVTLQ

SEQ ID NO: 8394 - protein, 220 aa, Pseudomonas fluorescens PfO-1
MQTTFDLFADTESEQPRRAEQIGEQSWVLRGFALPQIEQLLPALESIIASAPLRHMMTPGGFSMSVATSSCGALGWITDRSGYRYSSEDPVSHRPWPAMPEVFRELAQAAAKRAGFADFMPDSCLINRYVPGAKMSLHQDKDENAYEAPIVSLSLGLPATFVFGGFARGDRSQKISLLHGDMVIWGGVDRLRYHGILPIKPGRHPRLGEQRFNLTFRTAG

SEQ ID NO: 8395 - protein, 495 aa, Avena sativa
MSSSRPASSSSSRNRQSSQARVLAQTTLDAELNAEYEESGDSFDYSKLVEAQRDGPPVQQGRSEKVIAYLQHIQKGKLIQTFGCLLALDEKSFNVIAFSENAPEMLTTVSHAVPSVDDPPRLGIGTNVRSLFSDQGATALHKALGFADVSLLNPILVQCKTSGKPFYAIVHRATGCLVVDFEPVKPTEFPATAAGALQSYKLAAKAISKIQSLPGGSMEMLCNTVVKEVFDLTGYDRVMAYKFHEDDHGEVFSEITKPGLEPYLGLHYPATDIPQAARFLFMKNKVRMICDCRARSIKVIEAEALPFDISLCGSALRAPHSCHLQYMENMNSIASLVMAVVVNENEEDDEAESEQPAQQQKKKKLWGLLVCHHESPRYVPFPLRYACEFLAQVFAVHVNREFELEKQLREKNILKMQTMLSDMLFREASPLTIVSGNPNIMDLVKCDGAALLYGGKVWRLRNAPTESQIHDIAFWLSDVHRDSTGLSTDSLHDAG

SEQ ID NO: 8396 - protein, 398 aa, Triticum aestivum
  unsure (1)..(398): unsure at all Xaa locations
MASYNPANPSTPAPSAPPLYPSLTMADLAPPEIPRSPASPDAPPPSDDVLLRVPGAQXHLIDRQRSHPLAAGELSLHRIRAGDTSLAAIAALGAVQWPLARDVAAVKLDPRHYSFSFAVPASPDDPAPDPLHXGLTLSVPDPRLDALLGAYTRFSAHSVAGSEGLAGGVRGEVEAAAYWTAVAPNVEEYGSAVARAIASGAENVAKGILWCGVMTVDRLRWGQEVLRKRIQPGDTEAEVSPEMLRRIKRAKKVTKMSEKVATGILSGVVKVTSYVTSSLVNSKAGKKFFSLLPGEVVLASLDGFGKISDAVEVAGKDVLSTSSTVTTGLVSHKYGEKAAAATNEGLDAAGHAIGTAWAVFKLRQALNPKSVLKPTSLAKSTVKAGAAELRAKSSSKSK

SEQ ID NO: 8397 - protein, 612 aa, Chlamydomonas reinhardtii
MSSKRKATEAPAAGEDGAAGPSSKKQAAASASAAAAAAGAGSAAAGGALVNPKRVRVLKPGSIGKGPVVYWMSRDQRLADNWALLHAIEAAQGAAGSSQVAVAFNLVPAFLGAGARQFGFMLRGLRQLAPRLEARGIKFYLLKGDPAHTLPQLVSGLGAGLLVTDYSPLRLGRTWRDQVCSALGSVPVHEVDAHNVVPVWAASEKREVGARTLRPKIHKALPEFLREFPEVPTLPAWTPAVAPEAVDWDGLISEVLSRGADVPEVEWCTPGEEAALEALTGPRGFLSPARLSLYDTKRNDPATPSALSGLSPYLHFGQLAPQRAALEAAKHRAKYKAAVESYLEELVVRRELADNFCHYCPTYDSLEAAAEWARDSLDKHRTDKREFLYTRDQLECGATHDELWNAAQLEMVHVGKMHGFMRMYWAKKILEWTQGPEQAIEWAIYLNDRYELDGRDPGGYTGVLWSMAGVHDMGWAERAVFGKIRYMNYNGCKRKFDIKAYVAYVSKAVAEAKAKGRAAKLPSAAAAGASGAAAAGATAAAAAAAAPGPSGAQAAKAAKAKAEPKEAKPKAAKAAAKAKGPKDEKAAAAGAKRKAAKPAKSASSGEEGSDDE

SEQ ID NO: 8398 - protein, 225 aa, Nicotiana tabacum
MAVKNKVSNGNLKGGNVKTDGVKEVHYRGVRKRPWGRYAAEIRDPGKKSRVWLGTFDTAEEAAKAYDTAAREFRGPKAKTNFPSPTENQSPSHSSTVESSSGENGVHAPPHAPLELDLTRRLGSVAADGGDNCRRSGEVGYPIFHQQPTVAVLPNGQPVLLFDSLWRAGVVNRPQPYHVTPMGFNGVNAGVGPTVSDSSSAVEENQYDGKRGIDLDLNLAPPMEF

SEQ ID NO: 8399 - protein, 440 aa, Zea mays
MPSASLRLAVVGAGAAGLVAARELRREGHAPVVFERAAAVGGTWLYTPPATSSDPLGAAATHSSLYASLRTNLPRETMGFLDFPFAAGAAGSRDPRRFPGHEEVLRYLEAFARRFDLLRLVRFETEVLSVRREDGGRWAVTSRKLGDKGSGEEEFYDAVVVCNGHYTEPRLAVIPGVDAWPGKQMHSHNYRVPEPFLDQVVIIIGASASAVDISRDIASMAEEVHIADRSAPASTCNKQPGYDNLWLHSMIDHAQEDGTVVFQDGSSIKADVIMHCTGYLYDFPFLGDDSTITVDDNRVDPLYKHIFPPEVAPHLSFIGLPWKVIPFPLFELQSKWVARVLSGRINLPSEDRMMEDVKAFYLKLEAHGWPKRYTHNFANYQFEYDDWLAEQCGHPPVEEWRKQMYAVTSMNKAARPESYRDEWDDEHLVAEANEYFKKFL

SEQ ID NO: 8400 - protein, 193 aa, Yersinia pestis KIM
MGRWWRYKWITFHPSLTIRPYLHHSPTLGKRVMIDRSSVIIGNVILGDDVSVWPLVAIRGDVNQVIIGARSNIQDGSVLHVTHQSEHNPEGYPLIIGEDVTIGHKAMLHGCTIGNRVLVGMGSILLDGTIIEDDVMIGAGSLITPGKRLVSGYLYVGSPAKQIRPLTPLELEGLLYSAGNYVRWKDDYLAESK

SEQ ID NO: 8401 - protein, 751 aa, Geobacillus stearothermophilus
MENQNRQNAAQCPFHGSVTNQSSNRTTNKDWWPNQLNLSILHQHDRKTNPHDEEFNYAEEFQKLDYWALKEDLRKLMTESQDWWPADYGHYGPLFIRMAWHSAGTYRTGDGRGGASTGTQRFAPLNSWPNNANLDKARRLLWPIKKKYGNKISWADLFILAGNVAIESMGGKTIGFGGGRVDVWHPEEDVYWGSEKEWLASERYSGDRELENPLAAVQMGLTYVNPEGPDGKPDPKAAARDIRETFRRMGMNDEETVALIAGGHTFGKAHGAGPATHVGPEPEAAPIEAQGLGWISSYGKGKGSDTITSGIEGAWTPTPTQWDTSYFDMLFGYDWWLTKSPAGAWQWMAVDPDEKDLAPDAEDPSKKVPTMMMTTDLALRFDPEYEKIARRFHQNPEEFAEAFARAWFKLTHRDMGPKTRYLGPEVPKEDFIWQDPIPEVDYELTEAEIEEIKAKILNSGLTVSELVKTAWASASTFRNSDKRGGANGARIRLAPQKDWEVNEPERLAKVLSVYEDIQRELPKKVSIADLIVLGGSAAVEKAARDAGFDVKVPFFPGRGDATQEQTDVESFAVLEPFADGFRNYQKQEYSVPPEELLVDKAQLLGLTAPEMTVLVGGLRVLGANYRDLPHGVFTDRIGVLTNDFFVNLLDMNYEWVPTDSGIYEIRDRKTGEVRWTATRVDLIFGSNSILRSYAEFYAQDDNQEKFVRDFINAWVKVMNADRFDLVKKARESVTALQTFGDPRSVAEDVLQ

SEQ ID NO: 8402 - protein, 579 aa, Populus tremula x Populus tremuloides
MAQDKHPLTGISDSGNHISILKKNKRLLLASFAALFLVATIAAVVAGVNSHKNGENEGAHAVLKSACSSTLYPELCYSAIATVPGVTGNLASLKDVIELSINLTTKTVQQNYFTVEKLIAKTKLTKREKTALHDCLETIDETLDELHEAQVDISGYPNKKSLKEQADNLITLLSSAITNQETCLDGFSHDGADKKVRKALLKGQTHVEKMCSNALAMIKNMTDTDIANELQNTNRKLKEEKEGNERVWPEWMSVADRRLLQSSSVTPNVVVAADGSGDYKTVSEAVAAAPKKSSKRYIIQIKAGVYRENVEVPKDKHNIMFLGDGRKTTIITASRNVVDGSTTFKSATVAAVGQGFLARGVTFENTAGPSKHQAVALRVGSDLSAFYECDMLAYQDTLYVHSNRQFFINCFVAGTVDFIFGNAAAVFQDCDYHARRPDSGQKNMVTAQGRTDPNQNTGIVIQKSRIGATSDLLPVQSSFPTYLGRPWKEYSRTVIMQSSITDVIQPAGWHEWSGSFALSTLFYAEYQNSGAGAGTSSRVKWEGYKVITSATEAQAFAPGNFIAGSSWLGSTSFPFSLGL

SEQ ID NO: 8403 - protein, 364 aa, Shigella flexneri 2a str. 301
MMSKNYHIAVLPGDGIGPEVMTQALKVLNAVRNRFAMRITTSHYDVGGAAIDNHGQPLPPATVEGCEQADAVLFGSVGGPKWEHLPPDQQPERGALLPLRKHFKLFSNLRPAKLYQGLEAFCPLRADIAANGFDIQCVRELTGGIYFGQPKGREGSGQYEKAFDTEVYHRFEIERIARIAFESARKRRHKVTSIDKANVLQSSILWREIVNEIATEYPDVELAHMYIDNATMQLIKDPSQFDVLLCSNLFGDILSDECAMITGSMGMLPSASLNEQGFGLYEPAGGSAPDIAGKNIANPIAQILSLALLLRYSLDADDAASAIERAINRALEEGIRTGDLARGAAAVSTDEMGDIIARYVAEGV

SEQ ID NO: 8404 - protein, 281 aa, Zea mays
PRVRLAVDDERQTLGEPWKPSVTKPTEVGMQSKNNKLANVVSLLQKLQQLSVSKDEDAPPVDHMAFLCETESPDHRYVSEILLASGLLMKELGSGQAGLQLQLHSSGYPINPDLFHVLEQRKAGWASIPDGIHQSSRSGAKSDPKRAHRKLVFDTANELLLQKFEKETTVYAVSSSTGAKDHPPAKALSGQQLLKFVSSEIEGMGTERSSTCQMEGGVIPDAEILQRLQGWTSFSRELPGMVLEIERSVFKELVDEVVHGESADGPEMKAAGRRRRRRLFA

SEQ ID NO: 8405 - protein, 160 aa, Zea mays
TLDIVAENPDKFRVVALSAGSNVTLLADQVKTFKPKLVAVRNETLVDELKEALADCEEKPEIIPGEQGVIEVARHPDAITVVTGIVGCAGLKPTVAAIEAGKDIALANKETLIAGGPFVLPLAHKHKVKILPADSEHSAIFQCIQGLSEGALRRIILTAS

SEQ ID NO: 8406 - protein, 175 aa, Draba nemorosa var. hebecarpa
MVRGKTQMKRIENATSRQVTFSKRRNGLLKKAFELSVLCDAEVSLIIFSPKGKLYEFASSNMQDTIDRYLRHTKDRISSKPVSEENMQHLKHEAANMMKKIEQLEASKRKLLGEGIGTCSIEELQQIEQQLGKSVKCIRARKTQVFKEQIEQLKQKEKALAAENEKLSEKWGSNE

SEQ ID NO: 8407 - protein, 300 aa, Burkholderia fungorum
MAGAAVRAGRHRSCHGTQTSRGRLVAYCACHCGVHRAGSGDDRVVDGQADQAHPWRAGATMTFTLGPSLTEAVLRTPVWGLLATLAAYQIGLVANRLAKGNVLANPVLVSVLPLVVLLTATHIPYQSYFAGAKFVHFLLGPATVALALPMYRNLHHIRRTAGALVPALCAGSIVSAGAAFLIGKYSGAAPVVTASLIAHSATTPIAMSISAGIGGDPALTATFTLFTGIMGVLLVRLISALVRVTDSRAQGLAAGTAGHGLTTAHMLSINETAGAFGGLAIGMNGVLTALLAPMLASLVR

SEQ ID NO: 8408 - protein, 467 aa, Brucella suis 1330
MNTISKPSVDLHREEEPHLARNLSNRHLQLIAIGGTIGTGLFMGSGKAVSLAGPSILLIYAITGFMLFFVMRALGEILLSNLQYRSFADFAGDYLGPCAQFFTGWTYWLCWIVTAVAEVVAVSGYVSFWFPHLAPWIPALGLITILLILNLPTVRNFGEIEFWFALIKIITIIGLIITGIYMLMTGFVLPNGTQASIAHLWNHGGFFPNGSLGFIAGFQISVFAFVGIELVGTAAAEAENPMRNLPKAINNIPIRIVLFYIGALFVIITVTPWNQVDPNSSPFVAMFSLAGIGIAAHFINFVVLTSASSSSNSGIYSTSRMVYGLATVGLAPKAFSKLSNRKVPVHALIFSCIFLLSSVVLLYAGQSMIQVFTLVTTISALLFIFIWSIILVSYLQYRRKHPERHEKSTFKMPGRRASVVMVFIFFAFVLWALTQEPDTLAAMKVTPLWFVLLGIAYRVMKLKQKQS

SEQ ID NO: 8409 - protein, 390 aa, Oryza sativa (japonica cultivar-group)
MEQMNTAAAKSIRCRAAVSRVAGQPLEMEEVEVAPPRAHEVRIKILCTSICHTDITFWRMEGNHPSIFGHEAVGVVESVGEHVQEVAVGDMVVPVFAAQCSECPDCLSDRSNLCSKLPNVAGLMPRDRTTRFSSVSTGEPIRHFLSVSSFAEYTVVDITHIVKLDVGFPPAMACLLSCGISTGVGAAWKVAAVEPGSSVAVFGLGAVGLAVAQGARMRGAKRIIGVDLNPDKFDVGKRLGMTDFINPNDTGGKTVSEVIKEMTGGGGADYCFECIGSTSVMAEAFQSTRNGWGKTILLGVSGNKAPISIPSHEILRGRSVIGSLFGGIKPKNDIPMLAQKYLDKELELEEFITHEMGFEEINRAFELLTQGKSIRCIIWMDGAKVIDNGE

SEQ ID NO: 8410 - protein, 324 aa, Zea mays
  unsure (1)..(324): unsure at all Xaa locations
MASLDAVRGDLALLILYLNKAEARDKICRAIQYGSKFISNGEPGPAQNVDKSTSLARKVFRLCKFVNDLHALISPPAKGTPLPLILLGKSKNAMLSTFLFLDQIVWAGRTGIYKNKERAEFLGRIAFYCFLGSNTCTAIIELAELQRLSTSMKKLEKELKHQELYKNEQYRMKLHKSNERLLALVKSSLDIVVAVGLLQLAPKKVTPRVTGXAFGFASSLIACYQLLPSPPAKQSKSGLLLKALEKELKHQELYKNEQYRMKLHKSNERLLALVKSSLDIVVAVGLLQLAPKKVTPRVTGAFGFASSLIACYQLLPSPPAKQSK

SEQ ID NO: 8411 - protein, 249 aa, Zea mays
MSATPLPPPGPDGAVALLPPPGTDMTGICFRDQLWLDTYPLDRNLVFDYFALSPFYDITCNNESLRSRQIHPLDMSHLTKMTGMEYLLSEVMEPHLFVIRKQKRESPEKSSPMLAYYILDGSIYQAPQLCNVFASRISRAMHHISKAFTIACSKLEKIGNVETEPDAVASESKTQKEAIDLKELKRIDHILSSLKRKIGAAPPPPPYPEGYVPPSAEQEKAPDDVAASEAPPQLDPIIDQGPSKRPRFQ

SEQ ID NO: 8412 - protein, 455 aa, Glycine max
MLDLNLTAESTQNDELLVLLDKFPEASSGTSNSSIVNAEGSSNEDSCSTRAGDVFTFNFGILKVEAANDVVAAATKELFPVSSENWQGQSSTSLFQARKSLMDLSLDQQHGEVKVVQVQPQPKVKKSRRGPRSRSSQYRGVTFYRRTGRWESHIWDCGKQVYLGGFDTAHAAARAYDRAAIKFRGLDADINFNLVDYEEDLKQMKNLSKEEFVHILRRHSSGFSRGSSKYRGVTLHKCGRWEARMGQFLGKKAYDKAAIKCNGREAVTNFEPSTYESEMKPEAINEGGSHDLDLNLGIATPGHGPKENRGHLQFQSIPYNMHPGRSSRMETNVNSVIGDPSLKRLVVTEERPSVYSTFFPNLERAERMGIDPSKGVPNWAWQTNGQVNATPVPPFSTAASSGFSISATFPSTAIFPTKSMNPVPHSLCFTSPSTPGSNAPQFYNYYEVKSPQPPS

SEQ ID NO: 8413 - protein, 282 aa, Mesembryanthemum crystallinum
MSLIANFESDFAVLESIRRHLLEDWDPRAGAPAITTGSGPVYHRNSSFSSLYPCLTDNWGELPLKEDDSEDMVLFGVLRDAVHTGWSPQSGSESGSGSPAPVTVKPEPVDSPVSSPAPVRVAGGEAPVAAAPARGKHYRGVRRRPWGKFAAEIRDPAKNGARVWLGTFETAEDAALAYDRAAFRMRGSKALLNFPLRVNSGEPDPVRITSKRSSPERSVSSSSSESASPKRRKKEEVVVGPVAGQARPGLQQVGNVVEGMQVGVGCQVGVGTMPLGDQLLVT

SEQ ID NO: 8414 - protein, 194 aa, Oryza sativa
MASALAVARPAALAPHASGSSSSQYPPLATSAIPPYSRGKLTAMASALAVARPAALVPRGGSESITGNLPMLPAVPSTRFVSGRMRSRNVVAAKAAQDSSEPSSGSVVKYVQSSFSSPEDLFALAGIGFAGIAALWASINLVEVIDKLPVLPLLFELIGILVAWLFIYQNLLFKPDREKFLNNIKSSVSRVLGQ

SEQ ID NO: 8415 - protein, 157 aa, Zea mays
MAASDVEYRCFVGGLAWATDDHSLNNAFSTYGEVLESKIILDRETQRSRGFGFVTFSTEDAMRSAIEGMNGKELDGRNITVNEAQSRGGRGGGGGGGYGGGRGGGGYGGGGRRDGGGGYGGGGGYGGGGGGYGGGGGGYGGGNRGGGYGNSDGNWRN

SEQ ID NO: 8416 - protein, 548 aa, Corynebacterium glutamicum ATCC 13032
MSQERPQIGSRLSRVIEQDGLQFRDLDGDGVLAPYEDWRLTPAERAADLVKRMNVEEKAGLMIIGSHYPGYSPLAPESEGKDAEKCEPLLNPVDMWREDNPITGVPFTEPVLATSSTENAINLRNQRYLIVRDNLPARGLATWTNAVQEVAERSRLGIPVAFASNPRNHVALVAQFGVNESAGVFSEWPGELGLAALRDAELMETFGTEAAKEWRAGGVHKLYGYMADLASEPRWSRFNGTFGEDPELISDYIAAVVRGLQGPELSKNSVSTTIKHFPGGGVRLDGHDPHFHWGQTNEYPTEDALGKYHLPPFQAAIDAGCASIMPYYARPMNNSANQLDQQLWQNPTTQFEEVAFAYNRTFIQDLLRDAMGHRGYVNSDSGVIDAMMWGVEELSEPERFAAAVRAGTDIFSDMANPRRLLEAVAEGHLDESELNQPVQRLLEEIFQLGLFENPYVSEDEAEKIIGAPEVSALGNKAQLDSVTLLRNNPIRAATGSCSKPEDLPIGYWPYQDRRGSTTAGSSHSRRTPRGNLGVFRVRSRSCNRVGSP

SEQ ID NO: 8417 - protein, 276 aa, Desulfitobacterium hafniense
KDVFHTFMIGTYFFPLLGGWLADRYFGKYNTVIWFSLVYCAGHACLALFEHNQTGFYTGLFLIAFGAGGIKPLVVSFCGDQFDQSNKHKAKLVFDAFYWTINFGSLFASLLMPIFLREYGPSVAFGIPGALMFLATFIFWLGRKRYVLVPPTRNAPDPDSFFNVARTALRAKTAGQGNPGVAVAAVGVALAAGALALIPSLGFVKSACLALGLLIGFGGYGISLQLERARGIHPDAAVDGVRAVLRILIVFAFVTPFWSLFDQKASTWVLQGQRMV

SEQ ID NO: 8418 - protein, 252 aa, Phaseolus vulgaris
MATSKVLLSNVLFVFVCFGICSAARTLLTLEDRVNLHVGTVVGGYGGGGGSGGGGGGAAVELGGGGYGEGAGGGEGAGAGYGAAGGGHGGGGGNGGGGGGGADGGGYGGGAGKGGGEGYGGGGANGGGYGGGGGSGGGGGGGAGGAGSGYGGGEGSGAGGGYGGANGGGGGGNGGGGGGGSGGAHGGGAAGGGEGAGQGAGGGYGGGAAGGGGRGSGGGGGGGYGGGGARGSGYGGGGGSGEGGGHGGGYYP

SEQ ID NO: 8419 - protein, 432 aa, Myxococcus xanthus
  unsure (1)..(432): unsure at all Xaa locations
MAPPSSGEKISLQSGKLSVPDNPIIPFIEGDGTGRDIWRASQAVFDAAVEKAYKGKKKIAWYEVLAGEKSFKAVNNWLPEETVEAFRTYLVGIKGPLTTPVGGGIRSLNVALRQMLDLYVCLRPVRYFKGVPSPVKMPDKVDMTIFRENTEDIYAGIEFEAGTAAAEKFLGLLKQEFPKEFGKIRFPSDVGLGIKPVSHEGSDRLIRAAIQYAVDHKRKSVTLVHKGNIMKFTEGAFRKWGYELAAREFGDKVYTWDQWEATKAXKGEDAANAEQKAALAAGKILIKDSIADITLQQVLTRPDEFDVIATLNLNGDYLSDALXAQVGGIGIAPGGNINYVTGHAVFEATHGTAPKYADQDKVNPGSVILSGEMMFRHLGWYEAADLMIQGMDRAIASKTVTYDFARLMKQEGQSGVSEVKCSEFGQAIIKNM

SEQ ID NO: 8420 - protein, 465 aa, Candida albicans
MFPNSPDAFHQVRMMQSSIKASNFKLQSMEFRCHSNNVCEYQMEMLHHLLSVEAKTLPSLSLIEQQPEIKLGMRPLLLDFLMEVITILNLSRSTFPLTVNLIDRYCSTRIVKKQHYQLLGLTSLWISCKNLDSKFKVPTLNDLRKICVDSYYKELFVEMEKHILKSLEWVVNAPTFDAFIDLYSNLLISNSSNFEVANIIKKSSHKIKLFSNYIGELFQFYPNIYYDYTSSQIALIAILITVLTLKIPVDLISLLNFYNGLVKTEMFKSNVEQGAEDQFEEILSVDSFKSLFNKSFFKNLIKIIDNPPSSLKIKYFAENGKYSVLMKQLVTTASNTLKCILDPVPTTPKANSFVKHQQQQHHYHPRPPMSINTSMIPLTPVSNSTSPNRFSPDQIFSENESTPGIAFGTMTPDSQSTSPGEKRSYECIDELEIGTSTIAGYTLKNHDTLKRSKSANYGTLFYLQQ

SEQ ID NO: 8421 - protein, 383 aa, Triticum aestivum
  unsure (1)..(383): unsure at all Xaa locations
MCPADEEPPPPLVLLTLVRGMPALFGAFAAALLPSPYPAWVMVLGPTCAPDWLPLVGVRGLVGVRLVWPGAFPACPSTLHTLRAVRVLALQKTRATSRDLANNLCWEILSQQXETIVWKKTNKRDCYSSRKSEPVLCARPLDPVLPYLAPLNPCIAGTRSKRWIPIEHRTTWPSQARLNSTELDIHGVNSEVFGEDTSTWDSMVRNYWSLLSPLIFSDHPKRPGDEEPHPPFNMLRNVLDMNAHFGGFNAALLKSGKSVWVMNVVPINAPNYLPLIFDRGFIGVQHDWCEAFPTYPRTYDMVHADGFLSLEKRQKRRCSTLDIFLEVDRILRPEGWIIIRDTAPLIEAARSVAAQLRWDARILDLDIASDEKLLVCQKPFLKK

SEQ ID NO: 8422 - protein, 150 aa, Zea mays
  unsure (1)..(150): unsure at all Xaa locations
SGKDVDLAXYRGKVLLIVNVASQCGLTNSNYTHQAQLYEKYKNQGFEILAFPCNQFGGQEPGTNEEIAQFACTRFKADYPIFDKVDVNGNNAAPIYKFLKSSKGGLFGDSIKWNFSKFLVDKEGRVVDRYAPTTSPLSIEKDIKKLLGSS

SEQ ID NO: 8423 - protein, 368 aa, Pseudotsuga menziesii
IQPFGCMVAVNDKTFEVIAYSENAPDMLQVSAHAVPSVEDQQILCIGSDARTLFTPSSTMALQKAAKFGDLNLLNPILVHSKSSGKPFYAILHRIDVALVMDFEPIKPSDVSTSAMGALQSYKLAAKAISRLQSIPSGNIGLLCDMIAQEVHELMGYDRVMAYKFHDDDHGEVISEIRRSDLEPYLGLHYPATDIPQASRFLFMRNRVRMICDCCAPPVIVIQDKRLPRDLSFCGSTLRAPHGCHAQYMANMGSIASLVMAVVVTEKEEDADSEGQIQQKGRRLWGLVVCHHTSPRYVPFPLRYACEFLMQVFGIHLNKEVELAIQMKEKRILRTQTLLCDMLLRDAPLGIVSQKPNIMDLVKSDGAA

SEQ ID NO: 8424 - protein, 254 aa, Cucumis sativus
  unsure (1)..(254): unsure at all Xaa locations
MSCYEEEDEESGVVGLRRSSSSSRTGRGKIEIKRIENTTNRQVTFCKRRNGLLKKAYELSVLCDAEVALIVFSSRGRLYEYANNSVRATISRYKKAYSDPSTAMTVSEANTQFYQQESAKLRAQIGNLQNLNRHLLGESISSLSVKDLKSLEVKLEKGISRIRSRKNELLFSEIEYMQKREIELHTNNQLIRAKIAETERSXQNTNASNNNGIATRRGEEGSMGTNLEDNNHHQYDSTNYFDPHHNHPISLQLV

SEQ ID NO: 8425 - protein, 152 aa, Paulownia kawakamii
MVKGVAVLSSSEGVSGTIYFTQEGDGPTTVTGNVSGLKPGPHGFHVHALGDTTNGCLSTGPHFNPAGKEHGAPDDEVRHAGDLGNVTVGEDGTAAFTIVDKQIPLTGPHSIIGRAVVVHADPDDLGKGGHELSKTTGNTGGRVACGINGLQG

SEQ ID NO: 8426 - protein, 462 aa, Nicotiana sylvestris
MVASPDNNAADGRTVKNKRPIDEWLPITSSRNGQNGGYSAFHNVTAMVGAGVLGLPYAMSELGWGPGVTVMVVSWVITLYTLWQMVECKKCPGMLAGTCIDDHKLAVSNVFGNKLGLWIVVPQQLVVEVGIDIVYMVTGGKSFQKSIVLVCKDNCKDIKLTYYIMIFASVHFVLSHLPNFNAISGVSLVAAIMSLSYCTIAWGASIVLGVQPDVEYEYRAENTGEGIFNFFSGLGEVAFAYAGHNVVLEIQATIPSTPEKPSKGPMWKGVLVAYIIVALCYFPVAIIGYWIFGNSVSNNILISLEKPTWLIVLANAFVVITLLGAYQLYAIPVFDMLETYLVRKLKFKPTWYLRFMTRNLYVAFTMFVGIIFPFLWGLLGFLGGFAFAPTTYFLPCIMWLSIYKPKRWGLSWTSNWICIIVGVMLTVLAPIGGLRTIIIQAKDYNFFYWDSLSGSLAFGKKG

SEQ ID NO: 8427 - protein, 384 aa, Triticum aestivum
  unsure (1)..(384): unsure at all Xaa locations
MAPAMRPEQEASCKATEDHRSEFDAAKPPPFRIGDVRAAVPAHCWRKSPLRSLSYVARDVAVVAALAAAAWRADSWALWPLYWAVQGTMFWALFVLGHDCGHXSFSDSGTLNSVVGHLLHTFXILVPYNGWRISHRTHHQNHGHIEKDESWHPITEKVYQKLEPRTKTLRFSVPFPLLAFPVYLWYRSPGKEGSHFNPSSDLFTPKERRDVIISTTCWFTMIALLIGMACVFGLVPVLKLYGVPYIVNVMWLDLVTYLHHHGHQDLPWYRGEEWSYLRGGLTTVDRDYGWINNIHHDIGTHVIHHLFPQIPHYHLVEATKAARPVLGRYYREPEKSGPLPMYLITVLLKSLRVDHFVSDVGDVVFYQTDPSLSGDKWTGTDKQK

SEQ ID NO: 8428 - protein, 469 aa, Oryza sativa
  unsure (1)..(469): unsure at all Xaa locations
KGEKEVIIFLPPPSRLHLASSIKKHSSVSNPSSSPCPRSASSSPRREPTRKRTRRREPINPPRRASPPSRCDRAGRRACGRGCSSSSSSSRGRRGGRGAGRISRCRCPSRRSRCRCRCRCRRRRRRRRRRRPGRPRSAACPPRRIRSAPRRRPXPPLSELERVRRIGNGAGGTVWMVRHRPTGRPYALKVLYGNHDDAVRRQITGEIGILRXAEHPAVVRCXGMYEQAGELQILVEYMDGGSLEGRRIASEAFLADVARQVLSGIAYLHRRHIVHRDIKPSNLLIDSGRRVKIADFGVGRILNQTMDPCNSSVGTIAYMSPERINTDLNDGAYDGYAGDIWSFGLSILEFYMGRFPLGENLGKQGDWAALMCAICYSDSPAPPPNASPEFKSFISCCLQKNPARRPSAAQLLQHRFVAGPQQQQQPQPQPLAPPPSPLLSSPSPPQLFFNLFFFFFFFFFFQLSSCSSK

SEQ ID NO: 8429 - protein, 154 aa, Aspergillus fumigatus
MVKAVAVLRGDSKITGTVTFEQADENSPTTVSWNIKGNDPNAKRGFHVHQFGDNTNGCTSAGPHFNPYGKTHGAPEDSERHVGDLGNFETDAEGNAVGSKQDKLIKLIGAESVLGRTLVVHAGTDDLGRGGNEESKKTGNAGARPACGVIGIAA

SEQ ID NO: 8430 - protein, 765 aa, Escherichia coli K12
MKWLCSVGIAVSLALQPALADDLFGNHPLTPEARDAFVTELLKKMTVDEKIGQLRLISVGPDNPKEAIREMIKDGQVGAIFNTVTRQDIRAMQDQVMELSRLKIPLFFAYDVLHGQRTVFPISLGLASSFNLDAVKTVGRVSAYEAADDGLNMTWAPMVDVSRDPRWGRASEGFGEDTYLTSTMGKTMVEAMQGKSPADRYSVMTSVKHFAAYGAVEGGKEYNTVDMSPQRLFNDYMPPYKAGLDAGSGAVMVALNSLNGTPATSDSWLLKDVLRDQWGFKGITVSDHGAIKELIKHGTAADPEDAVRVALKSGINMSMSDEYYSKYLPGLIKSGKVTMAELDDAARHVLNVKYDMGLFNDPYSHLGPKESDPVDTNAESRLHRKEAREVARESLVLLKNRLETLPLKKSATIAVVGPLADSKRDVMGSWSAAGVADQSVTVLTGIKNAVGENGKVLYAKGANVTSDKGIIDFLNQYEEAVKVDPRSPQEMIDEAVQTAKQSDVVVAVVGEAQGMAHEASSRTDITIPQSQRDLIAALKATGKPLVLVLMNGRPLALVKEDQQADAILETWFAGTEGGNAIADVLFGDYNPSGKLPMSFPRSVGQIPVYYSHLNTGRPYNADKPNKYTSRYFDEANGALYPFGYGLSYTTFTVSDVKLSAPTMKRDGKVTASVQVTNTGKREGATVVQMYLQDVTASMSRPVKQLKGFEKITLKPGETQTVSFPIDIEALKFWNQQMKYDAEPGKFNVFIGTDSARVKKGEFELL

SEQ ID NO: 8431 - protein, 736 aa, Archaeoglobus fulgidus DSM 4304
MQVQVSLSRDLSFFDITMIGIAGMIGAGVFALTGIAAGIAGPAIILAFFLNGIIATLTGLAYAELGSAMPQAGGGYLWIKEAMGDYAGFMAGWIDWAAHTIACALYAVTFGAFFAEMLVGFVGLPLPHVLTAKISSLAMVSFLAYVNYRGAKESGFLGSLVTVLKVLILLVFAGFGIIKMLSYPDWQSSFTPFFPTGFAGVLAAMGLTFIAFEGFEIIVQSGEEVKDPEKNIPKAIVVSLWVAVAIYILIAFSLLGAVRADVPSWMYLGQLAELSLVKVADSIMPLGGWMILAGGLISTISAMNATIYSSSRVIFALSRSGYLHRSLSAINERTKTPHYAIFFSYIIIAAASLAPIEAVASAASLMFIILFLAVNVTLIILRLRRPDIQSAFRLPLVPVLPAIAAALLAVVSYFLITQVEHGEGVFLITIAWMFLGSFFYFAYSEKELEKREEEEVMTVFTEKPVEKMEYTILVPVANPVIAKKLVRFAELIARKKKGAVVILNTVRLPQQTPISAPAKDVKKAKELVEGLMNLSVPSGGVVKVSHSVSEAILSTAEEWKANMIVMGWRGRTFRRDVVLGSTIDPVLLKAKCDVVVIRFEPGEKIPEFRDVLISTIGGPHAKLGYEIARALVEDKSGRIKLLYVGSSEKEREKAEKVFEEAMEILNGLNVEREFAISSSPSDVVAREAESFDLVIVGASERTFLKNFLTGLFPEKVVMKTSKTVAMTRKWVGLLNR

SEQ ID NO: 8432 - protein, 460 aa, Xanthomonas axonopodis pv. citri str. 306
MPMSDPSAPDHLQRSLSNRHLQLIAIGGAIGTGLFMGSGKTISLAGPSILFVYLIIGAMLFFVMRAMGELLLSNLEYKSFIDFSTDLLGPWAGFFCGWTYWFCWIITAIADVIAIAAYAQFWFPGLAPWIPAILCVLLLLGLNLVTVKLFGEMEFWFALIKIIAIAALIVTGAGLVVWGFRSPSGNVASLSNLWNDGGMFPMGIGGFFAGFQIAVFAFVGIELVGTTAAETADPRRNLPKAINSIPVRILIFYVLALIAIMAVTPWRQVVADKSPFVELFVLAGVPAAASLINFVVLTSATSSANSGIFSTSRMLYGLAEEQHAPKGFAKLSRAAIPARGLLFSCLCLLLGAMLVYLIPNLVTAFTLVTTLSAVLFMFVWSLILCAYIAYRRKRPEQHAASAFKMPGGVLMCYVCLAFFAFVIVLLTLQDDTRQALLASPVWFLLLAIGYAVKRRGNRQR

SEQ ID NO: 8433 - protein, 345 aa, Plesiomonas shigelloides
MDIYMSRYEEITQQLIFSPKTWLITGVAGFIGSNLLEKLLKLNQVVIGLDNFSTGHQYNLDEVKTLVSTEQWSRFCFIEGDIRDLTTCEQVMKGVDHVLHQAALGSVPRSIVDPITTNATNITGFLNILHAAKNAQVQSFTYAASSSTYGDHPALPKVEENIGNPLSPYAVTKYVNEIYAQVYARTYGFKTIGLRYFNVFGRRQDPNGAYAAVIPKWTAAMLKGDDVYINGDGETSRDFCYIDNVIQMNILSALAKDSAKDNIYNVAVGDRTTLNELSGYIYDELNLIHHIDKLSIKYREFRSGDVRHSQADVTKAIDLLQYRPNIKIREGLRLSMPWYVRFLKG

SEQ ID NO: 8434 - protein, 95 aa, Fagopyrum homotropicum
GRLYEYANHSVKATIDRYKKACSDSAGVTSVAEANAQYYQQEAAKLRNQIRTLQNNSRNLSRHMMGEGLSNLSMKDLKNLETRLEKGISRIRAKK

SEQ ID NO: 8435 - protein, 376 aa, Treponema pallidum
MSVRRVVVLGITGSIGAAALKLLRRFPDRFLLVGASGHRQTEYARALAREFSLSDITMTGSCSEQEGRARIKRLLSSCEAEVVVNGIAGAAGLFASLEVLKTRCTLALANKESVVLAASLLHAAARESGATIVPVDSEHAAIFQLIAAHGAHAVAQVVLTASGGPFRTFSKECLAHVTVEDALQHPTWRMGKKISVDSATLANKALEVIEAVQFFRIPVDRVTVVVHPQSIVHALVQCHSGETYAQLSVPDMASPLLYALLYPDAPPAYQTPLDFTSGLSLHFEPPRVDDFPLLRMGFDVARAQRAYPIAFNAANEEAVRAFLQRNIGFLDIAHVTAQALQEDWRAIPQTFEEVMACDTRARMCARTCIAQRWRER

SEQ ID NO: 8436 - protein, 161 aa, Hordeum vulgare
MADVEYRCFVGGLRWATDDQSLQNAFSKYGDVIDSKIITDRETGRSRGFGFVTFASDEAMRQAIEAMNGQDLDGRNITVNEAQSRRSDGGGGFGGGGGGYGGQRREGGGGGYGGGGGGYGGGRSGGGGGYGSRDGGGGGYGGGGGGYGGSRGGSGGGNWRE

SEQ ID NO: 8437 - protein, 346 aa, Arabidopsis thaliana
METTVKNKQVILRNYVKGIPKESDLMIITASDPVELKVKPGSAAVMVRNLYLSCDPYMGILMREPTPSTLALLDAFIPGKPIAGIGVSQVIDSDDPSFTKGDMIWGIVNWEEFSTINPAAIFKIDVNINVPLSYYTGILGMIGLTAYAGFFEICSPKKGETVFVSAASGAVGQLVGQFAKLMGCYVVGSAGSKQKVDLLLNKFGYDDAFNYKEEPDLDSALKRCVPKGIDIYFENVGGKMLDAVLLNMKTYGRIAVCGMISQYHLETRDRLQNLPDIIFKKIRMQGFASYDFIDRFPKFLEFVLPYIKEEKLAYVEDIVEGLENGPAALVGLLHGKNVGKQVLKVA

SEQ ID NO: 8438 - protein, 140 aa, Oryza sativa
MVSFEMSELKKIGLGLSGFGVLFSFLGIIMLFDKGFLAIGNILFVSGVSLTIGPKSTVQFFTKPKNHKGSIAFGIGFFLVLIGWPFFGMLAEAYGFVKLFRGFWPTAAVYLQKSPTFGWIFHHPLVTSLITRFRGRRVPV

SEQ ID NO: 8439 - protein, 211 aa, Zea mays
  unsure (1)..(211): unsure at all Xaa locations
MAKKKKKKKKKKKKKKKKKKKKKKKKKKKKKNTARSFIRFPKKGPLTLGTASVRLIPGGSFISAKGGNRGPDPEPKMTESLGGKKPGRATIKEMPGGQDGPPPGGFAPGGFPRRIPTWGPRATAIFLTTLGVFAYGMNQAGQGNKVRRGFKKKKIVARRVILPMLQAKKDERFVKKGKKGLEEEARILKDVPGXKAGKSVNNSGKGMLPVT

SEQ ID NO: 8440 - protein, 273 aa, Pyrococcus horikoshii
MRDVKLIGSDEVTAIGMGTWGIGGYEVPDYSRDRESIEVLRYGLELGINLIDTAEFYGAGHSEELVGKAIEGFNREEIFIISKVWPSHFGYEKAKKAAKASAKRLGTYIDLYLLHWPGDSWGKIEETLHALEDLVDEGLIRYIGVSNFDLELLKRSQEAMRRYEIVANEVKYSIRDRWPETSGLLDYMKREKIALIAYTPLEKGTLARDPCLTEIGRAYGKTAAQVALNYLIWEDNVIAIPKAGRKDHVDENFGAMGWRLSREDREKARRCFS

SEQ ID NO: 8441 - protein, 331 aa, Pseudomonas syringae pv. syringae B728a
MDYVKLGNTGLDISRLCLGCMTFGEPDAGTHPWTLGEEASRPIIKHAVEQGINFFDTANSYSAGTSETIVGKLLKEFTRRDETVIATKVFFPANMWEGSTRPNEKGLSRKAIMSSIDASLTRLGTDYVDLYQIHRWDYDTPIEETMEALHDVVRAGKARYIGASSMYVWQFAKAQQVATAHGWSRFVSMQNYLNLVYREEEREMIPLCIDQGVGLMPWSPMARGRLTRPHGQQTERTRTDVSGQSFYEATEKEDGRVIDAVEQLAAERGVPMAQIALAWVLAKRGVSAPIVGASKATQLDDAIAALQLVLSDEDIKRLEAPYVPHAVTGFV

SEQ ID NO: 8442 - protein, 473 aa, Cunninghamella elegans
MNNFIFKRLNVKEFYEAETKKLVENGHEFHLRLERTGYVIHTCNPQAIKEILLKGDKFPKYDYNTSNNEDGSFFHEFVGFENVLMTNGSTWKKHRMIVNPAFKTALPSRLFGDCTRDLFKLWDNEYANEPFDSDIHNITERLTLQIIGKAAFDFDFNAILDEKSIWKQTYDGINKAASDPLFILFPILEEKFLWLFPKRQQSFKLLNEWKKMLLSIIEKKREAIQNNVDHGVEEAEKDLLTLMIESEHRGEGALSNEELLSDLIIFFIAGHDTTAFALSAAIYYLAKHPDIQEKARQEAISVLCPNGEVDEDIFPTTEDTKHFVYINQIMKETLRINGSVLFLLSPRLVTQDVNLSGVFIPKGSQINVNIHEVHHNPNVWHDPETFDPDRWASNGEAEQLAGKGMAWVPFSNGNRQCIGMNFSLLEQRVILGSLLRKYEWTLPEDSIHQDYMVNKFNLIPKPIDLKIRFKRRY

SEQ ID NO: 8443 - protein, 327 aa, Glycine max
HYVGPLLTMLDEVYRRYRQYYQQMQAVVTSFEYVSGLSNAAPYASLAIKAMSKHFRCLKNAITDQIQFANKAHFHISNRKDESPRFGNSDRGPYGQRPGFLEHQPVWRPQRGLPERAVTVLRAWLFEHFLHPYPTDTDKLMLAKQTGLSRSQVSNWFINARVRLWKPMVEEIHMLETRQAPKNLQKEEHCRNKLSDHLPSDNSIVSENPSTSTDKFQEAPYKRAINELPNIPVRTQEQLNLPCTSNQPGGVGVSMGGSASNSVSLTLGLYQNHGIGLAEPFPLNAAQRFGVALETNNEGYVMSDYESQNRHFGRDVIGGQLLHDFVG

SEQ ID NO: 8444 - protein, 131 aa, Oryza sativa
MAATSSLTATAASPPLLLKPAPSPLAASFLRPVSRFSRFQSVKTKATENDQTEKSPPKGSSLVCQDCEGNGAIVCNQCKGDGVNSVDHFNGRFKAGALCWLCRGKREILCGSCNGAGFLGGFMSTSDSTAE

SEQ ID NO: 8445 - protein, 244 aa, Buchnera aphidicola str. Sg (Schizaphis graminum)
MKIEKKTALVTGANQGLGKEIAIKLSQKGIQVIGTSTTVDGVKTINKYLKKNGFGFILDLKDTDSILEKMKEICQKKYSIDILINNAGITSDNLLVYMSNKEWENVIKINLTSVFYMSKSVIRSMIKKRYGRIVTIGSVIGYLGNRGQINYSASKSGLIGFHKSLALEVAQKGITVNIVSPGFIKTNLTKNLNVFQYKKHLSKIPMKRIGTAEEIANAVIFLSSEKASYITGQTIHVNGGMYMT

SEQ ID NO: 8446 - protein, 249 aa, Pseudomonas syringae pv. tomato str. DC3000
MQQLKQKRAVITGAGSGIGAAIARAYAVEGAYLVLGDRDPVNLANIAEHCRQLGAQVHECVADVGSVEGAQASVDACVEHFGGIDILVNNAGMLTQARCVDLSIEMWNDMLRVDLTSVFVASQRALPHMIAQRWGRIINVASQLGIKGGAELTHYAAAKAGVIGFSKSLALEVAKDNVLVNAIAPGPIETPLVAGISSAWKTAKAAELPLGRFGLAEEVAPVAVLLASEPGGNLFVGQTLGPNSGDVMP

SEQ ID NO: 8447 - protein, 217 aa, Triticum aestivum
MTKKLRFSMPFPMLAFPLYLFARSPGKEGSHFNPNSDLFQPNEKKDVLTSTASWLAMIGVLAGLTFVMGPLKMLKLYAIPYVIFVMWLDFVTYLHHHGHEDKVPWYRGKEWSYLRGGLTTLDRDYGLINNIHHDIGTHVIHHLFPQIPHYHLVEATEAAKPVLGKYYKEPEKSAPLPFHLLQVLSRSLKEDHYVSDTGDIVYYQSESETSTCAQSSD

SEQ ID NO: 8448 - protein, 351 aa, Triticum aestivum
MAVASASPLPSAPSAKPATAPSPLAPSSGFLALRARRCGAPRLRPAAAAWRRLRVEAIRTQQEKQRTEVPVEESAPVRGAAAPLDGVGADDPMVASSDESWVVRLEQSFNIFATESMIMILDGVYRDRNYARFFVLETIARVPYFGFISVLHLYETFGWWRRADYIKVHFAQSWNEFHHLLIMEELGGNALWIDRFLARFMAFFYYFVTVAMYMLSPRMAYHFSECVERHAYSTYDKFLKLHEEELKRLPAPEAALNYYLNEDLYLFDEFQTAGVPCSRRPKIDNLYDVFVNVRDDEAEHCKTMKACQTHGNLRSPHSMLDCLEVDSECVIPEPEDDCEGFVDSVKKSLTK

SEQ ID NO: 8449 - protein, 135 aa, Zea mays
MKREISETHDTLRFGLNAGVKADLAPPHPLQSSIQSEAKFWADKKKFGTEAIYGSALNIRKDLDAQILSRFQRPPGALPSSLLGYEALTGSLDDFGFEDYLNMPQDFEGFRQPDMHHGMEVRLGLSKGPICPSFS

SEQ ID NO: 8450 - protein, 117 aa, Buchnera aphidicola
NLFGDIISDECAIITGSIGMLPSASLNEKKFGLYEPAGGSAPDIEGKNIANPIAQILSVSMLVRYGMNLKKIADKIDQSVISVLKKGYRTADISNNNNYLKTNEMGDVIANTLISGE

SEQ ID NO: 8451 - protein, 287 aa, Rhizobium sp. USDA 1083
  unsure (1)..(287): unsure at all Xaa locations
RGKTXIKEFDSFPTLEQLPLWGFXGSSTHQAEGRSSDCVLKPVAVYPDPVRTNGALVMCEVMMPDGKTPHPSNTRATVLDDESTWFGFEHEYFFYKNGRPLGFPEQGYPAPQGPYYTGVGYKNVGDIARQIVEEHLDICLAAGINHEGINAEVAKGQWEFQVFGKGSKKAADEVWLARYXLLRLTEKYGIDVEXHCKPLGDTDWNGSGMHANFSTAYLREVGGKDYFEALMAAFEKNLHDHINVYGPDNHLRLTGKHETAPWDKFSYGVADRGASIRVPHSXVNXRY

SEQ ID NO: 8452 - protein, 279 aa, Lactobacillus gasseri
MATIQWYPGHMNKAKNQLEDNLDLIDVLIEVLDARLPVSSRNPMIGQLTKKKPHIIILNKSDLADPIQTKKWTRYFQDEGNFVISMDAQHNTNMTSLFKIIKLAGKKKTEKLIAKGASNPMIRVAIAGIPNCGKSTIINRMVGRNAAIVGDKPGVTRGQSWLKTKTNVQILDTPGILWPKFSDQEVGYKLAACGAIKADVFHPDDVALFVIEFLKQNYKKDLTKFAQATNEELENMSNPDLLLAMTNKYGMRDDYDKFSLFMLQRLRKGKLGRITFDLR

SEQ ID NO: 8453 - protein, 300 aa, Oryza sativa
  unsure (1)..(300): unsure at all Xaa locations
GMASSPSSFFPPNFLLHMAQQQAAXXPHDPQVLPSSAQCPSLQEFRGMAPMLGKRPMSYGDGGGGGDEVNGGGEDELSDDGSQAGEKKRRLNVEQVRTLEKNFELGNKLEPERKMQLARALGLQPRQVAIWFQNRRARWKTKQLEKDYDALKRQLDAVKAENDALLNHNKKLQAEIVALKGREAASELINLNKETEASCSNRSENSSEINLDISRTPPXXTPPRSTPPIARPASGGGVDIDQLLHSSSGGAXXGPKMEXXHGGGGNVQAASVDTASFGNLLCGVDEPPPFWPWPDHQHFH

SEQ ID NO: 8454 - protein, 345 aa, Emericella nidulans
MKYMSLDQRGSVMAEYIWIDAHGGTRSKTKTLSKAPSSVDELPEWNFDGSSTAQAPGDNSDVYLRPVAMYPDPFRRGDNILVLCETWDSDGSPNKFNYRHDCARLMETHAKEEFWFGLEQEYTLLGPDGWPYGWPKGGFPGAQGPYYCGVGTGKVYCRDIVEAHYRACLYAGVKISGINAEVMPSQWEYQVGPCHGIEMGDHLWISRFLLHRVAEEFGVKISNDPKPIKGDWNGAGLHTNVSTTSTRAEGGIKAIESYMKKLEARHVEHIAVYGEGNEERLTGRHETGNIDKFSYGVADRGGSIRIPRQVAKDGKGYFEDRRPASNADPYQITGIIAETVSFSNR

SEQ ID NO: 8455 - protein, 81 aa, Buchnera aphidicola
GGSAPDIAGKNIANPIAQILSIAMLVRYTMKLHKIADDIESSVIDALKKGYKTLDIANVNETHISTSDMGDVISNILNKRI

SEQ ID NO: 8456 - protein, 440 aa, Achromobacter xylosoxidans subsp. denitrificans
MSAAKLPDLSHLWMPFTANRQFKANPRLLASAKGMYYTSFDGRQILDGTAGLWCVNAGHCREEIVSAIASQAGVMDYAPGFQLGHPLAFEAATAVAGLMPQGLDRVFFTNSGSESVDTALKIALAYHRARGEAQRTRLIGRERGYHGVGFGGISVGGISPNRKTFSGALLPAVDHLPHTHSLEHNAFTRGQPEWGAHLADELERIIALHDASTIAAVIVEPMAGSTGVLVPPKGYLEKLREITARHGILLIFDEVITAYGRLGEATAAAYFGVTPDLITMAKGVSNAAVPAGAVAVRREVHDAIVNGPQGGIEFFHGYTYSAHPLAAAAVLATLDIYRREDLFARARKLSAAFEEAAHSLKGAPHVIDVRNIGLVAGIELSPREGAPGARAAEAFQKCFDTGLMVRYTGDILAVSPPLIVDENQIGQIFEGIGKVLKEVA

SEQ ID NO: 8457 - protein, 357 aa, Nicotiana tabacum
MGSLDVEKSAIGWAARDPSGLLSPYTYTLRNTGPEDVQVKVLYCGLCHSDLHQVKNDLGMSNYPLVPGHEVVGKVVEVGADVSKFKVGDTVGVGLLVGSCRNCGPCKREIEQYCNKKIWNCNDVYTDGKPTQGGFANSMVVDQNFVVKIPEGMAPEQAAPLLCAGITVYSPFNHFGFNQSGFRGGILGLGGVGHMGVKIAKAMGHHVTVISSSNKKRQEALEHLGADDYLVSSDTDKMQEAADSLDYIIDTVPVGHPLELYLSLLKIDGKLILIGVINTPLQFISPMVMLGRKSITGSFIGSMKETEEMLDFCKEKGVTSQIEIVKMDYINTAMERLEKNDVSYRFVVDVAGSKLDQ

SEQ ID NO: 8458 - protein, 191 aa, Glycine max
ITLALSQFSATQLGDVFLCKEVVSRKVLVDQGHRQVVDLDQAAIWKFLWWSGTISINVLVDQNRKDHSMKFKQTKAGFMKKFEGCWRVEPLFVDEAMCHPFKPVTKEDYNACTRGKGRIGSKVSLEQILQPSIVPPPPLSWYLRGITARTTEMLINDMLAETARIRGGYEAEKSKAEELQVKPGENVDPGF

SEQ ID NO: 8459 - protein, 427 aa, Marinococcus halophilus
MMQNDLSVFNEYESEVRSYVRGFPTVFHQAKGYKLWDLDGKEYVDFFSGAGALNYGHNDENMKQKLLTYIQEDGVTHSLDMATKAKGEFIDAFQNIILKPRNMDYKIMFPGPTGANSVESALKLARKVTGRTNVVSFTNGFHGMTIGALSVTGNKFKRNGAGMPLSNTSTLPYDQFLKESNNSIEYIENFLDNGGSGLDKPAAFIVETVQGEGGLNAASSEWLRSIEKICRERDIKLILDDVQAGVGRTGTFFSFEPAGIKPDFVCLSKSIGGNGSPLAITLVAPEYDKFAPGEHNGTFRGNNFAFVTGTEALNYWKDDRLEKNVQEKSERITSFLDDMIKKHPEMKGVRKGRGFMQGIMSPIEDLADNIAGRCFEHGLIMETAGAEDEVFKLFPPITIDDEGLERGLSILQQAIEEVTAESNLVAK

SEQ ID NO: 8460 - protein, 82 aa, Oxalis peduncularis
GINISGTNGEVMPGQWEYQVGPSVGIEAGDHIWASRYILERITEQAGVVLTLDPKPIDGDWNGAGCHTNYSTKSMRDEGISL

SEQ ID NO: 8461 - protein, 352 aa, Desulfitobacterium hafniense
MPKIAVLPGDGIGQEIIPQAVRVLKAVLAETDAEFEFQDYPIGGAAIELVGKALPDETLQGCREADAVLLGAVGGHQWDHLPASERPETAALLGLRKGLNFYANIRPVRMIPSLLATSTLKENVLDGVDMVVIRELTGGVYFGEKGRSDNPRSAYDKMTYSEEEIRRILIQGFETAMLRSKKLCSVDKANVLETSRLWREIANELAKEYPEVELTHMYVDNAAMQLVRNPKQFDVIVTENMFGDILTDLASMLGGSIGMLSSASLSGTQGMYEPAHGSAPDIAGKNLANPLATILSAALMLRYSFGMEAEALRIESAVEKVLEQGYRTGDLAQAGDKVVGTIEMGDAVLAAL

SEQ ID NO: 8462 - protein, 388 aa, Salmonella enterica subsp. enterica
QNGKLNVPENPIIPFIEGDGIGVDVTPAMLKVVDAAVEKAYKGERKISWMEIYTGEKSTQVYGQDVWLPAETLDLIRDYRVAIKGPLTTPVGGGIRSLNVALRQELDLYVCLRPVRYYQGTPSPVKHPELTDMVIFRENSEDIYAGIEWKADSADAEKVIKFLREEMGVKKIRFPEHCGIGIKPCSEEGTKRLVRAAIEYAITNDRDSVTLVHKGNIMKFTEGAFKDWGYQLARDEFGGELIDGGPWLKIKNPNTGKEIVVKDVIADAFLQQILLRPAEYDVIACMNLNGDYISDALAAQVGGIGIAPGANIGDECALFEATHGTAPKYAGQDKVNPGSIILSAEMMLRHMQWFEAADLIVKGMEGAIAAKTVTYDFERLMDGAKLLK

SEQ ID NO: 8463 - protein, 467 aa, Bacillus subtilis subsp. subtilis str. 168
MNTNQDNGNQLQRTMKSRHLFMISLGGVIGTGFFLGTGFTINQAGPLGAVLSYLVGGFIMFLTMLCLGELAVAFPVSGSFQTYATKFISPAFGFAFGWLYWLGWAVTCAIEFLSAGQLMQRWFPHIDVWIWCLVFAALMFILNAITTKAFAESEFWFSGIKILIILLFIILGGAAMFGLIDLKGGEQAPFLTHFYEDGLFPNGIKAMLITMITVNFAFQGTELIGVAAGESEDPEKTIPRSIKQTVWRTLVFFVLSIIVIAGMIPWKQAGVVESPFVAVFEQIGIPYAADIMNFVILIALLSVANSGLYASTRILYAMANEGQAFKALGKTNQRGVPMYSLIVTMAVACLSLLTKFAQAETVYMVLLSLAGMSAQVGWITISLSQIMFRRKYIREGGKIEDLKFKTPLYPVLPLIGLTLNTVVLISLAFDPEQRIALYCGVPFMIICYIIYHVVIKKRQQANRQLEL

SEQ ID NO: 8464 - protein, 368 aa, Sulfolobus solfataricus
MAKLLYLWYQTYKMCNKMEYMKFGNSGLKVSKFCLGTWHLPPSKERDSYGVYKVDEEESKKTIVKAIDLGVNFFDTANVYHGVMQGPDVFHVGNAERILGEAIKGYDRESLVLATKVRGKMAEHANGEGLSRKHIMWQVRESLKRLNTDYIDIYLMHRPDPDTPIEETMETFHDLVRQGKIHYIGESYFDPTDIPYLVKIAKDLHVPFIAMQEPYNFLERDIEKDKFILAKTYGLGIMAYIPLAQGVLTGKYLNTTPDMSRATYVPEISNRYFTKENFEVLREFHEIAKELGVTDTQLALAWIFKIQEINQITIVPIIGVTKINQLEENIESLNVKISNDTYKKLDEISKRVKVNWEIKYNKIIKRFE

SEQ ID NO: 8465 - protein, 538 aa, Candida maltosa
MSVSFVHNVLEVVTPYVEYYQENLTKWYILIPTILLTLPFLSILHTKYLEYKFNAKPLTNFAQDYSFGVITPLMLMYFKWHGTVMEFACNVWNNKFLVLNGNVRTVGLRIMGLNIIETTDPENVKAILATQFNDFSLGTRHDFLYSLLGDGIFTLDGAGWKHSRAMLRPQFAREQVAHVKLLEPHVQVLFKHVRKSQGKTFDIQELFFRLTVDSSTEFLFGGSVESLRDASIGMVPSTKNIAGREEFADAFNYSQTYNAYRFLLQQFYWILNGSKFNKSIKTVHKFADFYVQKALSLTDDDLEKQEGYVFLYELAKQTRDPKVLRDQLLNILVAGRDTTAGLLSFLFFELSRNPTVFEKLKEEIHNRFGAKEDARVEEITFESLKLCEYLKACVNEALRVYPSVPHNFRVATRNTTLPRGGGKDGMSPIAIKKGQNVMYTISATHRDPSIYGEDANVFRPERWFEPETRKLGWAYVPFNGGPRICLGQQFALTEASYVTVRLLQEFHTLTQDANTRYPPRLQNSLTVSLCDGANIQMY

SEQ ID NO: 8466 - protein, 171 aa, Oryza sativa
MAAAEGEQGKTVVVVGVDDSEHSNYALEWTMQHLASGMAGSGGAELVIVHAKPSPSSVVGFGAGPGSGEVVRYVEADLRKTAEDVVEKARRLCIANAMHALIEVIEGEPRYVLCNAVEKHSAGLLVVGSHGYGAIKRAFLGSVSDYCAHHAHCSVMIVKQPKAKRSRAETA

SEQ ID NO: 8467 - protein, 106 aa, Sorghum bicolor
GLKRGRWTAEEDQILANYIAEHGEGSWRSLPKNAGLLRCGKSCRLRWINYLRADVKRGNISKEEEDIIIKLHATLGNRWSLIASHFPGRTDNEIKNYWNSHLSRQI

SEQ ID NO: 8468 - protein, 355 aa, Clostridium tetani E88
MKISPLQIGNLKCRIPIIQGGMGIGVSLSGLASAVAREGGVGVMSGVQIGFKESDFEFNTKEANLRALKKEIRRAKEMSNGGILGVNLMVAMNNYEEMVRTSIEEGVDLIISGAGLPTNLPQFVKNKATKVVPIVSSGKAANVIFKLWERRYSYVPDLVVVEGPEAGGHLGFEVSELNKKIFLEDLYKDVKKILIEFEKKYNKKISLAVAGGIYDGKDITKYLKLGADAVQMGTRFIATDECDADLNYKQAFLNSKKEDIDIIKSPVGLPGRVIKNKFSNNVSKVKEEVHKCFNCLKRCNPKTTQYCISKALINSVNGNIEEGIIFSGSNGYKIDKIKPVKELIKELIMEVNKCE

SEQ ID NO: 8469 - protein, 326 aa, Bacillus anthracis str. Ames
MQKETAIIIGGGPCGLAAAISLQKVGINPLVIEKGNIVNAIYNYPTHQTFFSSSEKLEIGDVAFITENRKPVRNQALAYYREVVKRKSVRVNAFERVEKVQKDGEVFQVETTKRDGSKEIYIAKYIVVATEYYDNPNYMNVPGEELKKVAHYFKEGHPYFDRDVVVIGGKNSSVDAALELVKAGARVTVLYRGSEYSPSIKPWILPEFEALVRNGTIQMHFGAHVKEITEHTLTYTVDGEANTIQNDFVFAMTGYHPDHSFLTKMGVRIDEATGRPIYAEDTMETNAANIFIAGVIAAGNNANEIFIENGRFHGDAIAQTIATREI

SEQ ID NO: 8470 - protein, 355 aa, Ralstonia metallidurans
MKIAVLPGDGIGPEIVAEAVKVLNALDEKFEMETAPVGGAGYEAEGHPLPDNTLKLAKEADAILFGAVGDWKYDSLDRPLRPEQAILGLRKHLQLFANFRPAICYPELTGASSLKPELVAGLDILIVRELNGDIYFGQPRGVREAPDGLFKGAREGFDTMRYSEPEVRRIAHVAFQAAAKRGKKLCSVDKANVLETFQFWKDIVIDVSKEYPDVELSHMYVDNAAMQLVKAPKSFDVIVTGNMFGDILSDEAAMLTGSIGMLPSASLDANNKGLYEPSHGSAPDIAGKGVANPLATILSAAMMLRYSLNRAEQADRIENAVKKVLAQGYRTADIVTPGCKQVGTREMGEAVLAAL

SEQ ID NO: 8471 - protein, 151 aa, Glycine max
MSPSLDLPPKGGFSFDLCRRNAMLQNKGLKAPTFLKTGTTIVGLVFQDGVILGADTRATEGPIVADKNCEKIHYMAPNIYCCGAGTAADTEAVTDMVSSQLQLHRYHTGRESRVVTALTLLKKHLFNYQGHVSAALVLGGVDITGPHLHTI

SEQ ID NO: 8472 - protein, 118 aa, Triticum aestivum
MRDFPSCFGESGVQIADAASSSSSAGKGPAQLLAARLYHPRRPARPCLVSATWSKSLMGQGLSVAVDALSGQSLCKADIKPWLFSKKKGSKTLDADGAKVDIFWDLSAARFGAGPEPL

SEQ ID NO: 8473 - protein, 457 aa, Streptomyces clavuligerus
MGEAARHPDGDFSDVGNLHAQDVHQALEQHMLVDGYDLVLDLDASSGVWLVDAVTQKRYLDLFSFFASAPLGINPPSIVEDPAFMRELAVAAVNKPSNPDLYSVPYARFVKTFARVLGDPRLPRLFFVDGGALAVENALKAALDWKAQKLGLAEPDTDRLQVLHLERSFHGRSGYTMSLTNTEPSKTARFPKFGWPRISSPALQHPPAEHTGANQEAERRALEAAREAFAAADGMIACFIAEPIQGEGGDNHLSAEFLQAMQRLCHENDALFVLDEVQSGCGITGTAWAYQQLGLQPDLVAFGKKTQVCGVMGGGRIDEVPENVFAVSSRISSTWGGNLADMVRATRLLETIERTQVFDTVVQRGKYFRDGLEDLAARHPSVVTNARGRGLMCAVDLPDTRTRNEVLRLMYTEHQVIALPCGGRSLRFRPALTIAEHEIDQALQALASSVTAVAESV

SEQ ID NO: 8474 - protein, 476 aa, Thermoplasma volcanium
MNDTSAGHLKSNAVGFWPLLGQAIAMISPLGAVAATMTGSASIALGSLPLAYLIAIFAVLFWINTPYQYSKKIASAGGFYTYNRNGAGQYYGSISGYVLFFSYYMTYTNAILFITAVFIPGLFEIFFGITLTAWIWIPVLIAIGLLVLLPAYLGIEGSTKYSLASSIIQIALLVILSLTIIVIKGPANTLEPFTPKPAGGFGPVFVGMILAIFSMSGSSAVVSLGEEAKQPKRNIRNALLISFLVTGVVFVLTSYALTIGWGISNMNTFAQSNPAAGLTVGQGVPGIIEALKYMGMPMAIAMMIFAVNSLYTGSLAPLNSAARMFFAMSRDGIAPKVFAKTHGKYKTPHVALVFIAFTGILVSLIAGLAMGPFNGFLYLVTASAVALFIGHIMTDISLPVAFKKFREFSVLKHAVLPAISLVLLLIGIYYSFFPPTYPTNIAIITAVIFMVAVAIGINVYLRNGQRKMPTSYESDF

SEQ ID NO: 8475 - protein, 277 aa, Nicotiana tabacum
MGRAPCCEKMGLKKGPWTPEEDQILISFIQQNGHGNWRALPKQAGLLRCGKSCRLRWTNYLRPDIKRGNFTKEEEDTIIQLHEMLGNRWSAIAAKLPGRTDNEIKNVWHTHLKKKLKDYKPPQNPKRHSKNHDSKGPTTSESSNNSHLTFIYTQKHIIDSSVPAPNSPQISSSTEMSTVTLVDDHQMVIKQEEMESSEYFPEIDESFWTDKLSTDNNWSNTHDHVMVTADQELQVQLPFSSLKEENVDMLTTKMEDDMDFWYNVFIKTDDLPELPEF

SEQ ID NO: 8476 - protein, 339 aa, Pseudomonas aeruginosa PAO1
MARKISYQQAINEALAQEMRRDPSVFIMGEDNAGGAGAPGEDDAWGGVLGVTKGLYHQFPGRVLDTPLSEIGYVGAAVGAATRGMRPVCELMFVDFAGCCLDQILNQAAKFRYMFGGKAVTPLVIRTMVGAGLRAAAQHSQMLTSLWTHIPGLKVVCPSSPYDAKGLLVQAIRDNDPVIFCEHKLLYSMQGEVPEELYSVPFGEANFLRDGDDVTLVTYGRMVHLALDAAASLARQGISCEVLDLRSTSPLDEDSILESVEKTGRLVVVDEANPRCSMATDIAALVAERAFSALRAPIRRVTAPHTPVPFSDALEDLYIPDAAKIEAAVRQALEGRDAA

SEQ ID NO: 8477 - protein, 388 aa, Oryza sativa
  unsure (1)..(388): unsure at all Xaa locations
MSASARVAAPTSRVATVEEDDNEDFDPGAAPPFGLADIRAAIPKHCWVKDPWRSMGYVLRDVVVVFALAAAAARLHSCLAWPLYWAAQGTMFWALFVLGHDCGHGSFSNNSRLNSVMGHILHSSILVPYHGWRISHRTHHQNHGHVDKDESWHPLPERLYRSLNRATRMLRFSIPFPMLAYPFYLWSRSPGKSGSHFHPSSDLFQPNERNDVLTSTACWVAMAALLAGLTFLMGPLLMLNLYFVPYWIFVMWLDFVTYLHHHGHNDKLPWYRGKEWSYLRGGLTTVDRDYGWINNIHHDIGTHVIHHLFPQIPHYHLIEATEAASVMGKYYREPDKSGPFPLHLFGALSRSLKRDHYVSDTGDVVYYQTDPANXINFTFPSILLSPEA

SEQ ID NO: 8478 - protein, 551 aa, Saccharomyces cerevisiae
MSSGTENDQFYSFDESDSSSIELYESHNTSEFTIHGLVFPKLISVTSQDSEFDINEDEDGVDTIYEGMLDAPLTKNNKRILCEGSVPNLSYECLTTKGIFERMLQRVDHLQPIFAIPSADILILLQHYDWNEERLLEVWTEKMDELLVELGLSTTANIKKDNDYNSHFREVEFKNDFTCIICCDKKDTETFALECGHEYCINCYRHYIKDKLHEGNIITCMDCSLALKNEDIDKVMGHPSSSKLMDSSIKSFVQKHNRNYKWCPFADCKSIVHLRDTSSLPEYTRLHYSPFVKCNSFHRFCFNCGFEVHSPADCKITTAWVKKARKESEILNWVLSHTKECPKCSVNIEKNGGCNHMVCSSCKYEFCWICEGPWAPHGKNFFQCTMYKNNEDNKSKNPQDANKTLKKYTFYYRLFNEHEVSAKLDWNLGQTLGTKVHALQERIGISWIDGQFLSESLKVLNEGRTVLKWSFAVAYYSDASHNLTKIFVDNQMLLANAVESLSELLQIKTPEVIMKRRPEFYNKAGYVENRTTALMECGRELLCKGICKAAE

SEQ ID NO: 8479 - protein, 321 aa, Glycine max
  unsure (1)..(321): unsure at all Xaa locations
MGVKGFVEGGIASIIAGCSTHPLDLIKVRMQLQGENNLPKPVQNLRPALAFQTGSTVHVAAAIPQTRVGPIAVGVRLVQQEGLAALFSGVSATVLRQTLYSTTRMGLYDVLKTKWTDSVTGTMPLSRKIEAGLIAGGIGAAVGNPADVAMVRMQADGXRLPPAQRRNYKSXVVDAITXMAKQEGVTSLWRGSSLTVNRXAMLVTVSQLASYDQFKETILENGMMRDGLGTHVTASFAAGFVAAVASNPVDVIKTRVMNMRVEPGATPPYAGXALDCALKTVRAEGPMALYKGFIPTISRQGPFTVVLFVTLEQVRKLLKDF

SEQ ID NO: 8480 - protein, 229 aa, Zea mays
CSNSFSRLADDDFPGEFYEPYDQLVELEWLSNYMGEGEETFAAEDLEKLKLISGGFSPAAVNVSPPAPVAVASAASAAQSGMFLPVPAKARSKRSRAAPGNWSSRLVVLPPTPASPPAPAASMAISPSESGDAAAPAPAPAEGRRCVHCDTDKTPQWRTGPMGPKTLCNACGVRYKSGRLVPEYRPAASPTFVMSKHSNSHRKVLELRRQKEVVVQQPPHVMGGAGGPA

SEQ ID NO: 8481 - protein, 216 aa, Gossypium hirsutum
LDPIDGTKGFLRGDQYAIALALLDGGKVVLGVLACQNLPLTSLSDAGQHSPNNKVGCLFFAVVGGGTYMQPLDGSSAVKVQVSAVENPEEASFFESYEAAHSMHDLSSLIAQKLGVKAPPVRIDSQAKYGALSRGDGAIYLRLPHKGYREKIWDHAAGCIVVSEAGGVAQMLQAAIGFFKGKYLDLDTGIIVTNQKLMPLLFNAVRKSIQEKASSL

SEQ ID NO: 8482 - protein, 1408 aa, Mycobacterium tuberculosis CDC1551
  unsure (1)..(1408): unsure at all Xaa locations
MMSLVIVAPETVAAAALDVARIGSSIGAANAAAAGSTTSVLAAGADEVSAAIATLFGSHAREYQAISTQVAAFHDRFAQTLSAAVGSYVSAEATNAAPLATLEHNVLNALNAPTQALLGRPLIGDGAAGAPGTGQAGGAGGILWGNGGAGGSGAPGQVGGAGGAAGLFGTGGAGGAGGAGAXGGAGGSGGWLLGNGGVGGAGGQSLLGGATGGAGGNAGLFGVGGTXGPGGPGGPGGVGGTGGAGGLGGTLYGAGGHGGAGGPGPIGGVGGHGGVGGAAGLLGVGGHGGAGGHGAEGVAGAAGEDLSPHGTSGGVGGDAGDGGTGGRGGWLAGAGGAGGAGGVGGTGGAGGAGFSRALIVAGDNGGDGGNGGMGGAGGAGGPGGAGGLISLLGGQGAGGAGGTGGAGGVGGDGGAGGPGNQAFNAGAGGAGGHGGDPGAGGAGGTGGAGSTIGAHGAAGASPTSGGNGGAGGNGAHFSSGGKAGGNGGAGGAGGLVGNGGAGGAGGNGAPGAPPSGGDPNGGGGGAGGAGGKGGDGGAQAGDGGAGGAGGKGGNGGNGATGATGLNGLGAGADGTDGGKGGNGGAGGGGGAGGQGGKALAATHQDGSMGAGGAGGNGGAGGMGGDGGNGAKGTFDNGGDGVGGNGGNGGSRGIGGAGGIGGAGSTAGADGARGATPTSGGNGGTGGNGANATVAGGAGGASGKGGNGGLVGNGGAGGKGGDGMAGVAGSSPTTAGESGTSGQNGGAGGAGGAGGRGGDFGGDGGTGGAGGNGADGGAGGNGANGANATTPGAKGGDGGHGGPGAQGGNGGQGGPGGLAGNLFGQNGIQGVGGSGGKGGAGGLAGDGGNGANGNFAFGDGNGGHGGNGGNPGAGGQGGSGGAGSTPGAKGAHGFTPTSGGDGGDGGNGGNSQVVGGNGGDGGNGGNGGSAGTGGNGGRGGDGAFGGMSANATNPGENGPNGNPGGNGGAGGAGGAGLNGGNGGAGGNGGLGGFGGNGAAGANGVAVGAPGQPGGAGGHGGAGGNGGAGGNGGQGVVSDGAGGAGGAGGDGGAPGDGANGGNGQGAGAFAGGGGGRGGDGGNAGNAGAGGPGGTGSTAGKAGPAGSIXHDGGNGGHGGHGAASGGNGGPGGHGGNGGNGGTGANGGNGGIGGTGGAGSTGAKGVLGTNEGDGGDGGRGGNGGRGGNGGQGLTGAGGNGGTGGTPGNGGNGGNGASGDLVTSPGDGGGGGRGGDAGRGGDAGLGGSSGPGGTPGDWGTGGTGGTGGTGGQGANGGLTGGRGGTGGNGGNGNTGGTGGAGGTGGTGHNGSQPGMGGNGGAGGFGGNGFAGVGGRGGMGGSGGTGGTGDAGPFGTGTGGTGGHGGQGGGGGFSILLGLGGLGGLGSPGSIATGTAGGAGGGGGFGGLGGGEFV

SEQ ID NO: 8483 - protein, 303 aa, Solanum tuberosum
VILYPQAIFKDPFRGGNNILVICDTYTPAGEPIPTNKRHKAAQIFSDPKVASQVPWFGIEQEYTLLQPNVNWPLGWPVGGYPGPLGSYYCGAGVEKSFGRDISDAHYKACLYAGINISGTNGEVMPGQWEFQVGPSVGIEGGDHIWCARYLLERITEQAGVVLSLDPKPIEGDWNGAGCHTNYSTLSIREEGGFEVIKKAILNLSLRHKGHISAYGEGNERRLTGKHETASIDQFSWGVANRGCSIRVGRYTEKEARGYLEDRRPASNMDPYVVTALLAETTILWEPTLEAEALAAQKISLKV

SEQ ID NO: 8484 - protein, 345 aa, Oenococcus oeni MCW
MDGKVAVLTGTKKIEVKKLPVPEINDDEMLVKVEGCGVCGTDVFEYKSDPFNYIPVNLGHEGTGEIVKMGKNVKNDWTGKTLKIGDKIVCGPAANGDIYGLMGGEKHYFNGWLANYMVINPNSVVFNVSDMPLDLRILIEPAAVSCHAVAKSKEIYTFKHSSSVVVQGVGPIGLMVIAQMKTLGVRHIIAVDGNASRLELAKKIGATATVNIDDGDSVAAVKELTDGKGANFVFQCTGSTKGASTAWKFLTDHGGICEVGFFVDNGEATYNPHFDVCMPETKITGSWAYVPEDWVEATEFLRETKDEGLDMTQLITNVYPLDQMNEAMAKNMSGTGVKIVYKNNQ

SEQ ID NO: 8485 - protein, 379 aa, Arabis drummondii
  unsure (1)..(379): unsure at all Xaa locations
MITTGQIIRCKAAVAWEAGKPLVMEEVEVAPPQKHEVRIKILFTSLCHTDVYFWEAKGQTPLFPRIFGHEAGGIVESAGEGVTDLQPGDHVLPVFTGECGDCRHCHSEESNMCDLLRINTERGVTIHDGESRFSINGKPIHHFVGTSTFSEYTVVHSGQVAKINPDAPLDKVCIVSCGLSTGLGATLNVAKPKKGQSVAIFGLGAVGLAAAEGARIAGASRVIGVDLNPKRFDEAKKFGVTEFVNPKDHDKPVQQVIAEMTDGGVDRSVECTGSVQAMIQAFECAHDGWGVAVLVGVPSKDDAFKSHPMNFLNERTLKGTFFGNYKPKTDIPGIVEMYMNKELELEKFITHTVPFSEINKAFDNMXKGESIRCIITMGA

SEQ ID NO: 8486 - protein, 616 aa, Zea mays
  unsure (1)..(616): unsure at all Xaa locations
MAVMAEVVSTTGAALRSPATQQPAAAGAAKGTDAEKLQFIEDMTSNVDAVQERVLGEILARNADTEYLSSRCGLAGATDRATFRAKVPMATYEDLQPYIRRIADGDRSPILSGHPVSEFLTSSGTSGGERKLMPTIEDELNRRQLLYSLQMPVMNLYVPGMDKGKALHFLFVKSETKTPGGLAARPVLTSYYKSNHFRNRTRPLPXNILIEKSPTAAILCAXFQSMYAQMVCGLCQRQDVLRVGAVFASGLLRAIRFLQLNWEQLAEDIEAGSLTPRVTDPSVREAVAGILRPDPAVAELVRSECSGGDWAGIVTRIWPNTKYLDVIVTGAMAQYIPTLKHYSGGLPMACTMYASSECYFGLNLRPMCDPSEVSYTLMPNMCYFEFLPMGGAVDASQLVDLGRVERGREYELVITTYAGLNRYRVGDVLQVTGFHNSAPQFRFVRRKNVLLSIESDKTDEAELQRAVERASALLRPHGAAVVEYTSQAYTKSIPGHYVVYWELLQAKGGAAVDGETLEGCCLEMEEALNAVYRQSRVADGSIGPLEIRVVRPGTFEELMDYAISRGASINQYKVPRCVTFPPIIELLDSRVVSSHLSPALPHWTAGQRSGSGSGSD

SEQ ID NO: 8487 - protein, 392 aa, Tristellateia africana
DLEPVNPADVPVTAAGALKSYKLAAKAISRLQSLPSGNISLLCDVLVKEVRDLTGYDRVMVYKFHEDEHGEVVSECRRSDLESYLGLHYPATDIPQASRFLFMKNKVRMICDCLAPQVKVIQDERLPQPLSLCGSTLRSPHGCHAQYMANMGTIASLVMSVTINEDDDTMDGDQQQMARKLWGLVVCHHTSPQFVPFPLRYACEFLIQVFGVQINKEIELAAQVREKHILRIQTMLCDMLLRDAPVGIITQSPNVMDLVKCDGAALFYKNKFWLLGITPTEAQIRDIAEWLLEYHSGNTGLSTDSLMEAGYPGASVLGDTVCGMASVSITSRDFLFWFRSHTAKEIKWGGAKHDPDDKDDGRKMHPRSSFKVFLEVVKWRSLPWEDMEMDAI

SEQ ID NO: 8488 - protein, 94 aa, Zea mays
MMSGSSPPPPSLPAGSGGFFRGYTKLCKGLAVILLIVHLVVQLFPSAVTYLALIPGRTIPFAWNLITAGYVEQTIPGLYSFFWILWGSIRIVGG

SEQ ID NO: 8489 - protein, 523 aa, Glycine max
  unsure (1)..(523): unsure at all Xaa locations
QLVFIFVPTPNLSNEPDAPYYEKKLWRPLILPQSKTSTTKSEALKRKIRTLDNTTSDSLRLLDRRETSLDATLQIXSGTLDTRRTAALSALLTDADDIXQQAPPTVKVNDTTGLILKLKSFCLRMDAFGFFAFVSAKKKELDGLRAEMPVALAECVDPAKFVLEAISEXVFPVDKRGDKAGHDLGWVCVLVLESLIPVVVDPVIGKSRLLVTPIVKEQATEIAETWKTSLEERGGVENVKTPDVHTFLQHVVTFGIVKNEDSDLYRKLVIASAWRKQMPKLALSLGLAQQMPDMIEELISKGQQLDAVHFTYEVGLVEKFPPVPLXKSFLKDAKKVAASILEDPNNAGRAAYLAARKEQSALRAVIKCIEEYKLEDEFPPENLKKRLDQLEKVKTVKTEKRKPVAVPANKRTRASNSNGGPMPPAKAXGRLTNAYVSSFPAAPTFVRSPSHGAIPQLLFPPYPSPPHMYGSRSPPTNPYAAYSPEXAPAIAGSYPGSXPMNYPPAYGGYGNVLAPTYQQAYYR

SEQ ID NO: 8490 - protein, 376 aa, Vibrio vulnificus CMCP6
MTQDKFIKSRAAVAWGPKQPLSIEEVDVMLPRKGEVLVRIVATGVCHTDAFTLSGDDPEGVFPAILGHEGGGIVEMVGEGVTSVSVGDHVIPLYTAECGQCKFCLSGKTNLCQAVRETQGKGLMPDGTTRFYKDGKPIFHYMGCSTFSEYTVLPEISLAKVNKEAPLEEICLLGCGVTTGMGAVINTAKVKQGDTVAIFGLGGIGLSAIIGARMAGASRIIAVDINDRKFELAKQLGATDCINPKEHAQPIQEVIIEMTDGGVDFSFECIGNVNVMRQALECCHKGWGESVIIGVAGAGQEISTRPFQLVTGRVWRGSAFGGVKGRSQLPAIVEQYLAGEFGLQEFITHTMPLEGINDAFELMHSGESIRSVVHFE

SEQ ID NO: 8491 - protein, 207 aa, Zea mays
MVSLKLQKRLATSYLKCGKGKVWLDPNEVSEISMANSRQNIRKLVKDGFIIKKPHKIHSRSRARRAHDAKQKGRHSGYGKRRGTREARLPTKVLWMRRMRVLRRLLRKYREAKKIDKHMYHDMYMKVKGNAFKNKRVLMESIHKSKAEKAREKTLSDQFEAKRAKSKASRERKIARREERLAQGPREITPPVSSTAPATGAPKKAKK

SEQ ID NO: 8492 - protein, 382 aa, Hibiscus syriacus
MSSAGQVIRCKAAVAWEAGKPLSIEEVEVAPPQKDEVRIKILFTALCHTDVYYWECKGYTPLFPRILGHEASGIVESVGEGVTDVKPGDHVLPIFTGECKQCRHCLSEESNNMCDLLRINCDRGVMLADGKTRFSINGKPIYHFVGTSTFSQYTVVHVGQVAKINPTAPLDKVCPISCGICTGFGATVNVAKPKKGQTVAIFGLGAVGLAAAEGARICGASRIIAVDLNPRRFEEAKRFGITEFVNPKDYDKPVQEVIVEMTGGGVDRSVECTGSVQAMISAFECVHDGWGVCVLVGVPKKDDAFKTHPMNLLSERTLKGAFYGNYKPRTDIPMVVDKYLNKELGLDMDKFITHSVPFADINKAFDYMLQGIGLRCMIHLDA

SEQ ID NO: 8493 - protein, 431 aa, Bifidobacterium longum DJO10A
MATEHEEKLGTEDSKWLGEYSQVHMNVFGTPLRVMDHGQGAHIWDVDGNEYLDFLAGIAVNSLGYAHPKWVKAVADQAAKVAHISNYFASEPQIELASKLVKLAGAPEGSKVYFGNSGAEGNEAALKLAKLYGRTLPGALPSIGGKPARILAMTHGFHGRTMGALSATWKPGIRKPYDPLVPNIEFVRAGDKVALHDAFAQTGLGRYGKGPVAAVILELIQGEAGVQPLGADYVKFVRELCDINHALLIIDEVQTGIGRTGKWFAFQRDDLSGGVTPDMVTFAKGVAGGFPMGGMIAFGEKLAALFTPGSHGSTFAGNPLGAAAGLATLDVIEDENLVANAEARGEQLRDGIMATGNPLFVSVRGRGLLDAVELKHPCSHAVMNYCLEHGLIVNAVAPNALRFAPPLIVTAQDVDQALAILKDVPTDLPDD

SEQ ID NO: 8494 - protein, 561 aa, Thermoplasma volcanium
MDSRVSDRKLRRELTTWDLLMLSLGGIIGSGWLFAAFGAATTAGPGSIFAWIIGGVIIIFIALVYAELGAMIPRSGAIVRYGHLSHGSFAGFVLGWAYFLSAVSVPAIEAEGVITYAASYSSKYGIVLLTNTGVMSVLGTFLAMLLMLGFFFLNYAGIKIMGKTNTGLTWWKFVIPTLTVILLLVVSFRPSNIIVGGIVPYGWAPVFSAVATSGIVFSYLGFRQGIDYGGEAKTPQRSIPLATVFSVLIGILLYTALQIVFIGGIDWGKLGLVPGSWAQIYSLATSNSNPEAVALYDAPFAHIAQAAGLVFLTYILFADAYISPSGTLNVYLGTSTRTLYGMAANGHMPKKLLEIMDKNRIPFIPLLATLLIGYIFFLPFPSWYKMVGFITSATAFTYIVGGAALMSLRRTAPELKRPFKLPYARVLSPIAFIGAGEVVYWSGWPLVLYLAIAIFLGFAVYFVLLLLGAIENSFTKENIKAGLWVPIFIIVLTVLSYIGDTSLGGIGVIKFPFDLVTVAVISFIFYMWSVRSGIRTEDITEMIESGSQYVFEESAREAVGK

SEQ ID NO: 8495 - protein, 331 aa, Haemophilus somnus 2336
MEPKKVDIKTVLYPKKGECDVLIKVESIGICGSDIGAFRGTNPLVTYPRILGHEIVGTVIEAGVGMPKNINIGDRVILEPYIYCGHCYPCSISRTNCCEALKVLGVHIDGAMQEIVRHPAHMLIKAPDIPIHELALAEPLTISLHAIRRTKVKAGEHVAIIGAGAIGLMAALVAKAYGATPILIDILDKRLDYAKSIGIPNIINPAKENDLEAIKSITNGRMAEVVIEASGANIAVQNTLKYTSFAGRIALTGWPKNETPLPTNLITFKELNIYGARTSKGEFEEALKLLESRKIEPKNIISKVITFDEIPHYIEELSENPDDYLKIIAVF

SEQ ID NO: 8496 - protein, 133 aa, Betula pendula
DHECDPEEYGACDSGCSGGLMTTAFEYTLKAGGLEREKDYPYTGTDRGSCKFDKSKIAASVSNFSVVSIDEDQIAANLVKNGPLAIGINAAFMQTYMKGVSCPYICGRRLDHGVLLVGYGSAGFSPIRFKEKP

SEQ ID NO: 8497 - protein, 214 aa, Paeonia szechuanica
IVESVGEGVTDLKPGDHVLPVFTGECKECRHCKSEESNMCDLLRINTDRGVMLNDGKSRFSINGQPIFHFVGTSTFSEYTVVHVGCVAKINPEAPLDKVCVLSCGISTGLGATLNVAKPKKGSSVAIFGLGAVGLAAAEGARIAGASRIIGVDLNPKRFEEAKKFGVTECVNPKDYNKPVQEVIAEMTGGGVDRSVECTGSIMAMMSAFECVHD

SEQ ID NO: 8498 - protein, 1016 aa, Lycopersicon esculentum
MMMVTSKVFSSLQFFTVFYLFTVAFASTEEATALLKWKATFKNQNNSFLASWTTSSNACKDWYGVVCLNGRVNTLNITNASVIGTLYAFPFSSLPFLENLDLSNNNISGTIPPEIGNLTNLVYLDLNTNQISGTIPPQIGSLAKLQIIRIFNNHLNGFIPEEIGYLRSLTKLSLGINFLSGSIPASLGNMTNLSFLFLYENQLSGFIPEEIGYLRSLTKLSLDINFLSGSIPASLGNLNNLSFLYLYNNQLSGSIPEEIGYLRSLTKLSLGINFLSGSIPASLGNLNNLSRLDLYNNKLSGSIPEEIGYLRSLTYLDLGENALNGSIPASLGNLNNLFMLYLYNNQLSGSIPEEIGYLRSLTYLDLGENALNGSIPASLGNLNNLSRLDLYNNKLSGSIPEEIGYLRSLTYLDLGENALNGSIPASLGNLNNLFMLYLYNNQLSGSIPEEIGYLSSLTELYLGNNSLNGSIPASLGNLNNLFMLYLYNNQLSGSIPEEIGYLSSLTELFLGNNSLNGSIPASLGNLNNLSRLYLYNNQLSGSIPASFGNMRNLQTLFLSDNDLIGEIPSFVCNLTSLEVLYMSRNNLKGKVPQCLGNISDLHILSMSSNSFRGELPSSISNLTSLKILDFGRNNLEGAIPQFFGNISSLQVFDMQNNKLSGTLPTNFSIGCSLISLNLHGNELADEIPRSLDNCKKLQVLDLGDNQLNDTFPMWLGTLPELRVLRLTSNKLHGPIRSSGAEIMFPDLRIIDLSRNAFSQDLPTSLFEHLKGMRTVDKTMEEPSYESYYDDSVVVVTKGLELEIVRILSLYTIIDLSSNKFEGHIPSVLGDLIAIRVLNVSHNALQGYIPSSLGSLSILESLDLSFNQLSGEIPQQLASLTFLEVLNLSHNYLQGCIPQGPQFRTFESNSYEGNDGLRGYPVSKGCGKDPVSEKNYTVSALEDQESNSEFFNDFWKAALMGYGSGLCIGISIIYILISTGNLRWLARIIEELEHKIIVQRRKKQRGQRNYRRRNNRF

SEQ ID NO: 8499 - protein, 171 aa, Oryza sativa (japonica cultivar-group); identical to SEQ ID NO: 8466

SEQ ID NO: 8500 - protein, 542 aa, Oryza sativa
MDAVAANGKRARADERSECFCAFVFVFLLWRWRGIGGVLMMMGGKWFWLDGCVAGIGEVERKAQRSYWEEHSKDLTVEAMMLDSRAADLDKEERPEVLSVLPSYKGKSVLELGAGIGRFTGELAKEAGHVLALDFIESVIKKNENINGHHKNITFMCADVTSPDLTIEDNSIDLIFSNWLLMYLSDEEVEKLVGRMVKWLKVGGHIFFRESCFHQSGDSKRKVNPTHYREPRFYTKIFKECHSYDKDGGSYELSLETCKCIGAYVKSKKNQNQLCWLWEKVKSTEDRGFQRFLDNVQYKTTGILRYERVFGEGYVSTGGIETTKEFVDKLDLKPGQKVLDVGCGIGGGDFYMAENYDAHVLGIDLSINMVSFAIERAIGRKCSVEFEVADCTTKTYAPNTFDVIYSRDTILHIHDKPALFRSFFKWLKPGGKVLISDYCRNPGKPSEEFAAYIKQRGYDLHDVKTYGKMLEDAGFHHVIAEDRTDQFLRVLQRELAEVEKNKEAFMADFTQEDYDDIVNGWNAKLKRSSAGEQRWGLFIATK

SEQ ID NO: 8501 - protein, 266 aa, Acinetobacter calcoaceticus
MSEIHSIMITNRQGKTLSVQINGPENAPAIVFSNSLGTDHGMWQPQVAALKSQYRVVTYDTRGHGQSDVIENTTLQNLGEDVLDILDALNIEKAHFCGISMGGLTALWLGIYQAARFYSITVANSAAKIWTEDGWNARAEAVEANGLADLVASTHTRWFSDKFDYKNDNLAQKTIQSLADTPAQGYANACRALAKADVREKLASISIPTLIIAGSADPVTTITDGEFMQQHIQCNQFEVIDASHLSNIEQPEKFIQIFSGFVKSIQ

SEQ ID NO: 8502 - protein, 119 aa, Salvia columbariae
DLKPENVLVRDDGHIMLSDFDLSLRCSVSPTLVKFPSLEPDTLRANTTECIAPSCVQPSCMAPTTCFGPRFFSGKSKKKDHKPKNDIGNQVRPLPELMAEPTDARSMSFVGTHEYLAPE

SEQ ID NO: 8503 - protein, 152 aa, Spinacia oleracea
MGKAVVVLSSSEGVSGTVYFAQEGDGPTTVTGNVSGLKPGLHGFHVHALGDTTNGCMSTGPHYNPNGKEHGAPEDDVRHAGDLGNITVGDDGTATFTIIDSQIPLSGPNSIVGRAVVVHAEPDDLGRGGHELSKTTGNAGGRVACGIIGLQG

SEQ ID NO: 8504 - protein, 300 aa, Mesembryanthemum crystallinum
NRCFDPSDLIIDTKPSSESLIHTTTVSPGDMQAENNSGWSSCASSSRVSGQLISFGNSDYFDDGKPKSNNKKEETAVVVHDDVGDHVHGGSNYTKYSQQNKVRNNSSKFGSIGLCSQEHVLAERKRREKMTQRFHALSALVPGLKKMDKASILGDAAKYLKQLEEQVKLLEEQTASRTVESVVLVKNSNVQDPNLDHGGNSSSNENSNSSLNNPLLEIEAGACNNNVLIRIHAQKDQDLVRKVLNEIENLHLTTLNFNTIPFGGYAMDITIVAQMDDDFELTIKDVVMHLRLALQQCSNT

SEQ ID NO: 8505 - protein, 119 aa, Nicotiana tabacum
SSNWLQDTVHEETELDSSSSPSGDIFTCSRPLIERKLRPQHDQPLKCPRCDSTHTKFCYYNNYSLTQPRYFCKSCRRYWTKGGTLRNIPVGGGCRKNKKVSSKKLSNENATITKILDHP

SEQ ID NO: 8506 - protein, 253 aa, Streptomyces exfoliatus
NDLSGKTVIITGGARGLGAEAARQAVAAGARVVLADVLDEEGAATARELGDAARYQHLDVTIEEDWQRVVAYAREEFGSVDGLVNNAGISTGMFLETESVERFRKVVEINLTGVFIGMKTVIPAMKDAGGGSIVNISSAAGLMGLALTSSYGASKWGVRGLSKLAAVELGTDRIRVNSVHPGMTYTPMTAETGIRQGEGNYPNTPMGRVGEPGEIAGAVVKLLSDTSSYVTGAELAVDGGWTTGPTVKYVMGQ

SEQ ID NO: 8507 - protein, 364 aa, Agrobacterium vitis
MREYKIAAIPADGIGPEVIAAGLQVLEALEQRSGDFKIHTETFDWGSDYYKKHGVMMPADGLDKLKKFDAIFFGAVGAPDVPDHITLWGLRLPICQGFDQYANVRPTKILPGITPPLRNCGPGDLDWVIVRENSEGEYSGHGGRAHRGLPEEVGTEVAIFTRVGVTRIMRYAFKLAQARPRKLLTVVTKSNAQRHGMVMWDEIAAEVATEFPDVTWDKMLVDAMTVRMTLKPETLDTIVATNLHADILSDLAGALAGSLGVAPTANIDPERRFPSMFEPIHGSAFDITGKGIANPIATFWTAAQMLEHLGERDAAARLMSAVERVTEAGILTPDVGGTANTRQVTEAVCNAIAGSNILKMAAAE

SEQ ID NO: 8508 - protein, 219 aa, Gossypium thurberi
DVYYWECKGYTPLFPRILGHEASGIVESVGEGVNDLKPGDHVLPIFTGECKECRHCLSEETNNMCELLRINCDRGVMLADGKTRFSINGKPIYHFVGTSTFSQYTVVHVGQVAKISPTAPLDKVCPISCGICTGFGATVNVAKPKKGQTVAVFGLGAVGLAAAEGARVCGASRIIAVDVNPRRFEEAKRFGITEFVNPKDYDKPVQEVIVEMTGGGVDR

SEQ ID NO: 8509 - protein, 392 aa, Mascagnia dipholiphylla
DLEPVNPADVPVTAAGALKSYKLAAKAISRLQSLPSGNISLLCDVLVKEVRDLTGYDRVMVYKFHEDEHGEVVSECRRSDWESYLGLHYPATDIPQASRFLFMKNKVRMICDCLAPPVKVIQDERLPQPLSLCGSTLRSPHGCHAQYMTNMGTIASLVMSVTINEDDDMMDGDQQQMTRKLWGLVVCHHAGPRFVPFPLRYACEFLIQVFGVQIHKEVELAAQVREKHILQIQTMLCDMLLRDAPVVIITQSPNVMGLVKCDGAALYFKNKIWLLGVTPAEEQIRDIAEWLLKYHSGNTGLSTDSLMEAGYPGASVLGDAVCGMAAVSITSRDFLFRFRSHTAKEIKWGGAKHDPDDKDDGRKMHPRSSFKAFLEVVKWRSTPWEDIEMDAI

SEQ ID NO: 8510 - protein, 146 aa, Pisum sativum
MAFCNKLGNLLRQGATQSSHAPVSSMLNYLRHMSSSKLFIGGLSYGVDDQSLKDAFASYGEVVEARVITDRDTGRSRGFGFVNFTSDESATSALSAMDGQDLNGRNIRVSYANDRPSAPRGGGGGYGGGYGDGFSNRGGGGGGGGW

SEQ ID NO: 8511 - protein, 800 aa, Zea mays
MKMQLVEPEGSKGMGSPGCSEIVELVDEPKDARSCGLTHLRVRVKPVGQELGARSCSVEDDLDQLIRSINVRTSARASGQTSTDRRLIGLGKSPVSGSEIVESVSLKQALRKMCISQASEMSGKPCCQLRKPTGASTPSDSGAIKKLYGSVAVQANEEQGDKSKVGKVYMLPDKLAGSSVGEASEISKGQSKSSAKKNLRSASPTAVKVRKTRIQDVISNKSSEAVEDVSVGATLPRQRKGKSVKTSSPRAVPVGGSRLVRPMFRNKTSTKKKVKPEPAIVPASHKHCETKGPKSHASKQKESLQDEPRTPAPANKKAAVSSTVDGSDFGTKGCGAGVTHGSKVGELSRSKEKGECSQSSKSSIGDYSTSTSISEDSYGSFSANGSRPHMSKDVRWGAIRRMAIQQGSLGLKNFKLLKQLGCGDIGTVYLAELVGSDCMFALKVMDIEYLISRKKMLRAQTEREILQMLDHPFLPTLYSHFTTDNLSCLVMEFCPGGDLHVLRQKQPTKTFSEAAARFYVAEVLLALEYLHMLGVIYRDLKPENILVREDGHIMLSDFDLSLRCSVSPMLVRTSSVDRDEPSRPSGPCAQSCIDPLCIQPSWSNSSCFTPSLVSSTPSRTRRTRAEPLKKPSLPQLVVEPTEARSNSFVGTHEYLAPEIIRGDGHGSSVDWWTLGIFLYELLYGKTPFRGPDNDETLSNVISQGLKFPDSPALSFHARDLIRGLLVKEPEYRLGSSRGAAEIKRHPFFEGLNWALIRWTSPPETPKNIDTAATLAGTRKKKEGKCLEFRLNGDDIEFELF

SEQ ID NO: 8512 - protein, 201 aa, Triticum aestivum
LKTDNKPEDTVVNSEAEESEVEEGHEESNEEGLLDEVPDDIDEIDLIHMKISDLPSLRLERFKQLERLYLRQNFIIDIDGLENLNNLQELDLYDNKISHIRGLNHLSQLTDLDLSFNKIKHIKNLDKLTQLKNLYFVSNKISKIENLDTFPNLKNIELGANRIRVIENLNGLVNLTELWLGKNKITKLENLSPLKNLRLLS

SEQ ID NO: 8513 - protein, 387 aa, Brassica rapa
  unsure (1)..(387): unsure at all Xaa locations
VNTLSSTESLTISNXRTLVSPGDVFELGFFRTXSSSPWYLGYWYKKLSERTYVWNANRDNPLSNSIGXLILGNNLVLLGHSXKSVWSTXVSRGYERSPVVAELLANGNFVMRDSSNNXASQFLWQSFNYPTDTLLPEMKLGYDLKTGLNRFLTSWRSYDDPSSGDFLYKLETRRLPEFYLMQGDVREHRSGPWNGIQFIGIPEDQKLSYMMYXFTENSEEVAYTFLMXXNSXYXXINSEGYLERXXXAPSSVVXVFXSSPIXQCDTCGPYSYCDVNTSPVCNCIQGFNRQQWDLRIPTSGCIRRTRLGCSGDGFTRMTTMAIVDRSIGLKECEKRCLSDCNCTAFANADIRNRGTGCVIWTGELEDIRTYFADGQDLYVRLAAADLV

SEQ ID NO: 8514 - protein, 175 aa, Solanum tuberosum
MADVEYRCFVGGLAWATTDQTLSDAFSQYAEVVESKIINDRETGRSRGFGFVTFKDEQAMRDAIEGMNRQDLDGRNITVNEAQSRGGVEAGGGRGGGGYGGGRREGGGGGYGGYGGGRREGGGGGGYSGGGGGYGGGRREGGYGGGGGGYGGGDRYSDRSSRGGGGGSSDGNWRN

SEQ ID NO: 8515 - protein, 131 aa, Zea mays
NPSIEKSDGRSARAGKTTKLDYIGFDELRKYFCMPITRAAREMNVGLTVLKKRCRELGVARWPHRKMKSLKSLMANVQSVAVQQELAALETYCTLMEDNPWIELTDRTKKLRQACFKERYKRRRAAEVNVM

SEQ ID NO: 8516 - protein, 347 aa, Brassica oleracea
MKATLAPPSSLISLPRHKVSSLRSPSLLLQSQRPSSALMTTTATRGSVAVTAAATSSAEALREGIAEFYNETSGLWEEIWGDHMHHGFYDPDSSVQLSDSGHREAQIRMIEESLRFAGVTEEEKKIKRVVDVGCGIGGSSRYIASKFGAECIGITLSPVQAKRANDLAAAQSLSHKVSFQVADALDQPFEDGIFDLVWSMESGEHMPDKAKFVKELVRVTAPGGRIIIVTWCHRNLSQGEESLQPWEQNLLDRICKTFYLPAWCSTSDYVELLQSLSLQDIKCADWSENVAPFWPAVIRTALTWKGLVSLLRSGMKSIKGALTMPLMIEGYKKGVIKFGIIACQKPL

SEQ ID NO: 8517 - protein, 312 aa, Hordeum vulgare subsp. spontaneum
MATAGKVIKCKAAVAWEAGKPLSMEEVEVAPPQAMEVRVKILYTALCHTDVYFWEAKGQTPVFPRILGHEAGGIVESVGEGVTELVPGDHVLPVFTGECKECAHCMSEESNLCDLLRINVDRGVMISDGQPRFTIDGKPIFHFLGTSTFSEYTVIHVGCVAKIDPEAPLDKVCLLSCGISTGLGATLNVAKPKKGMAVAIFGLGAVGLAAMEGARLSGASRIIGVDLNPAKHEQAKKFGCTDFVNPKDHTKPVQEVIVEMTDGGVDRAVECTGNADAMISAFECVHDGWGVAVLVGVAHKEAVFKTHPMNFL

SEQ ID NO: 8518 - protein, 351 aa, Oryza sativa
  unsure (1)..(351): unsure at all Xaa locations
MAPPPASSLPTAVLAWGSGEDGQLGMGGYEEEDWARGVAALDALAVSAVVAGSRNSLAICADGRLFTWGWNQRGTLGHPPETKTESSPAPVDALAGVSIVQAAIGGWHCLAVDDKGRAYAWGGNEYGQCGEEAERKEDGTRALRRDIPIPQGMVVGDNRIMGIQQIVHYHLGICYLPNNKQISTPVRVQGLENVKVIAVGAFHNLALTEDGILWAWGNNEYGQLGTGDTQPRSQPIRVEGLSDLSLVDIAAGGWHSTALTKEGEYGRGDHGRLGYGRKVTTGHPMEVPIDLPPPXXTSGGDSGGQWQARYVACGGRHTLAIATWTEADDESHSRRSDLAGDAVAATPPPCG

SEQ ID NO: 8519 - protein, 149 aa, Bryonia dioica
MADQLTDDQISEFKEAFSLFDKDGDGCITTKELGTVMRSLGQNPTEAELQDMINEVDADGNGTIDFPEFLNLMARKMKDTDSEEELKEAFRVFDKDQNGFISAAELRHVMTNLGEKLTDEEVDEMIREADVDGDGQTNYEEFVKVMMAK

SEQ ID NO: 8520 - protein, 142 aa, Glycine max
MAGTLNLTPLTGAGRTLRPPFRISIRAFTATAIDSRRAASLYEVLRIKQNASAVEIKSAYRNLAKVYHPDSALRRSESDERDFIEIHDAYETLSDPSARALYDLSLMAARDDNRSFSSLVAAPNGSSGFYYQTRKWETDQCW

SEQ ID NO: 8521 - protein, 157 aa, Triticum aestivum
LILSLMQVTFEKVIKRETFSVVLNMQIYTAFVATLASLVGLFASGEWKTLEGEMHMFSPGKVSYVMTVLWTAISWQIASVGVVGLIFVVSSLFSNVISTLALPIIPVFAVIFFHDKMDGIKIIAMLIAIWGFISYGYQLYVDDKKSRKTSSSVEENS

SEQ ID NO: 8522 - protein, 480 aa, Cytophaga hutchinsonii
MFSSLFKTKSIQSILKEEKGELKKTLTATSLVLLGIGAIIGAGIFSLTGIAAAENAGPAVTISFVVAGLGCAFAGLCYAEFASMLPIAGSAYTYSYATLGEFIAWIIGWDLVLEYAVGAATVAISWSRYLIKLLEKLGVDHIPYQWMMSPFETHRVNGTELHGIVNIPAIFITCLMSLVLIRGMKESAKLNNVIVALKITVVIAFIILGWSYMDPINHADYVPDNTGVFEHFGWTGVMTGAAVVFFSFIGFDAVSTAAQEAKNPQRDMPIGILGSLVICTILYVLFSYVMTGLENYQNFKGEAAPVALAIAATPYAFFQELIIIAILAGYTSVIMVLLMGQSRVFFSMSKDGLVPAIFSEVHPKYQTPWKSNILFAILVSLFAGLVPVSVVGEMTSIGTLFAFVLVCIGVLVLRKKQPDAPRAFRTPWVPFVPIMGIVVCLYLMYALPIDTWIRLIVWMAIGIAIYFLYSRHHSKIRNSN

SEQ ID NO: 8523 - protein, 152 aa, Glycine max; identical to SEQ ID NO: 515

SEQ ID NO: 8524 - protein, 367 aa, Triticum aestivum
SGQMPIVKVGRMAGQFAKARSNPIETRDGVTLPSYQGDIINNDDFDEKSRAPNPQRLIRAYSQSASTLNLLRAFAHGGYADLQRVTEWNLDFLRHSTQGDRYGELAQRVHDAIGFMLAAGLPRQHPMMTTTDFWTSHECLLLPYEQALTREDSTSGLFYDCSAHMVWVGERTRQLDGAHVEFLRGIANPLGIKVSDKMNPAELVKLIDILNPSNKPGRITIITRMGAENMRVKLPHLIRAVRNSGQIVTWITDPMHGNTIKAPCGLKTRPFDSIMNEVRAFFDVHDQEGSHPGGIHLEMTGQNVTECIGGSRTVTFDDLGDRYHTHCDPRLNASQSLELAFIIAERLRKRRMKSGLTNNLPLPPLAF

SEQ ID NO: 8525 - protein, 462 aa, Rhodopseudomonas palustris
MSERWTPDSWRAKPVQQMPQYPDAKALADVEAQLASFPPLVFAGEARNLKKALATVAAGDAFLLQGGDCAESFAEHGANNIRDLFRVFLQMAIVLTYAGASPVVKVGRIAGQFAKPRSAPVEKRDGVELPSYRGDIINDVAFTEEARVPDPRRQIEAYRQSAATLNLLRAFAKGGYASVENVHSWMLQSVSDSPQSKAYADLADRVSGALDFMRACGLTFAVDSSLGTTDFYTSHEALLLGYEQAMTRVDSTTGDWYATSGHMLWIGDRTRQLDHAHVEYFRGIKNPIGLKCGPSLKTDELLKLIDILNPDNEPGRLTLIGRFGHEKIGEHLPAMVRAVKREGRTVVWSCDPMHGNTITSNSGYKTRPFDRILSEVRSFFAVHAAEGTHAGGVHLEMTGQNVTECLGGARAITDEDLNNRYHTACDPRLNAEQSIDMAFLIADLLKQGRAGKASPLQAAAGL

SEQ ID NO: 8526 - protein, 374 aa, Crossosoma bigelovii
ALSIAGAVQSQKLAVRAISHLQSLPSGDIKLLCDTVVENVRELTGYDRVMVYKFHEDEHGEVVAESKRPDLVPYIGLHYPATDIPQASRFLFRQNRVRMIVDCNATPVKVIQDESLMQPLCLVGSTLRAPHGCHAQYMANMGSNASLAMAVIINGNEEEGVGGRSPMKLWGLVVCHHTSARCIPFPLRYACELLMQALGPQLNMELQLASQSSEKRVLRTQTLLCDMLLRDSPTGIVTQSPSIMDLVKCDGAALYYQGKYYPLGVTPTEPQIKDIVEWLLAFHGDSTGLSTDSLADAGYQGAATLGDAVCGMAVAYITKRDFLFWFRSHTAKEIKWGGAKHHPADKDDGQRMHPRSSFKAFLEVVKSRSLPWEN

SEQ ID NO: 8527 - protein, 176 aa, Hevea brasiliensis
MASQSEPKSVYDFTVKDARGNDVDLSTYKGKVLLIVNVASQCGLTNSNYTELTQLYQKYKDQGLEILAFPCNQFGSQEPGTNEQIVEFACTRFKAEYPIFDKVDVNGNNAAPLYKFLKSSKGGIFGDNIKWNFSKFLVDKDGNVVDRYAPTTVPSQHREGCEETAGDCMSAQGRPN

SEQ ID NO: 8528 - protein, 489 aa, Cucumis sativus
MASTLSNSVQPCRFRVLKDGTGSLGPVVYWMFRDQRVKDNWALIHAVDEANRANVPVAVAFNLFDRFLGAKSRQLGFMLRGLQQLQHDIQETLQIPFFLFQGEAEQTIPNFIRECGASLLVTDFSPLREVRKCKEEICKRVEESVKVHEVDAHNVVPTWVASEKLEYSAKTLRGKINKKLPDYLIDYPSMVIPTRKWPSADKFIDWDRLIDDNLRKGADVPELEWCKPGEKAAMEVLMGSKDGFLTKRLKGYAIDRNNPLKPKGLSGLSPYLHFGQISAQRCALEARSIRKLNPQAVDVFLEELIVRRELADNYCYYQPHYDSLLGAWEWARKTLMDHASDKREYIYTREQLEKAQTADPLWNAAQLEMAHHGKMHGFMRMYWAKKILEWTRGPEEALEICIYLNDKYEIDGRDPNGYVGCMWSICGVHDQGWKERPVFGKIRYMNYAGCKRKFDVDGYIAYVKRLVGEIKKRKPEETLEDRKPKGIRC

SEQ ID NO: 8529 - protein, 617 aa, Oryza sativa
ARSGVVGREHHRCGCWKGRRDPLHRDGAADSPDPGKPRFAASCVADGDRRRGGLPDGVSSELEQEDDDDDCYLSDQEDDALEESVPRCWRTNATRREDLRKVMELLGLREHHARTLLIHYRWDVERIFELLDQKGRDRLFSEAGIPLQPANNPGSPSSTEVTCNVCYDDVPLSDASKMDCGHNYCNECWTGYFIVKINEGQSRRIKCMAPKCNTICDEAIVRKLVNAKRPDIAERFERFLLESYIEDNDTVKWCPSTPHCGNAIRVKGDIHSHSPCSCVMWELWIKKCRDESETVNWITVNTKPCPKCHKPVEKNGGCNLVACICGQAFCWLCGGATGRDHTWSSISGHSCGRFTEDQSKKTEQARRNLYRYMHYHNRYKAHTDSLKQEAKLKGDIQGKISISENKDSKIKDYSWVINGLNRLFRSRRVLSYSYPFAFYMFGDEIFKDEMTSDERELKQNLFEDQQQQLEFNVERLSGFLERDFQNFSDDEVMDTMKHVINLSNVVDRLCKQMYQCIENDLLYPLRTPHNIAPYKSKGLDRASELNVCWDSSEQASIYMFLIADAYFNMPCSSIFGKRQLGSSSNNNGRPHKRERNDAHGGAALFDLNVPAEVADKI

SEQ ID NO: 8530 - protein, 98 aa, Buchnera aphidicola
LPSASLNDSNFGLYEPAGGSAPDIAGKNIANPIALILSIAMLVRYTMKLPTISDHIEYAVIDTLKKGYRTADIANDKEKYVSTNDIGDIISDILKKRI

SEQ ID NO: 8531 - protein, 1112 aa, Lycopersicon pimpinellifolium
MMMVSRKVVSSLQFFTLFYLFTVAFASTEEATALLKWKATFKNQNNSFLASWIPSSNACKDWYGVVCFNGRVNTLNITNASVIGTLYAFPFSSLPSLENLDLSKNNIYGTIPPEIGNLTNLVYLDLNNNQISGTIPPQIGLLAKLQIIRIFHNQLNGFIPKEIGYLRSLTKLSLGINFLSGSIPASVGNLNNLSFLYLYNNQLSGSIPEEISYLRSLTELDLSDNALNGSIPASLGNMNNLSFLFLYGNQLSGSIPEEICYLRSLTYLDLSENALNGSIPASLGNLNNLSFLFLYGNQLSGSIPEEIGYLRSLNVLGLSENALNGSIPASLGNLKNLSRLNLVNNQLSGSIPASLGNLNNLSMLYLYNNQLSGSIPASLGNLNNLSMLYLYNNQLSGSIPASLGNLNNLSRLYLYNNQLSGSIPEEIGYLSSLTYLDLSNNSINGFIPASFGNMSNLAFLFLYENQLASSVPEEIGYLRSLNVLDLSENALNGSIPASFGNLNNLSRLNLVNNQLSGSIPEEIGYLRSLNVLDLSENALNGSIPASFGNLNNLSRLNLVNNQLSGSIPEEIGYLRSLNDLGLSENALNGSIPASLGNLNNLSMLYLYNNQLSGSIPEEIGYLSSLTYLSLGNNSLNGLIPASFGNMRNLQALILNDNNLIGEIPSSVCNLTSLEVLYMPRNNLKGKVPQCLGNISNLQVLSMSSNSFSGELPSSISNLTSLQILDFGRNNLEGAIPQCFGNISSLEVFDMQNNKLSGTLPTNFSIGCSLISLNLHGNELEDEIPRSLDNCKKLQVLDLGDNQLNDTFPMWLGTLPELRVLRLTSNKLHGPIRSSRAEIMFPDLRIIDLSRNAFSQDLPTSLFEHLKGMRTVDKTMEEPSYESYYDDSVVVVTKGLELEIVRILSLYTVIDLSSNKFEGHIPSVLGDLIAIRILNVSHNALQGYIPSSLGSLSILESLDLSFNQLSGEIPQQLASLTFLEFLNLSHNYLQGCIPQGPQFRTFESNSYEGNDGLRGYPVSKGCGKDPVSEKNYTVSALEDQESNSEFFNDFWKAALMGYGSGLCIGISMIYILISTGNLRWLARIIEKLEHKIIMQRRKKQRGQRNYRRRNNHF

SEQ ID NO: 8532 - protein, 1121 aa, Pisum sativum
  unsure (1)..(1121): unsure at all Xaa locations
SNNNNNRNIKRESLSMRKAIAQYTEDAXLHAVFEKSGDSFDYAQSIRVTAATESVPEQQITAYLAKIQRGGFIQPFGSMIAVDETSFRVLAYSENARDMLGIAPQSVPSMEDDSSSSSFFSLGVDVRSLFSASSSVLLEKAFSAREISLMNPIWIHSRSTGKPFYGILHRIDIGVVIDLEPARSEDPALSIAGAVQSQKLAVRAISQLQALPGGDVKLLCDAVVESVRELTGYDRVMVYKFHEDEHGEVVAESKRVDLEPYIGLHYPATDIPQASRFLFKQNRVRMIVDCNASPVRVFQDEALVQPVCLVGSTLRAPHGCHAQYMANMGSIASLAMAVIINGNDEDGGGIGGAARGSMRLWGLVVCHHTSARCIPFPLRYACEFLMQAFGLQLNMELQLAVQSLEKRVLKTQTLLCDMLLRDSHTGIVTQSPSIMDLVKCDGAALYYQGNYHPLGVTPTESQIRDIIDWLLAFHSDSTGLSTDSLADAGYPGAASLGDAVCGMAVAYITEKDFLFWFRSHTAKEIKWGGAKHHPEDKDDGQKMHPRSSFKAFLEVVKIRSMQWDNAEMDAIHSLQLILRDSFKEAENNDSKAVVHTHMAELELQGVDELSSVAREMVRLIETATAPIFAVDVDGRINGWNAKVSELTGLLVEEAMGKSLVHDLVYKESRETVDKLLSHALKGEEDKNVEIKMKTFGPGNQNKAVFIVVNACSSKDYTNNIVGVCFVGQDITGQKVVMDKFINIQGDYKAIVHSPNPLIPPIFASDDNTCCLEWNNAMEKLSGWSRADVIGKLLVGEVFGSFCQLKGSDAMTKFMIVLHNALGGHDTDKFPLSFLDRHGKYVHTFLTANKRVNMDGQIIGAFCFLQIVNPELQQALTVQRQQDSSSLARMKELAYICQEVKNPLSGIRFTNSLLESTCLTDEQKQLLETSVACEKQMLKIVRDIALESIEDGSLELEKQEFLLENVINAVVSQVMLLLRDRKLQLIRDIPEEIKALAVYGDQLRIQQVLADFLMNVVRYAPSPDGWVEIHVFPRIKQISEGLTLLHAEFRMVCPGEGLPPELIQDMFHNSRWVTQEGLGLSMSRKIIKLMNGEVQYVREAERCYFLVLLELPVTRRSSKAIN

SEQ ID NO: 8533 - protein, 494 aa, Pseudomonas fluorescens PfO-1
MQNPERPVGFFLREGTPDGPDAIAFLAKVVPMSSTQSSNGLEQGLKPRHVTMLSIAGVIGAGLFVGSGHAIAAAGPAVLLAYAAAGALVVLVMRMLGEMAVASPDTGSFSTYADRAIGHWAGFTIGWLYWWFWVLVIPLEANAAATILHAWFPGVDIWAFALIITMLLTVTNLFSVKNYGEFEFWFALLKVVAIIGFIILGVAAIFGFLPNSQVSGVSHIFDTQGFLPNGMGAVLGAILTTMFSFMGTEIVTIAAAESKNPGKQISKATNSVIWRIGLFYLVSIFIVVALVPWNDPVLASVGSYQTVLERMGIPNAKMIVDIVVLVAVTSCLNSALYTSSRMLFSLGKRGDAPVMSTRTNKSGTPYWAVMLSTGAAFLCTFANYVAPAAVFEFLLASSGAIALLVYLVIAISQLRMRKQRMARGEKIVFSMWLFPGLTYAVIAFIVAALTIMLFQDAHRVEILATGLLSLVVVATGLLVARRRKMENRGAAVLN

SEQ ID NO: 8534 - protein, 379 aa, Arabis hirsuta
  unsure (1)..(379): unsure at all Xaa locations
MITTGQIIRCKAAVAFEAGKPLVMEEVEVAPPQKNEVRIKILFTSLCHTDVYFWEAKGQTPLFPRIFGHEAGGIVESVGEGVTDLAPGDHVLPIFTGECGDCPHCHSEESNMCDLLRINTERGVMINDGESRFSIDGKPIYHFVGTSTFSEYTVVHSGQVAKINPDAPLDKVCIVSCGLSTGXGATLNVAKPKKGQSVAIFGLGAVGLAAAEGARIAGASRIIGVDLNSKRFDEAKKFGVTEFVNPKDHDKPVQQVIAEMTDGGVDRSVECTGSVQAMIQAFECVHDGWGVAVLVGVPSKDDAYKTHPMNFLNERTLKGTFFGNYKPKTDIPGLVEKYMNKELEIEKFITHTVPFSEINRAFDYMLKGEGIXCKITMGA

SEQ ID NO: 8535 - protein, 441 aa, Nicotiana tabacum
MASWVLSECGLRPLPRIYPKPRTGAATSASSHIKLRISRTDLSGSAISLSNTNKERNWALRVSAPLRIQTVGEEESERTNNSGGEFFDPGAPPPFKLSDIKAAIPKHCWVKNPWKSMSYVVRDVAIVFGLAAAAAYFNNWVVWPLYWFAQSTMFWALFVLGHDCGHGSFSNNHKLNSVVGHILHSSILVPYHGWRISHRTHHQNHGHVENDESWHPIPEKIYNSLDLATKKLRFTLPFPLLAYPFYLWSRSPGKKGSHFDPNSDLFVPSEKKDVMTSTLCWTAMAALLVGLSFVMGPFQVLKLYGIPYWGFVMWLDLVTYLHHHGHDDKLPWYRGEEWSYLRGGLTTLDRDYGWINNIHHDIGTHVIHHLFPQIPHYHLVEATEAAKPVLGKYYKEPKKSGPLPFYLLGVLIKSMKQDHYVSDTGDIVYYRTDPQLSGFQK

SEQ ID NO: 8536 - protein, 205 aa, Dunaliella tertiolecta
EGFEHYRCDRPLNMGIHIGNLSKVLKCAGNEDVITLKADDNGDTLTLMFESQKQDRISDFDLKLMSIESEHLGIPDQDYSAEVKMPSGEYQRICRDLASIGDTEQINATKEGVEFTTSGDVGTANITLRHNATTEKPEEQTFIELNDPVSLTFALRYLNNFAKATPLAPVVKIGLTKDLPIVVEYQIGEMGHIKYFLAPKIEEDE

SEQ ID NO: 8537 - protein, 323 aa, Pseudomonas aeruginosa PAO1
MQHVRLGNSGLKVSRLCLGCMTYGDPAWRPWVLDEERARPFIREALEAGIDFFDSADIYSTGESERILGRALRDFAQREDLVIATKAFFPMSDRPNACGLSRKHLLASVDASLRRLGTDYLDLFVIHRFDPDTPIEETCETLDSLVRVGKVRYLGASSMPAWRFMKMLAFQRHHGLAQFISMQSQYNLIVREDEEDLVPLCREEGIALTPWSPLARGLLAGARSAGTLRTRTDEQAPRWYGGREEVESTLGALEKLAAARGLPPAQLALAWLLGRNGVAAPIVGLSRPHHLEDALAALTLDLAEEECATLEAPLTARARTPRW

SEQ ID NO: 8538 - protein, 350 aa, Cicer arietinum
ETHVLLFLSLFLTCGSYAQDSTLLVPAIITFGDSAVDVGNNDYLPTLFKANYPPYGRDFVNKQPTGRFCNGKLATDITAETLGFTSFAPAYLSPQASGKNLLIGANFASAASGYDEKAAILNHALPLSQQLEYYKEYQSKLAKVAGSKKAASIIKDALYLLMLAAVTLYKIIMSILGINKVLTVDQYSSYLLDSFSSFVKDLYGLGARKIGVTSLPPLGCLPAARTLFGFNENGCVSRINTDAQGFNKKVNSAASNLQKQLPGLKIVIFDIYKPLYDLVQNPSNSGFAEAGRGCCGTGTVETTSLLCNPKSIGTCSNATQYVFWDSVHPSQAANQVLADSLLLQGIALIA

SEQ ID NO: 8539 - protein, 530 aa, Thermoplasma acidophilum
MEYKYELTIDKLLQSGVSSNPDQIINYTGKREFTFKDFSKRVNTLAKALISIGVKKGDRVAVIDWDTYVYLEAYFAVPMVDAVLHTVNVRYPQDLIYYTMDHAEDKYVIVRDEFVPILSKNREAFYFIKGWIVYSETGQIPDSLSPKYVYDDLMKESYSDIELPQLSENDLATTFYTSGTTGIPKGVQFTHRQIVLHSISSGLALADDPINLTSRDVIMPLVPMFHVHAWGVPYMSIMSGRRYVLPGRYDFDHIIDLIDKYNVSVIAMVPSILYLIVTNPNVKKIAGRGIKAIVGGGALPEGLANAAEKLGITAISGYGLSETAPILTLATYNERVKAMPESEKKKFRLKTGIPIPLVQLRVVDDKMNDVPKDEKTIGEIVVRAPWLTSVYVKNKEGTEALWRGDWMHTGDLAVMDEYGYIRIVDREKDAVKSGGEFIPSLVLEDAISSCSGVVENAVVGRPDEKWGERPVAFYTGTAKPDEIRKHLIEMVNAGRIAKFWIPDDFINIKEFAKTSTGKIDKKVLREMIKK

SEQ ID NO: 8540 - protein, 216 aa, Triticum aestivum
  unsure (1)..(216): unsure at all Xaa locations
MEEEGARKAVLFRLFGVEVRGAEEDDDAEPMELKKSTSMPNLACASIVPILLPGEASNDKGYASDDGELASTPQLKRCRRKAQERKKGIPWTEEEHRKFLEGLKQLGKGDWRGISKNFVTTRTATQVASHAQKYFLRQTNPGKKKRRASLFDVGIPAAHSYDDQLPPAXAVGTKLAPAATILHDHRGDVPLPWNPSLLLLRRYSTPTGGDVAVPSY

SEQ ID NO: 8541 - protein, 472 aa, Tropheryma whipplei str. Twist
MKYTPYRGGSILMRMLQMPGSNRVNPFIKNSVDVSLETINAWRGLPIEQQPEWPDSVLLSEVSCTLSQLPPLVFAGEVDKLRLHLQEAAEGRAFILQGGDCAESFRDITADNISRKLKTILQMAAILTYAAGVPIIKMARMAGQYAKPRSEQFELVDGRSLPVYRGDMVNGHELHDRVPDPKRMLKAYELSAATLNLIRAFTRGGFADLRALHVWNRGFAESCENEQYEELARKIDKAIAFMNACGVDCSNLTQTEVFVCHEGLLLDYEHALTRCDSRTGFFYDTSAHFLWIGERTRQIDGAHIDFFSKIENPIGVKLSSKVTARQVLELANRLDPGRTPGRLTFITRMGAGNIRQCLPGIIEAVRDGGFNPAWVCDPMHGNTITSSSGYKTRRFMDILDEVRGFFDVHRSVGTHPGGLHVELTGDDVTECTGGFDSISDDDLKDRYESLCDPRLNHRQSLELAFFLADCMK

SEQ ID NO: 8542 - protein, 110 aa, Oryza sativa
MASSTKIPFLLLAVLLLLSIAFPSEVMAGGRGRGGGGGGGVAGGGNLRPWECSPKCAGRCSNTQYKKACLTFCNKCCAKCLCVPPGTYGNKGACPCYNNWKTKEGGPKCP

SEQ ID NO: 8543 - protein, 588 aa, Staphylococcus epidermidis ATCC 12228
MNRLNSVVIKLWLTIILIVATVLILLSVSLITFIQYYFTQETENAIKEDAKRISSLVEKSHNKTLAIQNSQTLIDGDGPGGLIIMKDMSEKPDSSYKDTKKQMFNEIKKSTKFKKVFKEGEYETQNITIKNKGNSQSYLLLGYPMKAQKGAQSHYSGVFIYKDLKSIEDTNNAITIIILITAIIFTIASTIFAFFLSNRITKPLRQLKTQAQKVSEGDYSQISTVATKDEIGDLSRAFNNMNVEIQEHIKAISSSKNIRDTLLNSMVEGVLGINNQREIILSNKMADDIMRHIDDFSKESIEQQIEATFESQQNEYLELEINTRYYVFISSYIDRIQTNGRSGIVMVIRDMTNEHNLDQMKKDFIANVSHELRTPISLLQGYTESIVDGIVTEPDEIRDSLAIVLDESKRLNRLVNELLNVARMDAEGLSVEKELQPIQHLLDKMESKYRMQSEELGLTMTFDSNNDEQLWNYDMDRMDQVLTNLIDNATRYTQAGDSIKISIDEDSDFNILTITDTGTGIAPEHLKQVFDRFYKVDAARKRGKQGTGLGLFICKMIIEEHGGRIDVESELGKGTSFIIRLPKSKQIS

SEQ ID NO: 8544 - protein, 399 aa, Nostoc sp. PCC 7120
MVKSITLVGSTGSIGTQTLDIVSQYPDQFRIVGLAAGSNVEMLAEQIRQFRPQIAAISAAEKLPALQAAIKDLDPQPILLGGEAGVIEVARYGDAETVVTGIVGCAGLLPTIAAIEAGKDIALANKETLIAGGPVVLPLVEKHGVKLLPADSEHSAIFQCLQGVPKGGLKKILLTASGGAFRDWDVERLAEVTVSDALKHPNWSMGRKITVDSATLMNKGLEVIEAHFLFGLDYQDIEIVIHPQSIIHSLIELQDTSVLAQLGWPDMRLPLLYALSWPERIYTDWERLNLVKAGNLTFREPDHQKYPCMQLAYAAGRAGGSMPAVLNAANEQVVALFLDEKIKFLDIPRCIELVCDRHQNDNCANPSLDDILAADQWARQEVLTATKNLASQPQIISVN

SEQ ID NO: 8545 - protein, 106 aa, Glycine max
FGSRQSLHPSLLVCIISGSSEGKDRSMSTTATTTSEEVSSNEWKVIHMSEQEEDLIRRMYKLVGDKWNLIAGRIPGRKAEEIERFWIMRHGDAFSVKRNGSKTQDS

SEQ ID NO: 8546 - protein, 254 aa, Glycine max
  unsure (1)..(254): unsure at all Xaa locations
MANLARFSKRALRSAHALARAPRAASAADSRTRXSTDAPTSITPSADRVKWDYRGQRKIIPLGQWLPKVAVDAYVAPNVVLAGQVTVWDGASVWPGCVLRGDLNKISIGFCSNVQERSVLHAAWSSPTGLPADTSIERYVTIGAYSLLRSCTIEPECIIGQHSILMEGSLVETQSILEAGSVVPPGRRIPTGEXLWAGNPARYVRTLTHEEILEIPKLAVAINDLSRDHYSEFLPYSTVYLEVEKFKKSLGISV

SEQ ID NO: 8547 - protein, 203 aa, Escherichia coli CFT073
MRKTITSFESPLMKKILLITGDFSEDYEVMVPWQALNMLGFRVDVVCPGKRTGEFIKTAIHDFEGDQTYTEKPGHLFRLTASFDDIRLQEYSGVYISGGRSSEYLRLNKSVLDIVHYAMNLTLPVAAICHGPQILAAAGVLKGRKLTGYFTVKPEVEMAGGQWVTAADDEAIVDGNLITATTWMGHPAILRHFITQMGTSIIH

SEQ ID NO: 8548 - protein, 488 aa, Coptis japonica
MEVLSIAIVSFSFLLFLFFILRDSRPKNLPPGPRPSPIVGNLLQLGDKPHAEFAKLAQKYGELFSLKLGSQTVVVASSPAAAAEILKTHDKILSGRYVFQSFRVKEHVENSIVWSECNDNWKLLRKVCRTELFTPKMIESQSEIREAKAREMVKFLRGKEGEVVKIVEVVFGTLVNIFGNLIFSKDVFDLEDPTGGSVELKEHLWKLLDMGNSTNPADYFPIMGKLDLFGQRRAVAEVLQQIYDVWGVMLKERRGTKGSESKNDFVDVLLNAGLDDQKINALLMELFGAGTETSASTIEWAITELTKKPLVVSKIRLELVNVVGDNTVKESDLPHLPYLQAFVKETLRLHPPTPLLLPRRALETCTVMNYTIPKECQIMVNAWAIGRDPKTWDDPLNFKPERFLSSDVDYKGNDFELIPFGGGRRICPGLPLASQFSNLIVATLVQNFEWSLPQGMSTSELSMDEKFGLTLQKDPPLLIVLKARASNI

SEQ ID NO: 8549 - protein, 101 aa, Glycine max
  unsure (1)..(101): unsure at all Xaa locations
MAKFNVVQKRRRALIAEKKRQLHGDPLTGKLKIKXPTPFPXXKXXSLSSFLFPSFFFFKKWRRDQKDALLNGLVTMEDVQMAVAEAGDTKDTPSPSPKIPL

SEQ ID NO: 8550 - protein, 214 aa, Oryza sativa
  unsure (1)..(214): unsure at all Xaa locations
HASAHASNPQSTGCSQQESHRHRSPWLRSPTPSQPSPSFPPLMPSPCPQWARCPSSGAECAPVAXAAVQQDAAVWTPAPVSSLATADGSLVHFSVDLSDATDLAASYTTPGQYLLIRVPGEDELKPAFMAIASPPGGAAFEFLVKTVPGTTAEKLCGLRDGDVLELGAIMGNGFPISRINPPDEAQTVLLFATGTGISPVRSLIEFGLAADQRX

SEQ ID NO: 8551 - protein, 295 aa, Digitalis lanata
GEVFTEITKPGLEPYVGLHYPATDIPQAARFLFMKNKVRMICDCRAKHVKVVQDEKLPLDLTLCGSTLRAPHTCHLQYMENMDSIASLVMSIVINEGDEEGSEPVQVQNRKRLWGLVVCHNTTPRFVPFPLRYACEFLAQVFSIHVNKELELENQMFEKNILRTQTLLCDMLLRDAPLGIVSQSPNVMDLVKCDGAALLYKDKKYKLGLTPTDFQIRDIVSWLDEYHRDSTGLSTDSLYDAGFPGALSLGGSISGMAAVKISEKDWLFWFRSHTAAEVRWGGAKHEPGEKDDGSR

SEQ ID NO: 8552 - protein, 374 aa, Siphonodon celastrineus
ALSIAGAVQSQKLAVRAISQLQSLAGGDIKLLCDTVVESVRDLTGHDRVMVYKFHEDEHGEVLAESKRPDMEPYIGLHYPATDIPQASRFLFKQNRVRMIVDCHASPVRVIQDDGLMRPLCLVGSTLRAPHGCHAQYMENMGSTTSLVMAAYINGNDEKATGGRNATKLWGLAVCHHTSARCIPFPLRYACEFLMQAFGLQLNMELQLAAQLSEKHVLKTQTLLCDMLLRDSPTGIVTQSPSIMDLVRCDGAALYYQGNYYPLGVTPTEAQIKDIVEWLLAVHGDSMGLSTDCLADAGYPGSALLGDAVCGMAVAHITNRDFLLWFRSHTAEEIKWGGAKHRPKDKDDGQRMHPRSSFKAFLEVVKSRSLPWEN

SEQ ID NO: 8553 - protein, 373 aa, Celastrus scandens
ALSIAGAVQSQKLAVRAISRLQSLPGGDIKLLCDTVVESVRDLTSYDRVMVYKFHEDEHGEVVAESKRPDLEPYFGLHYPSTDIPQASRFLFKQNRVRMIADCRASPVGVIQDDGLMQPLCLVGSTLRAPHGCHAQYMENMGSKSSLAMAVIINGTDEEVIGGRNATRLWGLVVCHHTSARCIPFPLRYACEFLMQAFGLQLNMELQLAAQLSEKHVLKTQTLLCDMLLRDSPTGIVTQSPSIMDLVKCDGAALYYQGKYYPIGVTPVEAQIKDIVEWLLTFHGDSTGLSTDSLADAGYPGAALLGDAVCGMAVAYITKKDFLFWFRSHTTKEIKWGGAKHHPEDKDDGQRMHPRSSFKAFLEVVKSRSLPCE

SEQ ID NO: 8554 - protein, 214 aa, Paeonia veitchii
IVESVGEGVTDVKPGDHVLPIFTGECKECRHCKLEESNMCDLLRINTDRGVMLNDGKSRFSINGQPIFHFVGTSTFSEYTVLHVGCLAKINPEAPLDKVCVLSCGISTGLGATLNVAKPKKGSTAAIFGLGAVGLAAAEGARMAGASRIIGVDLNPKRFDEARKFGVTEFVNPKDYNKPVQEVIAEMTGGGVDRSVECTGSIMAMMSAFECVHD

SEQ ID NO: 8555 - protein, 255 aa, Glycine max
  unsure (1)..(255): unsure at all Xaa locations
MVFGDWVKRARVEAINWILKTRATLGFRFETAYLSVTYFDRFLSRRSIDSEKSWAIRLLSIACLSLAAKMEECNVPGLSEFKLDDYSFEGKVIQRVELLVLSTLEWEMGIITPFDFLSYFITKFCKESPPSPIFYKTMQLIFTTMKALFVXCAEVNLMDHKPSVIAVAATLVAMDQQLTRDAVELKMSSIPQHRLLESKDVFEYYNLIQRLYEENTKSDTHTPIEMTESSRVTSSAAMTKRRRLTFSDDEGSSHG

SEQ ID NO: 8556 - protein, 426 aa, Bacillus anthracis str. Ames
MKRSITWVQGTALTIGAVLGCGILILPSITANSAGPASILSWVIMSILAFPIVATLARLAKMIPSAGGITAYVQMAFNANTSAILGWIMLGSIPIGVPIIALTGAHYIGYVFPISNLSVIGIAALILITSLLLHIKGIELSSKVSVFVICIISLLIVVAVIVSIPYVKLSSFTPFVPNGWSSVGASSVIIFFSFVGWEMITPLAEEFKRPAKDISISLFLGAICISIMYIAISFVTIGTHSYGDKDQIASLSILISKGLGPIGTYITTILAIFISFSAVHANIAGFSRMIYAQAREGHFPSFFAKLHSQFQTPTRVLLVLGGIFSCILIFYGMARPNLEMLLKGPSVIFITSYIFTMLAALKLLKVRDIGWWMAFLSLIICIIVYSFSGWAIFYPVILSVIGWIYIVMNKKYSTITNHSINTSNEN

SEQ ID NO: 8557 - protein, 379 aa, Arabidopsis lyrata subsp. petraea
MITTGQIIRCKAAVAWEAGKPLVMEEVEVAPPQKHKVRIKILFTSLCHTDVYFWEAKGQTPLFPRIFGHEAGGIVESVGEGLTDLQPGDHVLPIFTGECGDCPHCHSEESNMCDLLRINTERGGMIHDGESRFSINGKPIHHFLGTSTFSEYTVVHSGQVAKINPDAPLDKVCIVSCGLSTGLGATLNVVKPKKGQSVAIFGLGAVGLAAAEGARIAGASRIIGVDLNSQRFDQAKEFGVTEFVNPRDHDKPVQQVIAEMTNGGVDRSVECTGSVQAMIQAFECVHDGWGVAVLVGVPSKDDAFKTHPMNFLNERTLKGTFFGNYKPKTDIPGVVEKYMNKELELEKFITHTLPFSEINKAFDYMLKGESIRCIITMGA

SEQ ID NO: 8558 - protein, 154 aa, Quercus suber
MALSLFGGRRSNVFDPFSLDIWDPFEGFSAVASVPPSARETTAFATARIDWKETPEAHIFKADLPGLKKEEVKVEVEDGNVLQISGERSKEHEEKNDKWHRVERSCGKFMRRFRLPENAKVDQVKANMENGVLTVMVPKEEQKKPAVKAIEISG

SEQ ID NO: 8559 - protein, 151 aa, Photobacterium leiognathi
QDLTVKMTDLQTGKPVGTIELSQNKYGVVFIPELADLTPGMHGFHIHQNGSCASSEKDGKVVLGGAAGGHYDPEHTNKHGFPFTDDNHKGDLPALFVSANGLATNPVLAPRLTLKELKGHAIMIHAGGDNHSDMPKALGGGGARVACGVIQ

SEQ ID NO: 8560 - protein, 135 aa, Zea mays
ADLAAVAYGYLSGSGLDAVLGDYLTKAPSNPGAGDVLMGFLGSVIISFAFSMFKQRKLVKRHAAEIFTSIAIASTFSLYSTAVIGRLIGLEPSLTISILPRCITVALALSIVSFFEGQLPDLKHVVIIPITFLSS

SEQ ID NO: 8561 - protein, 287 aa, Saccharomyces cerevisiae
MTYTTRQIGAKNTLEYKVYIEKDGKPVSAFHDIPLYADKENNIFNMVVEIPRWTNAKLEITKEETLNPIIQDTKKGKLRFVRNCFPHHGYIHNYGAFPQTWEDPNVSHPETKAVGDNDPIDVLEIGETIAYTGQVKQVKALGIMALLDEGETDWKVIAIDINDPLAPKLNDIEDVEKYFPGLLRATNEWFRIYKIPDGKPENQFAFSGEAKNKKYALDIIKETHDSWKQLIAGKSSDSKGIDLTNVTLPDTPTYSKAASDAIPPASLKADAPIDKSIDKWFFISGSV

SEQ ID NO: 8562 - protein, 925 aa, Medicago sativa
  unsure (1)..(925): unsure at all Xaa locations
MELQVIRIFRLVVACVLCLCIFIRSASSATKGFESISCCADSNYTDPKTTLTYTTDHIWFSDKRSCRPIPEILFSHRSNKNVRIFEIDEGKRCYTLPTIKDQVYLIRGVFPFDSLNSSFYVYIGVTELGELRSSRLEDLEIEGVFRATKDYIDFCLLKEDVNPFISQIELRPLPEEYLHGFATSVLKLISRNNLGDTNDDIRFPDDQNDRIWKRKATSTPSSALPLSSNVSNVDLKDSVTPPLQVLQTALTHPERLEFVHDGLETDDYEYSVFLHFLELNGTVRAGQRVFDIYLNNEIKKEKFDVLAGGSKNSYTALNISANGSLNITLVKASGSEFGPLLNAYEILQARSWIEETNQKDLELIQKMREELLLHNRENEALESWSGDPCMIFPWKGITCDDSTGSSIITMLDLSSNNLKGAIPYFVTKMTNLQILNLSHNQFDSLFPSFPPSSLLISLDLSYNDLDGRLPESIISLPHLKSLYFGCNPYMKDEDTTKLNSSLINTDYGRCKGKKPKFGQVFVIGAITRGSLLITLAVGILFFCRYRHKSITLEGFGGKTYPMATNIIFSLPSKDDFFIKSVSVKPFTLEYIEQATEQYKTLIGEGGFGSVYRGTLDDGQEVAVKVRSSTSTQGTXEFDNELNLLSAIQHENLVPLLGYCNEYDQQILVYPFMSNGSLLDRLYGEASKRKILDWPTRLSIALGAARGLAYLHTFPGRSVIHRDVKSSNILLDQSMCAKVADFGFSKYAPQEGDSYVSLEVRGTAGYLDPEYYKTQQLSEKSDVFSFGVVLLEIVSGREPLNIKRPRIEWSLVEWAKPYIRASKVDEIVDPGIKGGYHAEALWRVVEVALQCLEPYSTYRPCMVDIVRELEDALIIENNASEYMKSIDSLGGSNRYSIVMDKRALPSTTSTAESTITTQTLTHPQPR

SEQ ID NO: 8563 - protein, 107 aa, Methanosarcina mazei Goe1
MILMQFCTKCKSMMFPKDGNYHCRKCGSTIPIESDAKNFVSKAKIDDHEVVVLEGEQTSGLPTTNAKCPECGNNTAAWWLRQLRSADESETRFFKCTKCGYTWREYD

SEQ ID NO: 8564 - protein, 181 aa, Methanosarcina mazei Goe1
MIMRFKGMSPRIAETAFVADSADIIGDVEVGSHSSIWFNAVIRGDQNKIKIGNRTSIQDGVIIHADPENGVQVGDNVSVGHGAVLHGCKIEENVIIGMNSTVLNGAEIGKNSIVGANALVPQGKKFPPNSLIIGVPGAVKRETNEEDIEAIQENAEEYVEMAEEYREEIKRYAFTKSSSMT

SEQ ID NO: 8565 - protein, 90 aa, Zea mays
  unsure (1)..(90): unsure at all Xaa locations
KESSTSLKSEPHGRRQLIKVSLCCVCVFATECGGRCAGRCSATAYQKPCLFFCRKCCAACLCVPPGTYGNKNTCPCYNNWKTKRXGPKCP

SEQ ID NO: 8566 - protein, 174 aa, Chloroflexus aurantiacus
MMTAEPVQALIVHGGAWAIPDDQVTAHIAGCIAARTAGWQVLQNGGSALDAVEAAVRVMEDDPIFDAGTGSVLTSAGTVELDAALMDGRTLRYGAVAGLQRIRNPITLARHVLNGPATMLVGPGAEAFAATVGIPFCDNAELVVERERQLWLAWKAQGSPPPPPASVTTPSGDC

SEQ ID NO: 8567 - protein, 289 aa, Oryza sativa
  unsure (1)..(289): unsure at all Xaa locations
MMRDVCMEVLPPMDHYASRGNWFMARKWSPEENKQFERALAGLDLRCPDWDRVARAIPGRSALEVMNHFRDLELDVQQIENGMVPFPVYGAAAAGGAFTLQWDGAHGVGDFRNAYRFGGGGGGKRHFGRTPEQERKKGVPWTEEEHKLFLLGLKKYGKGDWRNISRNFVQTRTPTQVASHAQKYFIRLNSGGKDKRRSSIHDITTVNLTDDRPPSPSQSSLISNQSNTSTLTAAVAPFSSTADVKPQNAANASFNSPSRTLGMAGYGMGLQDQGLQCGGLYQFAHWCSX

SEQ ID NO: 8568 - protein, 188 aa, Sorghum bicolor
MGRSPCCEKAHTNKGAWTKEEDQRLVAYIKAHGEGCWRSLPKAAGLLRCGKSCRLRWINYLRPDLKRGNFTQEEDELIIKLHQILGNKWSLIAGRLPGRTDNEIKNYWNTPIQSASSSPAASTHGRTSRRVQAPLLPPPAPPLSPPRQASHSPAWRRQGGGGWCGPTGCSLRDKQAVTMTARSGSFRA

SEQ ID NO: 8569 - protein, 305 aa, Miscanthus transmorrisonensis
IESVGEGVTDVAPGDHVLPVFTGECKECPHCKSAESNMCDLLRINTDRGVMIGDGKSRFSINGKPIYHFVGTSTFSEYTVMHVGCVAKINPQAPLDKVCVLSCGISTGLGASINVAKPPKGSTGAIFGLGAVGLAAAEGARIAGASRIIGVDLNPSRFEEARKFGRTEFVNQKDHKKPVQEVLAEMTNRGVDRNVECTGNINAMIQAFECVHDGWGVAVLVGVPHKDAKFKTHPMNFLNERTLKGTFFGNFKPRTDLPNVVELYMKKELEVEKFITHSVPFAEINKAFDLMAKGEGIRCIIRMEN

SEQ ID NO: 8570 - protein, 344 aa, Sinorhizobium meliloti
MTKYKLEYIWLDGYTPVPNLRGKTQIKEFDAFPTLEQLPLWGFDGSSTQQAEGRSSDCVLKPVAVYPDPVRTNGALVMCEVMMPDGKTPHPSNTRATVLDDESAWFGFEQEYFFYKNGRPLGFPEQGYPAPQGPYYTGVGYKNVGDIARQIVEEHLDICLAAGINHEGINAEVAKGQWEFQVFGKGSKKAADEVWLARYLLLRLTEKYGIDVEFHCKPLGDTDWNGSGMHANFSTAYLREVGGKDYFEALMAAFEKNLHDHINVYGPDNHLRLTGKHETAPWDKFSYGVADRGASIRVPHSFVNNGYRGYLEDRRPNSQGDPYQIASVILKTISSVPTAVAKVA

SEQ ID NO: 8571 - protein, 57 aa, Triticum aestivum
DVEDGKVVRHQDWWDKKPLKNRETVSFPLLGRLAQTSRRGAMLLTHVLMGFGKDPTP

SEQ ID NO: 8572 - protein, 361 aa, Mycobacterium tuberculosis H37Rv
MSQTVRGVIARQKGEPVELVNIVVPDPGPGEAVVDVTACGVCHTDLTYREGGINDEYPFLLGHEAAGIIEAVGPGVTAVEPGDFVILNWRAVCGQCRACKRGRPRYCFDTFNAEQKMTLTDGTELTAALGIGAFADKTLVHSGQCTKVDPAADPAVAGLLGCGVMAGLGAAINTGGVTRDDTVAVIGCGGVGDAAIAGAALVGAKRIIAVDTDDTKLDWARTFGATHTVNAREVDVVQAIGGLTDGFGADVVIDAVGRPETYQQAFYARDLAGTVVLVGVPTPDMRLDMPLVDFFSHGGALKSSWYGDCLPESDFPTLIDLYLQGRLPLQRFVSERIGLEDVEEAFHKMHGGKVLRSVVML

SEQ ID NO: 8573 - protein, 763 aa, Pichia capsulata
MKSTIIILSVLAAATAKNISKAEMENLEHWWSYGRSDPVYPSPEISGLGDWQFAYQRAREIVALMTNEEKTNLTFGSSGDTGCSGMISDVPDVDFPGLCLQDAGNGVRGTDMVNAYASGLHVGASWNRQLAYDRAVYMGAEFRHKGVNVLLGPVVGPIGRVATGGRNWEGFTNDPYLAGALVYETTKGIQENVIACTKHFIGNEQETNRNPSGTYNQSVSANIDDKTMHELYLWPFQDSVRAGLGSIMGSYNRVNNSYACKNSKVLNGLLKSELGFQGFVVSDWGGQHTGIASANAGLDMAMPSSTYWEEGLIEAVKNGTVDQSRLDDMATRIIAAWYKYARLDDPGFGMPVSLAEDHELVDARDPAAASTIFQGAVEGHVLVKNENALPLKKPKYISLFGYDGVSTDVNTVGGGFSFFSFDVKAIENKTLISGGGSGTNTPSYVDAPFNAFVAKAREDNTFLSWDFTSAEPVANPASDACIDFINAAASEGYDRPNLADKYSDKLVEAVASQCSNTIVVIHNAGIRLVDNWIEHENVTGVILAHLPGQDTGTSLIEVLYGNQSPSGRLPYTVAKKASDYGGLLWPTEPEGDLDLYFPQSNFTEGVYIDYKYFIQKNITPRYEFGYGLTYTTFDYSELEVDAITNQSYLPPDCTIEEGGAKSLWDIVATVKFTVTNTGDVAAAEVPQLYVGIPNGPPKVLRGFDKKLIHPGQSEEFVFELTRRDLSTWDVVAQNWGLQAGTYQFYVGRSVFDVPLTSALVFTN

SEQ ID NO: 8574 - protein, 235 aa, Zea mays; identical to SEQ ID NO: 3077

SEQ ID NO: 8575 - protein, 242 aa, Ceratopteris richardii
  unsure (1)..(242): unsure at all Xaa locations
MLNYSFDXVKXISSSDLIXPAGNYYQHVTFNEQGDLADDDGICYDIINSTGEKKRGLTVDQVKYLEMNFTMDFKLEPERKALIAKELGLRPRQVAIWFQNRRARWKNKQLEQDYETLKSSYEALLQENEDMVKRNKALDEENKLLQAEIARLTGISGNVDVPVDIDAKVASPDLDSDSDLESTVKGEKQQNLKSEIGIPAKLDAQSEILESLTLSCLKSQEAIVAFVEQPIGANDSVVACAL

SEQ ID NO: 8576 - protein, 392 aa, Peregrina linearifolia
DLEPVNPADVPVTAAGALKSYKLAAKAISRLQSLPSGNISLLCDVLVREVRDLTGYDRVMVYKFHEDEHGEVVSECRRSDLESYLGLHYPATDIPQASRFLFMKNKVRMICDCLAPPVKVIQHERLPQPLSLCGSTLRSPHGCHAQYMTNMATIASLVMSVTVNEDDETMDGDQQQMTRKLWGLVVCHHTSPRFVPFPLRYACEFLIQVFGVQINKEVELAAQVREKHILQIQTMLCDMLLRDAPVAIITQSPNVMDLVKCDGAALYFKNKTWLLGVTPTEEQIRGIAEWLLEYHSGNTGLSTDSLMEAGYPGASGLGDAVCGMAAVSITSRDFLFWFRSHTAKEIKWGGAKHDPDDKDDLRKMHPRSSFKAFLEVVKWRSMPWEDMEMDAI

SEQ ID NO: 8577 - protein, 433 aa, Wigglesworthia glossinidia endosymbiont of Glossina brevipalpis
MNINEVNFDRYYIWHPYSSITKPLKTYHVVSAKKCKLKLINGKKLIDGMSSWWTVIHGYNHPKINQAIINQIKKVSHVMFGGITHSPAIKLCKKIIKLTPKGLECVFLSDSGSVSIEVALKMALHYWFSKNERKKVKFLSLRGGYHGDTFGALSVCDPKNSMHNIYQGYLPNQEFTNTFDRKFNEKWESGDDLNLVKLIEKHHKKLAAVIIEPIVQGVGGMNFYHKQYLISIKKLCKFYKILLIVDEIATGFGRTGKLFACNYSKITPDILCIGKALTGGAITLAATITKRKVSETICNKKTPEFMHGPTFMANPLSCAASCANLSLIEEGKWIQQVKFIYQEMCKYLYPLIEHSYVKDVRILGAIGVVETKFFVNLENIQNWFVRHGAWIRPFRKLIYLIPPYIISSYELKFLIKLISLSLNDDKNFLYIKN

SEQ ID NO: 8578 - protein, 174 aa, Thermoplasma acidophilum
MIYEFEGRIPEIDPSAYVSESATVIGKVKIGKEVWIGPGAVLRGDYGEIEVGDYSAIEDNCVIHARPGEKTTIGQHVTIGHLSVIHTGRIRDWAVIGMGSTVSDFAVVGVWAAIGEGAVVKNRQEIPDEAVAVGVPAKVIGKIDDDYKKLWTDYKHNYNTFSSRYKTNLKPINR

SEQ ID NO: 8579 - protein, 437 aa, Magnetospirillum magnetotacticum
MATSSEAEKTRSRVDIRGFSTDILPLSMSALAFSLAFARPPGILGRAFVIPVVMPTYARSDLAFERGEGAYLFTMDGRRFLDFASGVAVNALGHCHPRLVKALAGQAAKVWHTSNLYRVPGQESVAAKLVGQSFADTVFFCNSGAEALECCIKMARRYHFAAGNPQRTRIICAEGAFHGRTLATVAAGGQKKHLEGFAPAVDGFDHVPFGNLNALRAAITEESAAILVEPVQGEGGIVPGDPDYLRRLRATADEFGLLLIFDEVQTGMGRTGTLFAHEQAGIAPDIMGLAKGLGGGFPVGACLATAKAASGMVPGTHGSTFGGNPLAMAVADEVMTIMAEPGFLDHVRAVAQKLRTGVEEAASRFPDVIEEVRGLGLMLGFKPRMPNTDMVARLAANGLLSVGAGDNMVRLLPPLIINDAQVDEAVGILARTFGEVK

SEQ ID NO: 8580 - protein, 392 aa, Caucanthus auriculatus
DLEPVNPADVPVTAAGALKSYKLAAKAISRLQSLPSGNISLLCDVLVKEVRDLTGYDRVMVYKFHEDEHGEVVSECHRSDLESYLGLHYPATDIPQASRFLFMKNKVRMICDCVAPPVKVIQEERLPQPLSLCGSTLRSPHGCHAQYMTNMGIIASLVMSVTVNEEDDMVDGDQPQMARKLWGLVVCHHTSTRFVPFPLRYACEFLIQVFGVQINKEVELAAQVREKHILQIQTMLCDMLLRDAPVAIITQSPNVMDLVKCDGAALYFKNKTWLLGVTPTEEQIRDIAEWLLEYHSGNTGLSTDSLMEAGYPGASALGDAVCGMAAVSITSRDFLLWFRSHTAKEIKWGGAKHDPDDKDDGRKMHPRSSFKAFLEVVKWRSMPWEDVEMDAI

SEQ ID NO: 8581 - protein, 339 aa, Zea mays
MPRDSRPAGMRLFGVTIAPAPEADPPVRDPSPNPPVAAREDVMRKCKSMGNLAALGAVADGGGGGADGGGAGDGYLSDGGLMQSSGKRRRAQERKKAVPWTEEEHRTFLAGLEKLGKGDWRGIAKNFVTTRTPTQVASHAQKYFLRQTNPNKKKRRSSLFDMMPRELSPAPNCPILPPSMAKVHDVVAMTKQLQNSNLEGTSSSNAASQVGRDLPPVPSFKATNMDPSFSKFSHMERVWRTPYPFGPVPRAPEGTPSPTPAAAAAAANAAVPVSQANLTTACTSNTFLSQPKPSDTPSLPPKGGPPSEEDGLELTVAPPSQQNMTNMSSQNAVGVIQVI

SEQ ID NO: 8582 - protein, 198 aa, Leersia perrieri
GQTPVFPRIFGHEAGGIVESVGEGVTDLAPGDHVLPVFTGECKECPHCKSPDSNMCDLLRINTDRGVMIGDGKSRFSINGKPIYHFVGTSTFSEYTVMHVGCVAKINPEAPLDKVCVLSCGISTGLGATINVAKPPKGSTVAIFGLGAVGLAAAEGARIAGASRIIGIDLNPNRFEEARKFGCTEFINPKDHDKPIQQ

SEQ ID NO: 8583 - protein, 1135 aa, Zea mays
MSLPSNNRRTCSRSSSARSKHSARVVAQTPVDAQLHAEFEGSQRHFDYSSSVGAANRPSASTSTVSTYLQNMQRGRYIQPFGCLLAVHPDTFALLAYSENAPEMLDLTPHAVPTIDQRDALGIGVDVRTLFRSQSSIALHKAAAFGEVNLLNPILVHARTSGKPFYAILHRIDVGLVIDLEPVNPADVPVTAAGALKSYKLAAKAISRLQSLPSGNLSLLCDVLVREVSELTGYDRVMAYKFYEDEHGEVISECRRSDLEPYLGLHYPATDIPQASRFLFMKNKVRMICDCCATPVKVIQDDSLAQPLSLCGSTLRASHGCHAQYMANMGSVASLAMSVTINEDEEEDGDTGSDQQPKGRKLWGLVVCHHTSPRFVPFPLRYACEFLLQVFGIQLNKEVELAAQAKERHILRTQTLLCDMLLRDAPVGIFTRSPNVMDLVKCDGAALYYQNQLLVLGSTPSESEIKSIATWLQDNHDGSTGLSTDSLVEAGYPGAVALREVVCGMAAIKISSKDFIFWFRSHTTKEIKWGGAKHEPVDADDDGRRMHPRSSFKAFLEVVKWRSVPWEDVEMDAIHSLQLILRGSLPDEDANRNNVRSIVKAPSDDMKKIQGLLELRTVTNEMVRLIETATAPVLAVDIAGNINGWNNKAAELTGLPVMEAIGRPLIDLVVTDSIEVVKQILDSALQGIEEQNMEIKLKTFHEHECNGPVILKVNSCCSRDLSEKVIGVCFVAQDLTRQKMIMDKYTRIQGDYVAIVKNPTELIPPIFMINDLGSCLEWNKAMQKITGIKREDAINKLLIGEVFTLHDYGCRVKDHATLTKLSILMNAVISGQDPEKLFFGFFDTDGKYIESLLTVNKRTDAEGKITGALCFLHVASPELQHALQVQKMSEQAATNSFKELTYIRQELRNPLNGMQFTCNLLKPSELTEEQRQLLSSNVLCQDQLKKILHDTDLESIEQCYMEMNTVEFNLEQALNTVLMQGIPLGKEKQISIERNWPVEVSCMYLYGDNLRLQQILADYLACALQFTQTAEGPIVLQVMSKKENIGSGMQIAHLEFRIVHPAPGVPEALIQEMFQHNPGVSREGLGLYISQKLVKTMSGTVQYLREADTSSFIILMEFPVAQLSSKRSKPSTSKF

SEQ ID NO: 8584 - protein, 273 aa, Glycine max
MAPQLALTHSSLLYVSPSSASLGFRRNKVLIPQRCTITNEKKNHAITAFAANSLGKSSIQLTPVSTSLFTDKEANLSLRLPISQRFNSKICGQAFKYHASGFRIPANAEKPEWWWRTLSCIPYLIALQMSSTGYYLDPFIQKFPFFQNLIFYIPGGVNRLPIWFPMLYCYVAIVWVVKNKDLPLIFRFHVMMGMLLELALQIVYTSSNFMPLIHFPGGTLGMYYWTGVALAYIFTMIMCIRSALLGRFVRIPLVSESAFIHSLFSLGGFQRPF

SEQ ID NO: 8585 - protein, 282 aa, Glycine max
  unsure (1)..(282): unsure at all Xaa locations
APPPPIFFSSPDAFEFSDDARHWVDXGKLNRGLSVIDSYRLLKEGQALNDDEIFLASALGWCIEWLQAYFLVLDDIMDNSHTRRGQPCWFRVPKVGMIAANDGVLLRNHIPRILRKHFRGKPYYIDLLDLFNEVEFQTASGQMIDLITTLEGEKDLSKYTLTLHRRIVQYKTAYYSFYLPVACALLMAGEDLDKNVDVKNILVEMGTYFQVQDDYLDCFGDPQTIGKIGTDIEDFKCSWLIVKALELSNEQQKKVLQENYGKPDPENVAKVKALYNELNLQV

SEQ ID NO: 8586 - protein, 394 aa, Methanosarcina acetivorans C2A
MSMTIGLAGKPNAGKSTFFKAATLADVEIANYPFTTINANHGVTYVRAECPCKEKEKTCGKCVDGVRLVPIDIIDVAGLVPDACKGKGLGNTFLDELRQAQAIIHVVDASGGTDAEGNPVEIGDHNPLDDVAFLNREITMWLYGILERNWVKLSRKIQAEGLKLEIVISEQLAGAGIKESHVNAALIDTGLARVDHVKWTEEDMIRLCDAMREISKPLLIAANKADIAPRENLDKLKELDRIVVPTSAAAELALKSAAKSGIIRYAPGDRDFELLTEDLTKAQKKGLEAIHKVIERLGTTGVQGCINRTVFELLDLIVVYPVEDEGKWSDKVGNMLPDAYLMKRGSTCHDLAYQIHTEIGDRFLYAVDARTRLRLGEKHELKNGDVIKIVSTAK

SEQ ID NO: 8587 - protein, 136 aa, Methanothermobacter thermautotrophicus str. Delta H
MTFSHNQNYYKCPCRKTLEIKKVSVSLTRRKKMEFCPKCGAVMFPSEGKFKCQCGYEKDITDKLKDKYRVSEEVEAKETIIFTGDDVNTLPTTRVECPKCGNMEAFWWLQQTRRADESETRFFRCTRCKHTWREYD

SEQ ID NO: 8588 - protein, 347 aa, Schizosaccharomyces pombe
MDTAIEDRPGQTLTDDHQVKVAIKATGICGSDVHYWKEGGIGDFILKKPMILGHESAGVVVEVGKGVSSLKPGDPVAVEPGCVCRLCDYCRSGRYNLCPHMEFAATPPYDGTLRTYYITTEDFCTKLPKQISVEEGALFEPMSVAVHAMTRGNLKCGSRVLVMGCGTVGLLMMAVAKAYGAIDIVAVDASPSRVEFAQKYVGAKPFTPIAAKENESLPDYAQRYKQAIIEKYGEFDFAVDATGVGICIHTAVLALKRGGTFVQAGNGKPVIDFPINHIINYEINVLGSFRYAHGCYKQSLFLVSNGLVDVKPLITHRFAFKDALKAYETVASGEEGVLKVIIGGPDA

SEQ ID NO: 8589 - protein, 366 aa, Thermosynechococcus elongatus BP-1
MQGTTIFRGDAFAKVSMKAQVFRGVNQLSYEEIPIPEIAADEVLVRVRVVGLCQSDIKKIRYPLYEPPRIFGHETAGEIAAVGDAVTGWQVGQRVVVMHHIPCMHCAYCLNENYSMCHVYKTVTTTAGFIPSGGGFAEYVKVPGHIVEHGGLIPIPDPISDEEASFVEPTNCCLKAVKKAGIAPGQTVLITGAGPIGLMFIMLVNLFGARAIATDLLPSRIAKAKEVGAAAAFDARDPDLSAKVQALTHGLGVDVSLLAVPSEKAFFQALECTRKGGKILFFAEFPDEVEIPLNPNILYRREIDLMGSYSSSYRLQSLACDIIFNRRIDVKTLVSDRYPLSKLAEAVEQAVHPTPETYKILIYPES

SEQ ID NO: 8590 - protein, 735 aa, Geobacillus stearothermophilus
MENQNRQNAAQCPFHGSVTNQSSNRTTNKDWWPNQLNLSILHQHDRKTNPHDEEFNYAEEFQKLDYWALKEDLRKLMTESQDWWPADYGHYGPLFIRMAWHSAGTYRTGDGRGGASTGTQRFAPLNSWPNNANLDKARRLLWPIKKKYGNKISWADLFILAGNVAIESMGGKTIGFGGGRVDVWHPEEDVYWGSEKEWLASERYSGDRELENPLAAVQMGLTYVNPEGPDGKPDPKAAARDIRETFRRMGMNDEETVALIAGGHTFGKAHGAGPATHVGPEPEAAPIEAQGLGWISSYGKGKGSDTITSGIEGAWTPTPTQWDTSYFDMLFGYDWWLTKSPAGAWQWMAVDPDEKDLAPDAEDPSKKVPTMMMTTDLALRFDPEYEKIARRFHQNPEEFAEAFARAWFKLTHRDMGPKTRYLGPEVPKEDFIWQDPIPEVDYELTEAEIEEIKAKILNSGLTVSELVKTAWASASTFRNSDKRGGANGARIRLAPQKDWEVNEPERLAKVLSVYEDIQRELPKKVSIADLIVLGGSAAVEKAARDAGFDVKVPFFPGRGDATQEQTDVESFAVLEPFADGFRNYQKQEYSVPPEELLVDKAQLLGLTAPEMTVLVGGLRVLGANYRDLPHGVFTDRIGVLTNDFFVNLLDMNYEWVPTDSGIYEIRDRKTGEVRWTATRVDLIFGSNSILRSYAEFYAQDDNQEKFVRDFINAWVKVMNADRFDLVKKARESVTA

SEQ ID NO: 8591 - protein, 93 aa, Oryza sativa
  unsure (1)..(93): unsure at all Xaa locations
ARGGCPPASGRCSRAGVLVSARXQHGSHHRAPYDNDYCIVSGMWNATLDRRRVFEAMEIVVFLRTGVRPRSWDEPDXAAWTEXLRRHRRRRRR

SEQ ID NO: 8592 - protein, 217 aa, Ophioglossum pedunculosum
RSGLLKKAYELSVLCDAEVALIIFSGTGKLFEFASSSMKKILERYRKYGGGLHDNSIATRDAEYWRNEVMRMKEHIACLEESQRHLLGENLVSLSVKNLQKLEHQLEIGANRIRTRKTQILLEQIQELQKKEHFLHGENNILKTKLEQLSTRQVPSLGTLIYTSTVTTTSTTSAGAGVEDNAGGHDSMNAMQKMTLHSNFQPATSAQNTLQLGYYPD

SEQ ID NO: 8593 - protein, 154 aa, Triticum aestivum
LPLQGHIGAYLVVAGVDPTGTHLFTVHAHGSTDKLPYVTMGSGSLAAMSVFETQWKPDLSQEEAIKLASDAILAGVWNDLGSGSNVDVAIITSDKTTLKRNYITPNQKEPKLQSYRFPKGTTAVLNEKIIKKEEIKRYITVEDVPVEEKMDVDT

SEQ ID NO: 8594 - protein, 329 aa, Micromonospora echinospora
MPRSLVTGGFGFVGSHVVERLVRRGDEVVVYDLADPPPDLEHPPGAIRHVRGDVRDADGLAAAATGVDEVYHLAAVVGVDRYLSRPLDVVEINVDGTRNALRAALRAGARVVVSSTSEVYGRNPRVPWREDDDRVLGSTATDRWSYSTSKAAAEHLAFAFHRQEGLPVTVLRYFNVYGPRQRPAYVLSRTVARLLRGVPPVVYDDGRQTRCFTWIDEAAEATLLAAAHPRAVGECFNIGSSVETTVAEAVRLAGTVAGVPVAAQTADTGAGLGARYQDIPRRVPDCGKAAALLDWRARVPLVTGLRRTVEWARRNPWWTAQADDGLVVR

SEQ ID NO: 8595 - protein, 184 aa, Triticum aestivum
  unsure (1)..(184): unsure at all Xaa locations
MNLWTDDNASMMEVVAFMASADMPAFPWGAAATPPPPAAVPQQPAFNQDTLQQRLQAIIEGSRETWTYAIFWQSSTDAGASLLGWGDGYYKGCDDADKRPAEPTPGKRVEQEHQKRDLRELNSLIAGGGAAAPDDAAPEGVTLAAWVLPVPITXSAPPGGARGPGSPPASPWGVXXXPCEXAKK

SEQ ID NO: 8596 - protein, 103 aa, Zea mays; identical to SEQ ID NO: 4636

SEQ ID NO: 8597 - protein, 169 aa, Sinapis alba
MASPDVEYRCFVGGLAWATDERSLETAFSQFGELVDSKIINDRETGRSRGFGFVTFKDEKSMKDAIEGMNGQDLDGRSITVNEAQSRGSGAGGGGRGGGGGYRGGGGYGGGGGGYGGGRREGGGYSGGGGGYSSRGGGGGGYGGGGRRDGGGYGGGEGGGYGGGGGGGW

SEQ ID NO: 8598 - protein, 315 aa, Gaeumannomyces graminis var. tritici
MTSKDDIRIMGMPPFMIDFLMGGVSAAVSKTAAAPIERIKLLVQNQEEMLKAGRLDRRYDGIMDCFRRTTADEGVMALWRGNTANVIRYFPTQALNFAFRDKFKKMFGYRKEKDGYAKWMAGNLASGGAAGATSLLFVYSLDYARTRLANDNKSAKGGGARQFNGLVDVYRKTLASDGIAGLYRGFGPSVAGIVVYRGLYFGMYDSIKPVVLTGNLETNFLASFALGWCVTTGAGIASYPLDTVRRRMMMTSGEAVKYSSSLDAFRQIVAKEGVKSLFKGAGANILRGVAGAGVLSIYDQLQLIIFGKAFKGGSG

SEQ ID NO: 8599 - protein, 362 aa, Nostoc sp. PCC 7120
MTQNYRITLLPGDGIGPEIMAVAVDVLKVVGQQFDIQFDFQEALIGGAAIDATGEPLPSATLDTCRHSDAVLLAAIGGYKWDSLPPHQRPEGGLLGLRAGLELFANLRPAQILPQLIDASTLKREVVEGVDIMVVRELTGGIYFGKPRGIFTTETGEKRGVNTMVYTESEIDRIGRIAFETARKRRGKLCSVDKANVLDVSQLWRDRITNLSQEYPDVELSHLYVDNAAMQLVRAPKQFDTIVTGNLFGDILSDAAAMLTGSIGMLPSASLGASGPGVFEPVHGSAPDIAGQDKANPLAQVLSAAMMLRYALDQPQAADKIEQAVLQVLEQGDRTGDIISVGMNLLGCRGMGDSLIKALAKS

SEQ ID NO: 8600 - protein, 388 aa, Citrobacter koseri
QNGKLNVPENPIIPFIEGDGIGVDVTPAMLKVVDAAVEKAYKGERKISWMEIYTGEKSTQVYGQDVWLPAETLDLIRDYRVAIKGPLTTPVGGGIRSLNVALRQELDLYVCLRPVRYYQGTPSPVKHPELTDMVIFRENAEDIYAGIEWKADSADAEKVIKFLREEMGVKKIRFPEHCGIGIKPCSEEGTKRLVRAAIEYAIANDRDSVTLVHKGNIMKFTEGAFKDWGYQLARDEFGGELIDGGPWVKIKNPNTGKEIVIKDVIADAFLQQILLRPAEYDVIACMNLNGDYISDALAAQVGGIGIAPGANIGDECALFEATHGTAPKYAGQDKVNPGSIILSAEMMLRHMQWFEAADLIVKGMEGAIAAKTVTYDFERLMEGAKLLK

SEQ ID NO: 8601 - protein, 513 aa, Brassica napus
QTLSQLLDPTTAILIIVSLFIFIGLITRRRRSYPPGPRGWPIIGNMLMMDQLTHRGLANLAKKYGGLCHLRMGFLHMYAVSSPHVARQVLQVQDSIFSNRPATIAISYLTYDRADMAFAHYGPFWRQMRKVCVMKVFSRKRAESWASVRDEVDKMIRSVSSNVGKSINVGEQIFALTRNITYRAAFGSACEKGQDEFIRILQEFSKLFGAFNVADFIPYFGWIDPQGISKRLVKARNDLDGFIDDIIDEHMKKKENQNTVDDGDVGDTDMVDDLLAFYSEEAKLVSETTDLQNSIKLTRDNIKAIIMDVMFGGTETVASAIEWALTELLRSPEDLKRVQQELAEVVGLDRRVEESDIEKLTFLKCTLKETLRLHPPIPLLLHETAEDTEIDGYFVPKKSRVMINAFAIGRDPKSWPDAETFRPSRFLEPGVADFKGSNFEFIPFGSGRKSCPGMQLGLYALELAVAHILHCFTWKLPDGMKASELDMNDVFGLTAPKATRLFAVPSTRLICAV

SEQ ID NO: 8602 - protein, 445 aa, Butyrivibrio fibrisolvens
NCGCTYEKLIYAYKAGLVKEETIDEAVTRLMEIRLRLGTIPERKSKYDDIPYEVVECKEHIKLALDAAKDSFVLLKNDGLLPLNKKDYKSIAVIGPNSDSRRALIGNYEGLSSEYITVLEGIRQVVGDDIRLFHAEGTHLWKDRIHVISEPKDGFAEAKIVAEHSDLVVMCLGLDASIEGEEGDEGNQFGSGDKPGLKLTGCQQELLEEIAKIGKPVVLLVLSGSALDLSWAQESNNVNAIMQCWYPGARGGRAIAEVLFGKASPGGKMPLTFYASDDDLPDFSDYSMENRTYRYFKGTPLYPFGYGLGYSKIDYLFASIDKDKGAIGDTFKLKVDVKNTGKYTQHEAVQVYVTDLEATTRVPIRSLRKVKCLELEPGETKEVEFTLFARDFAIIDERGKCIIEPGKFKISIGGQQPDDRSKELMGRECDIFEIELTGSVTEVEY

SEQ ID NO: 8603 - protein, 676 aa, Brassica napus
MDDVAGLQEAAGARFSQVELIGRGSFGDVYKAFDKELNKEVAIKVIDLEESEDEIEDIQKEISVLSQCRCPYITEYYGSYLHQTKLWIIMEYMAGGSVADLLQSGHPLDETSIACITRDLLHAVEYLHSEGKIHRDIKAANILLTENGDVKVADFGVSAQLTRTISRRKTFVGTPFWMAPEVIQNSEGYNEKADIWSLGITVIEMAKGEPPLADLHPMRVLFIIPRENPPQLDEHFSRPLKEFVSLCLKKVPAERPSAKELIKHRFIKNAKKSPKLLERIRERPKYQVKEDEETPRNGPKAPFESSGTVRVVRDERSQGTPGSSFQGKTVKNAGWDFSIGASQGIGTIRALKPPHARERRQEVPSTQTSQRATRASGSQLSPTSGITVNDYEDGFHDEEDSSLSGSGTVVIRTPKRSQSSSIFREQISASSSGYASLDDASASGTVVVRGQHDDYASPRTPKSRLGNQDRTSSASEDSLANLAEAKAALDAGFRRGNARERLGMRNNNKDGNVNRRREQMTEDSDYSRNSGDKSGKQKALPKSQQVSDEEEEDPIWDSLPASLSVLLIPSLKEALGDDSKGSIGRALSRSLVAMERENPGSCEAFVAKLIELLGSSKEASVKELQDMAVRVFSKTAPADAENKRKPANKEFSSNTNVSPLGRFLLSRWISQSSRDL

SEQ ID NO: 8604 - protein, 364 aa, Zea mays
MAGTVTVPGSSKPSTPLLKDELDIVIPTIRNLDFLEMWRPFFQPYHLIIVQDGDPTKTIKVPEGFDYELYNRNDINRILGPKASCISFKDSACRCFGYMVSKKKYIYTIDDDCFVAKDPSGKDINALEQHIKNLLSPSTPFFFNTLYDPYREGADFVRGYPFSLREGAHTAVSHGLWLNIPDYDAPTQLVKPKERNERYVDAVMTIPKGTLFPMCGMNLAFDRDLIGPAMYFGLMGDGQPIGRYDDMWAGWCVKVICDHLSLGVKTGLPYIWHSKASNPFVNLKKEYKGIFWQEDIIPFFQNVTIPKDCDTVQKCYIYLSGQVKEKLGTIDPYFVKLGDAMVTWIEAWDELNPSTPAAANGKAK

SEQ ID NO: 8605 - protein, 292 aa, Pyrococcus abyssi
MTLPKEVMMPNDNPYALHRVKVLKVYDLTEREKLFLFRFEDPKLAETWTFKPGQFVQLTIPGVGEVPISICSSPMRKGFFELCIRRAGRVTTVVHRLKPGDTVLVRGPYGNGFPVDEWEGMDLLLIAAGLGTAPLRSVFLYAMDNRWKYGNITFINTARYGKDLLFYKELEAMKDLAEAENVKIIQSVTRDPDWPGLHGRPQQFIVEANTNPKNTAVAICGPPRMYKAVFESLINYGYRPENIYVTLERRMKCGIGKCGHCVAGTSTSWKYICKDGPVFTYFDIVSTPGLLD

SEQ ID NO: 8606 - protein, 258 aa, Pyrobaculum aerophilum str. IM2
MKETWRLVRRVVEDGDIVLEVLDARDPEATRSVEVEKIAEELGKRLLVVLNKADLVEREIAEQWKSYLESRGMNVVYISAKYRLGTRKLITHIRALAPRIPATVVVVGYPNVGKSTIINYLKGRHVAPTSPKPGWTRGEQLVKAKSWLTVLDTPGIVRTKSTGDLALDVIRGLVDPGTVDDPVPYAYALLKRVVKHNPDALKEAYGIESDIDNALVEIGKVKRRLLKGGRINIEEAARIVLKDWIVGKLRYALPPPNV

SEQ ID NO: 8607 - protein, 159 aa, Streptococcus pyogenes MGAS315
MPNLYDFTVKAQDGSDISLVNYKEKVVLVVNTATKCGLTPQYQALQALYDTYHDKGFEVLDFPCNQFLNQTPGEAEEINRFCSLTYHTTFPRFAKIKVNGKDADPLFTWLKEEKSGPLGKRIEWNFTKFLIDQNGQVIKRYSSKTDPKLIEEDLKALLG

SEQ ID NO: 8608 - protein, 357 aa, Tropheryma whipplei str. Twist
MVRMKALVYHGPGKRSLDTVDDPTIKLGTDVILEMETTTICGSDLHILKGDVAAVKPGTVLGHEGIGKIVEVGKDVKSHSVGDRVIVSPMSSCGVCRFCRANNNGHCLGDSEGPGGWRLGGLINGVQAQFARIPLADNSLHKLPSGLDPKVGILVSDVLPTGHEVGAQAGQVTLGSVVAVIGCGPVGLGAIVTSLLYSPSKVIAVDADSNRLELARKLGATDTVRVNRERPLDAIEDVKKLTEGGFGVDVAIEAVGVPVTFSMALGIAAPGGRVANIGVHGAPVDFPLQDLWDKNIAVTLGIVSTHTIPLLLAALSEGKIDASQFVTHEFDLSDLERAYDVFSAAAQHNVVKVAIRA

SEQ ID NO: 8609 - protein, 145 aa, Zea mays
MESKSPWSLRLLICCAAMVAIALLPQQGGQAACFVPTPGPAPAPPGSSATNTNASSAAPRPAKPSAFPPPMYGGVTPGTGSLQPHECGGRCAERCSATAYQKPCLFFCRKCCAACLCVPPGTYGNKNTCPCYNNWKTKRGGPKCP

SEQ ID NO: 8610 - protein, 215 aa, Gossypium klotzschianum
DVYYWECKGYTPLFPRILGHEASGIVESVGEGVNDLKPGDHVLPIFTGECKECRHCLSEESNNMCELLRINCDRGVMLADGKTRFSINGKPIYHFVGTSTFSQYTVVHVGQVAKISPTAPLDKVCPISCGICTGFGATVNVAKPKKGQTVAVFGLGAVGLAAAEGARVCGASRIIAVDVNPRRFEEAKRFGITEFVNPKDYDKPVQEVIVEMTGG

SEQ ID NO: 8611 - protein, 462 aa, Bradyrhizobium japonicum USDA 110
MSERWTPESWRSKPVLQVPDYPDAKALADVEAQLATFPPLVFAGEARNLKKALGRVAAGEAFLLQGGDCAESFAEHGANNIRDFFRVLLQMAVVLTYAGAVPVVKVGRIAGQFAKPRSSPTEKVGGVELPSYRGDIVNDIAFTKEARVPDPQRQLMAYRQSAATLNLLRAFATGGYANLGSVHEWMLGFLKDSPQSRRYKELADRISDALNFMRACGLDLESHPELRATDFYTSHEALLLGYEQAMTRIDSTTGDWYATSGHMIWIGDRTRQLDHGHIEYFRGIKNPIGLKCGPSLKPDELLKLIDVLNPDNEPGRLTLIGRFGSDKVGEHLPNMIRAVKREGRVVVWSCDPMHGNTITSTSGYKTRPFDRILSEVKSFFAIHAAEGTHAGGVHLEMTGQDVTECLGGARAITDEDLNDRYHTVCDPRLNAEQSIDMAFLVAELLKQERAGKARPMPVAAGL

SEQ ID NO: 8612 - protein, 356 aa, Tropheryma whipplei TW08/27
MRMKALVYHGPGKRSLDTVDDPTIKLGTDVILEMETTTICGSDLHILKGDVAAVKPGTVLGHEGIGKIVEVGKDVKSHSVGDRVIVSPMSSCGVCRFCRANNNGHCLGDSEGPGGWRLGGLINGVQAQFARIPLADNSLHKLPSGLDPKVGILVSDVLPTGHEVGAQAGQVTLGSVVAVIGCGPVGLGAIVTSLLYSPSKVIAVDADSNRLELARKLGATDTVRVNRERPLDAIEDVKKLTEGGFGVDVAIEAVGVPVTFSMALGIAAPGGRVANIGVHGAPVDFPLQDLWDKNIAVTLGIVSTHTIPLLLAALSEGKIDASQFVTHEFDLSDLERAYDVFSAAAQHNVVKVAIRA

SEQ ID NO: 8613 - protein, 343 aa, Arabidopsis thaliana
MTTNKQVIFKDHVSGFPKESDFNFTTTTVELRVPEGSKSVLVKNLYLSCDPYMRSRMGKPDPSSALAQAYAPGKPIYGYGVSRVIESGHPDYKKGDLLWGIVGWEEYSVITPMAHMHFKIQHTDVPLSYYTGLLGMPGMTAYAGFYEVCSPKKGETVYVSAASGAVGQLVGQFAKMMGCYVVGSAGSKEKVDLLKTKFGFDDAFNYKEESDLSAALKRCFPKGIDMYFENVGGKMLDAVLLNMNPHGRIAVCGMISQYNLENQEGVHNLSNIIYKRIRIQGFVVADFYDKYPKFLELVLPRIKEGKITYVEDVADGLEKAPEALVGLFHGKNVGKQVVVIARE

SEQ ID NO: 8614 - protein, 195 aa, Oryza sativa
  unsure (1)..(195): unsure at all Xaa locations
XPPPPPQPQPQAAKKSRRGPRSRSSQYRGVTFYRRTGRWESHIWDCGKQVYLGGFDTAHAAARAYDRAAIKFRGVEADINFNLSDYEEDMRQMKSLSKEEFVHVLRRQSTGFSRGSSKYRGVTLHKCGRWEARMGQFLGKKYIYLGLFDSEVEAARAYDKAAIKCNGREAVTNFEPSTYDGELNSTGINSDFTXX

SEQ ID NO: 8615 - protein, 254 aa, Zymomonas mobilis
MSVSFDYSGKVALVTGAGTGIGRETALAFAKAKAYVAIIGRSENNIQETLRLVTEMGGQAIAIQADVSQEDSIKAAIEKTVETFGKLDFAFNNAGIEHKAIPAADIPSEEWDRIISTNLNGVFFSMKHEIPAMLKSGSGSIVNTASGAGVKGFPGNGAYCASKFGLIGLSKAAALDYAKQHLRINVVAPGIIETPMMQRFTGGTEEGRETAIAQEPVGRAGHPKEIAGTVLWLCSDLAAFTTGSVFVVDGGQTA

SEQ ID NO: 8616 - protein, 379 aa, Arachis ipaensis
MGAGGRVTKIEAQKKPLSRVPHSNPPFSVGQLKKAIPPHCFERSLFISFSYVVYDLLMAYLLFYIATTYFHKLPYPFSFLAWPIYWAIQGCILTGVWVIAHECGHHAFSKYQLVDDMVGLTLHSCLLVPYFSWKISHRRHHSNTGSLDRDEVFVLKPKSKVSWYNKYMNNPPGRAISLFITLTLGWPLYLAFNVSGRPYDRFASHYDPYAPIYSNRERLLIYVSDSSVFAVTYLLYHIATLKGLGWVVCVYGVPLLIVNGFLVTITYLQHTHASLPHYDSSEWDWLRGALATVDRDYGILNKAFHHITDTHVAHHLFSTMPHYHAMEATNAIKPILGDYYQFDGTPVYKALWREAKECLYVEPDDGASQKGVYWYKNKF

SEQ ID NO: 8617 - protein, 371 aa, Acinetobacter sp. ADP1
MTKFTEITAAVTECKGADFELKQLKIREPQNDEVLVKIVATGMCHTDLIVRDQYYPVPLPAVLGHEGSGIIEAIGPNVKDLAVGDHVVLSYGFCGSCEQCSSGQPAYCQDFFGRNFSGGDPDGHSAVCSHDHHKIHDHFFAQSSFATYAISRENNAVKVSKDVPLELLGPLGCGIQTGAGAAINALKVAPASSFVTWGAGAVGLSALLAAKVCGATTIIAVDIVESRLALAKELGATHVINSKTQDPVEAIKEITGGGVKFALESTGRPEILKQGIDALGILGSIAVVGAPPLGTTAAFDVNDLLLGGKSIIGVVEGSGVPKKFIPALVSLYQQGKFPFDKLVKFYDFKDINQAAIDSHKGITLKPILKIG

SEQ ID NO: 8618 - protein, 263 aa, Shigella flexneri 2a str. 2457T
MGKLTGKTALITGALQGIGEGIARTFARHGANLILLDISPEIEKLADELCGRGHRCTAVVADVRDPASVAAAIKRAKEKEGRIDILVNNAGVCRLGSFLDMSDEDRDFHIDINIKGVWNVTKAVLPEMIARKDGRIVMMSSVTGDMVADPGETAYALTKAAIVGLTKSLAVEYAQSGIRVNAICPGYVRTPMAESIARQSNPEDPESVLTEMAKAIPLCRLADPLEVGELAAFLASDESSYLTGTQNVIDGGSTLPETVSVGI

SEQ ID NO: 8619 - protein, 501 aa, Staphylococcus aureus subsp. aureus Mu50
MNFDWIKTRSDFDDDKPAVIDHAKQTSWTYQQLNARADNMAHYLTSQGVKKGDVIGIFAPNDIAILDLLFACFKTGAVFLPLNWRLNPKEIAAIVEDAQLKLLFYAEKHLSSLTDIDQNLLHMDIDVAQYDEIVNPDYHQPFQATPVEPQDLAALIYTSGTTGSPKGVMFSYESFVHNGANLELTYKFNSNYITIVSTPMFHVLGFNDTVLPVLMSGGTLILQRYFNGEELNDMIAQYHPTFIIMIPTMYYSTLRASNFNPENFRAMDYIIQGGSQPLPSIQAAFKQYGINIINGYGLTEAPLVLVNTPENSKRKPMSIGKAVMFVDARILDDNGEEVPTGEIGELAIKAKNVTPGYWNKPAETAKAFHGRYLLTGDLAKMDDDGDIFIIDRKKELIITGGENVLPSEVENALAEHPLVDRCVVVGYDHPKYGESIAAAIILREDEPHYAEILDQHMRSRLAGYKVPRMYVPVTHMPLNSTQKPDKLAIRQMMNDKVSQTL

SEQ ID NO: 8620 - protein, 173 aa, Helicobacter pylori
MNLDQLEVSHDADSLCVVIEISKHSNIKYELDKESGALMVDRVLYGAQNYPANYGFVPNTLGSDGDPVDALVLSDVAFQAGSVVKARLVGVLNMEDESGMDEKLLALPIDKIDPTHSYVKDIDDLSKHTLDKIKHFFETYKGLEPNKWVKVKGFEKKESAIKVLEKAIKAYQG

SEQ ID NO: 8621 - protein, 124 aa, Solanum tuberosum
GCITTKELGTVMRSLGQNPTEAELQDMINEVDADGNGTIDFPEFLNLMARKIKDTDFEEELKEAFRVFDKDRNGFISAAELPHVMTNLGEKLTDEEVDEIIREADVDCDGQINYDEFVKVMMAK

SEQ ID NO: 8622 - protein, 751 aa, Geobacillus stearothermophilus
MENQNRQNAAQCPFHGSVTNQSSNRTTNKDWWPNQLNLSILHQHDRKTNPHDEEFNYAEEFQKLDYWALKEDLRKLMTESQDWWPADYGHYGPLFIRMAWHSAGTYRTGDGRGGASTGTQRFAPLNSWPNNANLDKARRLLWPIKKKYGNKISWADLFILAGNVAIESMGGKTIGFGGGRVDVWHPEEDVYWGSEKEWLASERYSGDRELENPLAAVQMGLTYVNPEGPDGKPDPKAAARDIRETFRRMGMNDEETVALIAGGHTFGKAHGAGPATHVGPEPEAAPIEAQGLGWISSYGKGKGSDTITSGIEGAWTPTPTQWDTSYFDMLFGYDWWLTKSPAGAWQWMAVDPDEKDLAPDAEDPSKKVPTMMMTTDLALRFDPEYEKIARRFHQNPEEFAEAFARAWFKLTHRDMGPKTRYLGPEVPKEDFIWQDPIPEVDYELTEAEIEEIKAKILNSGLTVSELVKTAWASASTFRNSDKRGGANGARIRLAPQKDWEVNEPERLAKVLSVYEDIQRELPKKVSIADLIVLGGSAAVEKAARDAGFDVKVPFFPGRGDATQEQTDVESFAVLEPFADGFRNYQKQEYSVPPEELLVDKAQLLGLTAPEMTVLVGGLRVLGANYRDLPHGVFTDRIGVLTNDFFVNLLDMNYEWVPTDSGIYEIRDRKTGEVRWTATRVDLIFGSNSILRSYAEFYAQDDNQEKFVRDFINAWVKVMNADRFDLVKKARESVTALQYPAPFRSVSVGSLQ

SEQ ID NO: 8623 - protein, 1005 aa, Novosphingobium aromaticivorans
MAAADRERRGQGTRGRRRQCHGRAAFGLAGRHVRRCRAVRKRRQAHQLCRGGDAGGRQGRIPRAGFGAAGKGDGPARPGADDRVDHRSGRQAAPHGNGGASCARTLDRVRCARRERLGQLRRPAAGRERDGGGDVQGFTRRAAQGAGTAPSGREPAMSALLILLAAGAAQPDADIAARIAAMSDAEKAAQLQSTVTASSPDLPAYDYWNEALHGLARNGVATVFPQAIGLAATWDAPLLERIGTVVSTEARAKYNALPGKDRRRYQGLTIWSPNINIFRDPRWGRGQETYGEDPVLTGTLATAYVRGLQGPDLDHPRVIATPKHLVAHSGPEAGRDSFNVQSSAYDMEATYLPAFRRALTEGKALSVMCSYNSVHGVPVCGADWLLNQRVRKDWGFDGLVVSDCDAIGNINHYQRYRQTNAAASAAAINAGMDLNCGRTYAALPEALAQGLTTREVVDRALARTFAARRKLGDAFGATSPWATIPANTVDTAEHRALALEAARKSLVLLKNNGVLPLRKGARIAVVGPNADSLDTLEANYHGTAAQPVTPLDGFAARYRMSYAQGASLAEGVPVVIPRTAFGAGLKAEFFADPALAGAPLTVRTDARVDFDWNRTSPAAGIPAERYGVRWTGTIAPDGPGEHLLRMDVPRCFDCSGHDAVRLWIDGKQVIADTGDNNAVEARVTFADTRPREIRLELSHASEDEGIRLTWVAPPAAQRERAVAAARDADAVIAFVGLSPAVEGEALQIEVPGFSGGDRTDIALPRAQQDLLETLKATGKPLVVVLLSGSAVAMPWVKENADAVVAAWYPGQSGGTAIADLVDGTLNPSGRLPVTFYARTRDLPAFVDYNMRERTYRYFHGTPLWSFGEGLSYTSFAYGKASAPARIKAGETLTATVSLANVGARNGEEVAQAYLVPPEHLRTIGEFNDPVLRHSLVAYRRAALAKGETTRLSFTLDPRSLSTVDRNGVRAVRPGTYRLFIGGGQPGAASGAEISFTIEGTLELPK

SEQ ID NO: 8624 - protein, 93 aa, Zea mays
THRVRLKGDPRDDFSFPWLFPAGMRPGADRVANLWDRLLCARPSTLDVALPISDPTKASRRKVRGERALEEWLAADNAGDTEAWPRGHGYRED

SEQ ID NO: 8625 - protein, 478 aa, Xanthomonas campestris pv. campestris str. ATCC 33913
MRGRMGRHRSGPRMSEPSSTDAPQFQRSMQVRHLVMLSLGGVIGTGLFFNTGYIIASTGALGTVLAYLIGALVVYLVMQCLGELAVAMPQTGAFHVYAARYLGPATGYVVAWLYWLTWTVALGSSLTAAAFCMQYWFPHSPAWPWCLLFCVLIFSLNMVSARWFAEGEFWFSLINVVTIVVFIVLGGAAVVGWLPLADGSPAPGVRHLRADGWFAHGTVPILMTMVAVNFAFSGTELIGIAAGETAQPARAIPLAIRTTLIRLVVLFVGTVLVLAALLPAHAAAVETSPFVRAFELLGIPYAAGLLNAVILTAILSAANSGLYAAARMLWSLANEGTLPARFARLTRRGIPLPALVLSMLGGLLALLTGVYAADTVFVAISAVSGFAVVVVWLSICASHYCFRRQLLRDGIALDSLAYRAPWYPWTPLIGGALCVLACAGLAFDPQQRIALWCGIPFVALCYGAHAVTQRLAARRVRP

SEQ ID NO: 8626 - protein, 117 aa, Leavenworthia crassa
GMIHDGESRFSINGKPIHHFLGTSTFSEYTVVHSGQVAKINPKAPLDKVCIVSCGLSTGLGATLNVAKPKKGQSVAVFGLGAVGLAAAEGARIAGASRIIGVDLNSKRFEEAKKFGV

SEQ ID NO: 8627 - protein, 607 aa, Haemophilus influenzae Rd
MKIKNRVNMNLDLHFVHRIQQQAKTRTNMTALRYKEHGLWRDISWKNFQEQLNQLSRALLAHNIDVQDKIAIFAHNMERWTIVDIATLQIRAITVPIYATNTAQQAEFILNHADVKILFVGDQEQYDQTLEIAHHCPKLQKIVAMKSTIQLQQDPLSCTWESFIKTGSNAQQDELTQRLNQKQLSDLFTIIYTSGTTGEPKGVMLDYANLAHQLETHDLSLNVTDQDISLSFLPFSHIFERAWAAYILHRGAILCYLEDTNQVRSALTEIRPTLMCAVPRFYEKIYAAVLDKVQKAPKLRQIMFHWAISVGQKYFDLRANNKAIPFLLKKQFALADKLVLSKLRQLLGGRIKMMPCGGAKLEPAIGLFFHAIGINIKLGYGMTETTATVSCWHDFQFNPNSIGTLMPKAEVKIGENNEILVRGGMVMKGYYKKPEETAQAFTEDGFLKTGDAGEFDEQGNLFITDRIKELMKTSNGKYIAPQYIESKIGKDKFIEQIAIIADAKKYVSALIVPCFDSLEEYAKQLNIKYHDRLELLKNSDILKMFEHRINAVQKELAHFEQVKKFTLLSQAFSIKLGEITPTLKLRRKVILERYRKQIEAMYHSQEA

SEQ ID NO: 8628 - protein, 671 aa, Hypocrea jecorina
MARADQPQDKTKTEQRIGAYTVVRTLGEGSFGKVRLAIHNGTGQKVALKIITRKKLISRDMAGRVEREIEYLQLLRHPHIIKLYTVIKTPSEIIMVLEYAGGELFDYIVQNGRMKEAEARRFFQQMICAVEYCHRHKIVHRDLKPENLLLDENLNVKIADFGLSNIMTDGNFLKTSCGSPNYAAPEVIGGKLYAGSEVDVWSCGVILYVLLVGRLPFDDEHIPSLFAKIARGTYSMPQWMPPGAAALIKGMLVVNPVQRMTIDEIRADPWFNTDLPAYLQPPVEEFFNTGVDPNKAIKKSDIAPNAPEKVQEKLHNEVTEKISKTMGYGKDDVEEALQSDEPSAIKDAYMIVRENKLMLANNPDAGLTGDEGSPMMSISSTRSAISPGGASPRPYVTKIGILPSSLPAYHKDYMEREKNGTGHDPVTPAITINDELPVTRTEVEKEEAARRLNPHSRSALRLDESSKRPQGMTPITAPVKKPKPVRWQFGIRSRNAPWEALLCIHKALNKLGASHLRDEGYDEAQRRGVEDATSRDSSFANGAPLERDPNGHDKDPTKRYKLPADPWHIQVRWPSTSMQAGADRRDELGSKAGSPDSFVYTRGDAASRKDFVALHMDIQIYEMEQGVYLVDFKCSGYETQDGRLLEEKEVTSPFPFLDRAAKLIMQLAEAD

SEQ ID NO: 8629 - protein, 486 aa, Streptococcus pyogenes SSI-1
MKFTIITNYDTLSRKSFTIEGDNMTIFRKKKKYSNKTEMQRHFKVIDLIFLGLGSMVGTGIFTVTGIGAAKYAGPALTISIIISAIAIGILALFYAEFASRMPSNGGAYSYVYATLGEFPAWLVGWYIIMEFLTAISSVAVGWGSYLKGLLANYNIVLPNALNGTFNLKNGTYIDILPVLVMFFVTGIVLMNSKLALRFNSFLVILKFSALALFIFVGIFFIDHNNWFHFAPYGVGQITGGKTGIFAGASVMFFAFLGFESISMAVDEVKEPQKTIPKGIILSLIIVTALYIVVTTILTGIVHYTKLNVPDAVAFALRNIRLYWAADYVSIVAILTLITVCISMTYALARTIYSISRDGLLPKSLYTLTKKNKVPQNATLVTGLLAMICAGIFPLSSLAEFVNICTLAYLIILSGAIIKLRRIEGEPKANEFKTPLVPFLPMLAIIICLSFMSQYKAFTWIAFAIATIIGTLIYLAYGYTHSIENK

SEQ ID NO: 8630 - protein, 266 aa, Gossypium mustelinum
LSVEEIEVAPPQKNEVRVKIHFTSLCHTDVYFWEAKGQNPLFPRILGHEAGGVVESVGEGVMDVQPGDHVLPIFTGECKERPHCLSEASNMCDLLRINTERGGMLHDGHTRFSKDGKPIYHFLGTSTFSEYTVVHVGQVAKINPEAPLDKVCVLSCEMSTGIGATVNVAKPKKGGSVAVFGLGAVGLAAAEGARVCEASRIIGIDLNPNRFEEAKKFGCTEFVNPKDHNKHVQEVIAEMTGGGVDCSIKCTGSTQAMVSAFECVHD

SEQ ID NO: 8631 - protein, 358 aa, Haemophilus somnus 2336
MKSYTIAVLSGDGIGPEIMAEAIKVLDAVQKKYNFKLNYRTFDVGGIAIDNHGTPLPASTLNGCEESDAILFGSVGGPKWEHLPPNQQPERGALLPLRKHFKLFCNLRPAILYQGLEKFCPLRADIAAKGFDMMTVRELTGGIYFGQPKGRDGEGMQTRAFDTEVYYKYEIERIAKVAFETAMKRRKHVTSVDKANVLISSVLWRETVNEVAKNYPDVTLDHIYIDNATMQLIKQPEFFDVLLCSNIFGDIISDEAAIITGSMGMLPSASLNEHGFGLYEPAGGSAPDIAGKGIANPIAQILSAAMMLRYSFNLNEEADSIENAVKQVLSQGYRTADLADEHPPISTAEMGNLIANAI

SEQ ID NO: 8632 - protein, 523 aa, Campanula medium
MSIDISTLFYELVAAISLYLATYSFIRFLFKPSHHHHLPPGPTGWPIIGALPLLGTMPHVSLADMAVKYGPIMYLKLGSKGTVVASNPKAARAFLKTHDANFSNRPIDGGPTYLAYNAQDMVFAEYGPKWKLLRKLCSLHMLGPKALEDWAHVKVSEVGHMLKEMYEQSSKSVPVPVVVPEMLTYAMANMIGRIILSRRPFVITSKLDSSASASASVSEFQYMVMELMRMAGLFNIGDFIPYIAWMDLQGIQRDMKVIQKKFDVLLNKMIKEHTESAHDRKDNPDFLDILMAATQENTEGIQLNLVNVKALLLDLFTAGTDTSSSVIEWALAEMLNHRQILNRAHEEMDQVIGRNRRLEQSDIPNLPYFQAICKETFRKHPSTPLNLPRISTEACEVDGFHIPKNTRLIVNIWAIGRDPKVWENPLDFTPERFLSEKHAKIDPRGNHFELIPFGAGRRICAGARMGAASVEYILGTLVHSFDWKLPDGVVEVNMEESFGIALQKKVPLSAIVTPRLPPSSYTV

SEQ ID NO: 8633 - protein, 288 aa, Glycine max
MSRASSAADSAASGEIILFGVRVVVDSMRKSVSMSNLSQYEHPQDGNNNKDALAAGYASADDAAPQNSGRLRERERKRGVPWTEEEHKLFLVGLQKVGKGDWRGISKNYVKTRTPTQVASHAQKYFLRRSNLNRRRRRSSLFDITTDTVSAIPMEGEQVQNQDTLSHSQQQSPVFPAETSKINGFPAMPVYQFGVGSSGVISVQGGTGNPMEELTLGQGNVEKHNVPNKVSTVSDIITPGSSSSAIDPPPTLSLGLSFSSDQRQTSSRHSALHAMQCFSNGESIISVA

SEQ ID NO: 8634 - protein, 445 aa, Agrobacterium tumefaciens str. C58 (U. Washington)
MSATTKEILDLNRFDASRTEGFPAELAERVAKRQATFGASSVLFYEQPIEMVSAQGAYLYDAGGRKYLDVYNNVPSVGHCHPRVVEAIARQVGELNIHTRYLNRVVEAYTENLLSKFPAGLSNVVLTCTGSESNDLALRIARIGTGAEGFIVTEAAYHGNTALVTEVSPSSLRKRKPAAFVAIIPAPAARDGMSVASNFAASVEQAINELNSRGIKFAALIVDTIFSSDGIYADPAGFLKEAVDVVHRAGGLLIADEVQPGFGRTGGSLWGFERHGVTPDIVTMGKPMGNGFPMGGVVTRPDLLQRFCEETGYFNTFGGNPVAAAAGHAVLRVIEEEGLIERSATVGGYFKQSLQALQSRHSEIGDVRGAGLFIGLDFVDPATGEPDSTRATHAINQLRHNSILIGAAGKYGATLKIRPPLCFSNEDVDLFTGTLDIILQARRAA

SEQ ID NO: 8635 - protein, 429 aa, Brassica juncea
MANLVLSECGIRPLPRIYTTPRSTFLSNTTFKLKPSPAFRLNGFSTKNWALNVTTPLTVDSSPPTSEEHETQRFDPGAPPPFNLADIRAAIPKHCWVKNPWKSMSYVVRDVAIVFALAAGAAYLNSWLVWPLYWLAQGTMFWALFVLGHDCGHGSFSNDPRLNSVVGHLLHSSILVPYHGWRISHRTHHQNHGHVENDESWHPMSEKIFKTLDRPTRFFRFTLPLVMLAYPFYLWARSPGKKGSHYNPDSDLFLPKERNDVLTSTACWTAMAALLVCLNFVMGPMQMLKLYGIPYWINVMWLDFVTYLHHHGHEDKLPWYRGKEWSYLRGGLTTLDRDYGVINNIHHDIGTHVIHHLFPQIPHYHLVEATEAAKPVLGKYYREPDKSGPLPLHLLGILAKSMKEDHYVSDEGDVVYYKADPNLYGEVKV

SEQ ID NO: 8636 - protein, 234 aa, Hordeum vulgare subsp. vulgare
MGRGRIEIKRIENTTNRQVTFCKRRNGLLKKAYELSVLCDAEVALVVFSSRGRLYEYSNNSVKATIERYKKANSDTSNSGTVAEVNAQYYQQESSKLRQQISSLQNSNSRSLVRDSVSTMTLRDLKQLEGRLEKGIAKIRARKNELMYAEVEYMQKREMELHNDNIYLRSKVSENERGQQPMNMMASGSTSSEYDHMVAPYDSRNFLQVNMQQQQHYSQQLQPTALQLGQQYFN

SEQ ID NO: 8637 - protein, 459 aa, Ferroplasma acidarmanus
MKSSLKKDSLSLSNVIFQGVAGSAPAGAAVATLTGSAAFALGSLPLSAVVAFIIVLINAVIINRISRHVAGAGGYYAYSREGIGNFAGIFTGWMYIMYQIMSLAFIGLSVAIFLPALLGTVFGIDIPFYSWVLLLILIMGFGYFVSFSGVRNSVRYAMVMATIEVVVVAAVSIIIITAKPSINTVSVFTPVYAVHGFTGVMLGVLFMYTAFSGFGTATPLGEEAKNANAVIGRGVLISAIVLGLFFTLVSYAFTVGWGPTRMLTYSTELVPGIILAKNYLGLAGAIVITVLFVNSLFTDSVVFTNSLSRVVFSMSRDNVLPGILSSVHSHRQTPHVAAGVMVIISFIIGVISVITLGGFNAFLFAGIAATLSALLVHMIANASLAGILHKMKLKMNIAMDVVLPAVSIVILAFVFYGSFISIDNVVIIASVSFIVWAIAGLIYSAISRKYLMHVQISQN

SEQ ID NO: 8638 - protein, 250 aa, Fragaria x ananassa
MGKCYPTVTEEYKKAIDKAKRKLRGLIAEKNCAPLMLRLAWHSAGTYDVKTKTGGPFGTMKQSAELAHGANNGLDIAVRLLEPIKEQFPILSYADFYQLAGVVAVEVTGGPDVPFHPGREDKPEPPPEGRLPDAGKGSDHLREVFGKTMGLSDQDIVALSGGHTLGRAHKERSGFEGPWTPNPLIFDNSYFTVLLSGEKEGLLQLPTDKALLSDPVFRPLVEKYAADEDAFFADYALAHQRLSELGFAEA

SEQ ID NO: 8639 - protein, 345 aa, Pseudomonas fluorescens PfO-1
MTYTAAENRYDSIPYRRVGRSGLVLPALSLGLWHNFGDSTPIDTQRSLLRTAFDLGINHFDLANNYGPPYGSAEINFGRLLREDFKQYRDELIISSKAGWDMWPGPYGQGGGSRKYVLASLDQSLQRLGLDYVDIFYSHRFDPDTPLEETASALATAVQQGKALYIGISSYSGVKTREIAALLKEWKVPLLIHQPAYNLLNRWVEKDLLDTTDELGTGVIAFTPLAQGLLTDKYLNGVPADARVNRPGGGSLQASHLSEANIAHVRALNEIAKRRGQSLAQLALAWTLRDPRVTSALIGASRPEQIVENVGALKNLSFSAEELAEIDRFAQEGGINLWEKPSTAE

SEQ ID NO: 8640 - protein, 319 aa, Zea mays
FHIDLICVFCRSTNLDSWTPDQLKMMAFGGNNRAHAFFKQHGWTDGGKVEAKYTSRAAELYRQMLNKEVAKSAITDNALPSSPVTASEASKPSDDFPEFKLSDAPAPPAENLNGKHEPKSPKAAPRSPKAATHPTFATSVKKPIGAKKVGGKTGGLGVRKLTTKPNESLYEQKPEEPKPAIPALTAPTAKGGPSLHSRFEYVDNEQSSVSRTGGSGSRVTGHVAPPKSSDFFQEYGMGNGFQKKSSNASKAQIEETDEARKKFSNAKAISSSQFFGTQNREEKEAQLSLQKFAGSSSISSSDLFGRTNVDDSNLDLSAA

SEQ ID NO: 8641 - protein, 276 aa, Chlamydomonas eugametos
MTSHAANPKEEQDQRLPFKSDISGPIAPSQAPAHTVQAHDSQPKPSDDSSDEHLSFYEAKARIVRAFAASRAPQPAAPAAKALEGDASVIVPGKLILSSCEVEESSELLTKLGVTHILQVGEELKPSHPGRFTYLSLPILDMEGQDIVALLPSCFQFLQQAQASGGVCLVHCLAGISRSASVVIAYLMWTQGMPYTEARAMVRRARSKVYPNTGFTLQLQELDRLRESGAIQWGDTPSLASSLEQHRQPWNLIRYLEVKEKQAQEEGWTWGRTLVI

SEQ ID NO: 8642 - protein, 116 aa, Pinus pinaster
TVFTVILYGSPLSVIRLVIHTKSVEFMPSFYFSLFAFLGSVLWMVYGALSGDILIMAPNFVGIPLGLSQMALYCIYWNNSPVRVEATKLEAGGELKSIEQNIKEDIELYTEDIEKA

SEQ ID NO: 8643 - protein, 335 aa, Glycine max
YQRSLLQSWSVKAIVSWILFECLGNENVSIVTEKEVRTLSSTDASELLEAVVKTVNECLAEAPRFGVEEPKSTLGTSEVLEIISRCNSVGDPSGRFWALSPLDGGSSCGDQHVVALSLIEEGEVVLGVLGCPNYPMRKDWFSYHHSYLRMISKLAPPTSQTWNKGCVIYAKRGSGKAWIQPLLHVNDKFVWPNHAKQVSVSSIDNLEMATFCQPVEKANLSHSFAEGLAHSVGFSNQPLRVYNTMKYTAIACGDAEVFIKFARAGYKEKIWDHAAGAIIIQETGGMVTDAKGHPLDFSKGLYFERLDRGIVACAGATLHEKIIDAVDASWASSCL

SEQ ID NO: 8644 - protein, 283 aa, Rhodospirillum rubrum
MIDGPAHGGGTLVGDGSNRKGRAMGVQGLLRDKVALVTGGANGIGRAAARALYGAGARVVIADLDQMAAERAAEAMGGDVLGLPVDVRDRTSMQTCVDRAIASCGGIDILVANAGVSSMRKAVELTDEDWAFNFDVNAKGVFLANQLVVRHFLATGRKGVIVNTASLAAKVGAPLLAHYAASKFAVLGWTQSLARELAPEGIRVNAVCPGFVRTPMQDREIIWEGELRGMTPEDVRKEYVALTPLGRIEEPEDVADVILFLASDLSRFMTGQGINVTGGIKMD

SEQ ID NO: 8645 - protein, 365 aa, Bacillus halodurans
MDVLANHRDKFRLVAMSVGKNLTLAEEQIHQFKPPLVSVMTDEDRKTLASKVPEGTRVVCGEEGLIEVATAEKAEILVNAVIGSVGLAPTLAAIEAKKTIALANKETLVTAGHLVTEKAREHGVKLLPVDSEHSAIFQALQGERMDRLHRIIITASGGSFRDKSRDELNGVTVEDALKHPNWSMGAKITIDSATMMNKGLEVIEAHWLFNLPYEKIDVLLHKESIIHSMVEFVDRSVIAQLGTPDMRVPIQYALSYPDRLEFHEGQQLNLWEVGKLHFAPLDMERFRCMAFAYESGKQGGTMPTVLNAANEEAVELFLNNQLSFLGIEDVIEKALERHERIDSPSLADILHVDQETRAFVHSLIK

SEQ ID NO: 8646 - protein, 343 aa, Zea mays
MAVASTSPLSAKPATAPSPPAPGSGLLALGVRRAPATAAWRRLRVEAIRTQREKQRAEVPVEESAPARDAAAPLAGNGAGAGADGSVVPSSDDSWVVKLEQSFNIFATDSVIMVLKGVYGDRYYARFFALETIARVPYFAFISVLHLYATFGWWRRADYIKVHFAQSWNEFHHLLIMEELGGDSLWFDCFLARFMAFFYYFMTVAMYMLSPRMAYHFSECVERHAYSTYDEFLKLHEEELKRLPAPEAALNYYMNEDLYLFDEFQASRTPGSRRPKIDNLYDVFVNIREDEAEHCKTMKTCQTHGNLRSPHSTPNCLEDDTECVIPENDCEGIVDCVKKSLTK

SEQ ID NO: 8647 - protein, 309 aa, Listeria innocua
MSITNLLNIKYPIIQGAMAQIAKAPLVAAVSNAGGLGIIASGGMTAEMLREEIQKTKALTDKPFGVNLMLMMTNIAELTEVIIEEKVGIVTTGAGTPKTFMPIWKEAGIIVIPVVPSVMIAKRMEKMGADAVIAEGTEAGGHVGETTTMALLPQIVDAVTIPVIGAGGIADGRGIAAALALGAKGVQIGTRFLATDECPVHPDFKAAVIKASDRDTMVTGRKAGAPVRSIKNKMIKEYIRLEEENADRDTLEELTLGSLRKAVQEGDTDNGSVMAGQIAGLITEIKPCKDVIEEMMTDAKNVIAGLELN

SEQ ID NO: 8648 - protein, 248 aa, Aquifex aeolicus VF5
MEIKLQGKVSLVTGSTRGIGRAIAEKLASAGSTVIITGTSGERAKAVAEEIANKYGVKAHGVEMNLLSEESINKAFEEIYNLVDGIDILVNNAGITRDKLFLRMSLLDWEEVLKVNLTGTFLVTQNSLRKMIKQRWGRIVNISSVVGFTGNVGQVNYSTTKAGLIGFTKSLAKELAPRNVLVNAVAPGFIETDMTAVLSEEIKQKYKEQIPLGRFGSPEEVANVVLFLCSELASYITGEVIHVNGGMF

SEQ ID NO: 8649 - protein, 394 aa, Amborella trichopoda
DLEPVNPADVPVTAAGALKSYKLAAKAISKLQSLPSGNIELLCDVLVREVRELTGYDRVMAYKFHEDEHGEVVAEYRRADLDPYLGLHYPATDIPQASRFLFLKNKVRMICDCTASPVKVIQDKKLDKPLSLCGSTLRAPHGCHAQYMANMGSIASLVMSVTINENDEDSSPNEPSFHKGRKLWGLVVCHHTTPRFVPFPLRYACEFLLQVFGIQLNKEVELAAQLREKHILRTQTVLCDMLLRDAPVGIVTQSPNIMDLVKCDGAALYYQKQVWLLGTTPLEAQIRDISGWLLEYHCGSTGLSTDSLMEAGYPGALALGDAVCGMAAVKITSKDFLFWFRSHTAKVIKWGGAKHDPVDRDDGRKMHPRSSFKAFLEVVKQRSLPWEDVEMDAI

SEQ ID NO: 8650 - protein, 362 aa, Dicarpellum baillonianum
QSQKLAVRAISQLQSLPGGDIKLLCDTVVECVGDLTGYDRVMVYRFHEDEHGEVVAESKRPDLEPYLGLHYPATDIPQASRSLFKQNRVRMIVDCHASPVRVIQDDGLMQALCLVGSTLRAPHGCHAQYMENMGSIASLAMAVIINVNDEEATAGRNPTRLWGLVVCHHTSARCIPFPLRYACEFIMQAFGLQLNMELQLAAQLLEKHVLKTQTLLCDMLLRDSPTGIVTQSPSIMNLVKCDGAALYYQGNYYPLGVTPAEAQIKDIVEWLLAFHGDSTGLSTDSLADAGYPGAALLGDAVCGMAVAYITNRDFLFWFRSHTAKETKWGGAKHHPEDKDDGQRMHPRSSFKAFLEVVKSRSL

SEQ ID NO: 8651 - protein, 380 aa, Triticum aestivum
RQDDGSGSSSRAQGGDEGPSADGFDPGAPPPFGLADIRAAIPKHCWVKDHWSSMGYVVRDVVVVLALAATAARLDSWLAWPVYWAAQGTMFWALFVLGHDCGHGSFSNNAKLNSVVGHILHSSILVPYNGWRISHRTHHQNHGHVENDESWHPLPEKLYRSLDSSTRKLRFALPFPMLAYPFYLWSRSPGKSGSHFHPSSDLFQPNEKKDILTSTTCWLAMAGLLAGLTVVMGPLQILKLYAVPYWIFVMWLDFVTYLHHHGHNDKLPWYRGKAWSIYTGGLTTLDRDYGWLNNIHHDIGTHVIHHLLPQIPHYHLVEATEAATVLGKYYREPDKSGPFPFHLFGALARSMKSDHYVSDTGDIIYYQTDPKLAAGAHTSD

SEQ ID NO: 8652 - protein, 402 aa, Corynebacterium efficiens YS-314
MKNLATVEDTLTSWPQVLLNTYGTPPVELVTGKGSTVTDADGNVYIDLLAGIAVNALGHAHPAIIEAVTTQLSQLGHVSNLFATRPVVEVAAELVQRFALDDATIASQTQVFFCNSGAEANEAAFKLARLTGRHRILAATNGFHGRTMGSLALTGQPDKRIPFAPLPSGVEFYPYGDLDYLTTLVESDPTDTAAIILEPIQGETGVIPAPEGFLTGVRELCDKHGLLFIVDEVQTGIGRTGDFFAHQHEGVTPDVVTMAKGLGGGLPIGACLATGEAAKLFGPGKHGTTFGGNPVSAAAARAVLSVIDEEFCADVARKGELFAEQLRGVAGVADVRGRGLMLGVVLDQPVAKQAVTAGFKHGLILNAPADNIIRLTPPLVITDDEIRDAVRALAAVLAELNA

SEQ ID NO: 8653 - protein, 751 aa, Geobacillus stearothermophilus
MENQNRQNAAQCPFHGSVTNQSSNRTTNKDWWPNQLNLSILHQHDRKTNPHDEEFNYAEEFQKLDYWALKEDLRKLMTESQDWWPADYGHYGPLFIRMAWHSAGTYRIGDGRGGASTGTQRFAPLNSWPDNANLDKARRLLWPIKKKYGNKISWADLFILAGNVAIESMGGKTIGFGGGRVDVWHPEEDVYWGSEKEWLASERYSGDRELENPLAAVQMGLIYVNPEGPDGKPDPKAAARDIRETFRRMGMNDEETVALIAGGHTFGKAHGAGPATHVGPEPEAAPIEAQGLGWISSYGKGKGSDTITSGIEGAWTPTPTQWDTSYFDMLFGYDWWLTKSPAGAWQWMAVDPDEKDLAPDAEDPSKKVPTMMMTTDLALRFDPEYEKIARRFHQNPEEFAEAFARAWFKLTHRDMGPKTRYLGPEVPKEDFIWQDPIPEVDYELTEAEIEEIKAKILNSGLTVSELVKTAWASASTFRNSDKRGGANGARIRLAPQKDWEVNEPERLAKVLSVYEDIQRELPKKVSIADLIVLGGSAAVEKAARDAGFDVKVPFFPGRGDATQEQTDVESFAVLEPFADGFRNYQKQEYSVPPEELLVDKAQLLGLTAPEMTVLVGGLRVLGANYRDLPHGVFTDRIGVLTNDFFVNLLDMNYEWVPTDSGIYEIRDRKTGEVRWTATRVDLIFGSNSILRSYAEFYAQDDNQEKFVRDFINAWVKVMNADRFDLVKKARESVTALQFSTPPRSIVNNGLQ

SEQ ID NO: 8654 - protein, 368 aa, Oryza sativa
  unsure (1)..(368): unsure at all Xaa locations
MASDHVSTMDCGHCFCNDCWTEHFFASINTGNKQIRCMEVKCKAICDEDIVRRLLSLKYPAASKRFDLLLLESYLEDNDSVKWCPSAPHCGRAIQVGSERYCEVACPCGVSFCFNCAGQVHSPCPCAIWEKWKAKGHGDSDSVKWILANTKSCPKCSKPIEKNGGCNLVHCKCGQCLCWLCGGPTGREHTWDSISGHSCNRYKEENGDKVDTSRQQMQRYTHYWDRYNIHAGSYKVEQKDLGPAVEEQVKKLESNLTGPKMNWDGSWLAMAYQSLLASRQVLSRSYAFAYYMFGGGEVKTHPSERASLAVAQNLFEDRQEQLERHVEHLSKELATDLLGLPEEEIVLKKVEIANLAKIVQAICGQLYX

SEQ ID NO: 8655 - protein, 370 aa, Desulfovibrio desulfuricans G20
MHSGRLSYSTVPPQEARGHAAGAPVLYWMHREMRARDNWALLHAQQCAAAGGAPLAVVFCLVPQFIDAGLRHFHFMLQGLEETARILEELGIPLFLLRGTPPEEVVRFAQAHGASRVVTDFDTLRIKRQWIRSAVEAARQLDIAVDVVDSRNVVPCLRASDKREYAARTIRPKIHRLLDEYLDPLPALQPAAVPWKGAYQRPDWQAALDSLQADASVQPAGWLPPGENAALAELTAFIRVRMHRYAAERNNPLMPVLSHLSPYLHFGMLSAQRAVLEVMQAQGTAAGGTYGEGAAAFVEELVVRRELADNFCWYEPSYDSVEAFPDWALKTLDRHRADRRPYLYDEQQLEKARTHDPLWNAAQQEMVLTG

SEQ ID NO: 8656 - protein, 380 aa, Solanum tuberosum
MSTTVGQVIRCKAAVAWEAGKPLVMEEVDVAPPQKMEVRLKILYTSLCHTDVYFWEAKGQNPVFPRILGHEAAGIVESVGEGVTELAPGDHVLPVFTGECKDCAHCKSEESNMCSLLRINTDRGVMINDGQSRFSINGKPIYHFVGTSTFSEYTVVHVGCVAKINPLAPLDKVCVLSCGISTGLGATLNVAKPTKGSSVAIFGLGAVGLAAAEGARIAGASRIIGVDLNASRFEQAKKFGVTEFVNPKDYSKPVQEVIAEMTDGGVDRSVECTGHIDAMISAFECVHDGWGVAVLVGVPHKEAVFKTHPMNLLNERTLKGTFFGNYKPRSDIPSVVEKYMNKELELEKFITHTLPFAEINKAFDLMLKGEGLRCIITMED

SEQ ID NO: 8657 - protein, 398 aa, Yersinia pestis CO92
MKQLTILGSTGSIGNSTLSVVRANPELFKVTALVAGRNVREMAQQCLEFSPRYAAMSDEHSAKSLRLLLAEQGSDTEVYSGETAACELAALDDVDQVMAAIVGIAGLPSTLAAIRAGKQVLLANKESLITCGKLFMDEVKRSRAQLLPIDSEHNAIFQSLPERIQRQLGYSSLNENGVSRIILTGSGGPFRETPLSQFSDVTPDQACAHPNWSMGRKISVDSATMMNKGLEYIEARWLFNASAEQIEVVLHPQSVIHSMVRYHDGSILAQMGTPDMRTPIAHAMAYPMRVSSGVAPLDFCKVGALTFTTPDYQRYPCLKLAIDACNAGQAATTALNAANEISVMAFLDSKIRFTDIEVINRTVVEGLLLSEPTSVEEVLVIDRKARDVAAQVIAKLNN

SEQ ID NO: 8658 - protein, 197 aa, Oryza rufipogon
GQTPVFPRILGHEAGGIVESVGEDVTELAPGDHVLPVFTGECKECDHCKSEESNMCDLLRINVDRGVMIGDGKSRFTIKGKPIFHFVGTSTFSEYTVIHVGCLAKINPEAPLDKVCILSCGFSTGFGATVNVAKPKKGQTVAIFGLGAVGLAAMEGARLSGASRIIGVDLNPAKFEQAKKFGCTDFVNPKDHSKPVH

SEQ ID NO: 8659 - protein, 419 aa, Raphanus sativus
FYHSCTIFFFVSLQFHHVFSTNTLSSNETLTISSNRTLVSPGDVFELGFFKTTTRNSQDGADRWYLGIWYKTTSDQRTYVWVANRDNPLHNSTGTLKISHSSNLVLLDQSDTPVWSTNFTGVAHLPVTAELLANGNFVLRDSKTKDLNRFVWQSFDFPVDTLLPEMKLGRNLIGPEKEKILTSWKSPTDPSSGDYSFILETEGFLHEFYLLNNEFKVYRTGPWNGARFNGIPKMQNWGYIVNNFIDEEEEVGYSFQVNNNHNIHSRFRMSYTGYLQVITWTNTVPQRNMFWSFPEDTCDLYIVCGPYAYCDMHTTPTCNCIKGFVPKNARAWELRDASSGCVRSKRLSCGEGDGFLRMSQMKLPETSEAVVDEVIELKECREKCVRDCNCTGYANMDNMNGSGCVMWTGELLDMRKYDA

SEQ ID NO: 8660 - protein, 157 aa, Griffithsia japonica
MSATKLSDLQGLKDIEGGAIDPSRFAGKVVFAMNVASACGYTKPGYELLKRLTDKFAPADFVAVAIPCNSFLWQESGSAEDVKTFALARADKLLVTEKAAVNGNHPHPIVALAKQAFPGRVMWNFDGRFVFDRNGVPVARFGNSAKPEEIEAAIANA

SEQ ID NO: 8661 - protein, 319 aa, Streptococcus agalactiae 2603V/R
MKTRITELLNIKYPIFQGGMAWVADGDLAGAVSKAGGLGIIGGGNAPKEVVKANIDKIKSMTDKPFGVNIMLLSPFVDDIVDLVIEEGVKVVTTGAGNPGKYMERFHEAGITVIPVVPSVALAKRMEKLGADAIITEGMEAGGHIGKLTTMTLVRQVVDAVTIPVIAAGGIADGRGAAAGFMLGADAVQVGTRFVVAKESNAHPNYKAKILKAKDIDTAVSAQVVGHPVRALKNKLVTTYSQAEKDYLAGRISINEIEELGAGALRNAVVDGDVINGSVMAGQIAGLIKSEETCQEILEDIYSGARQVILSEASRWSDL

SEQ ID NO: 8662 - protein, 523 aa, Candida maltosa
MAIEQIIEEVLPYLTKWYTIIFGAAVTYFLSIALRNKFYEYKLKCENPVYFQDAGLFGIPALIDIIKVRKAGQLADYTDTTFDKYPNLSSYMTVAGVLKIVFTVDPENIKAVLATQFNDFALGARHAHFDPLLGDGIFTLDGEGWKHSRAMLRPQFAREQIAHVKALEPHVQILAKQIKLNKGKTFDLQELFFRFTVDTATEFLFGESVHSLYDEKLGIPAPNDIPGRENFAEAFNTSQHYLATRTYSQIFYWLTNPKEFRDCNAKVHKLAQYFVNTALNATEKEVEEKSKGGYVFLYELVKQTRDPKVLQDQLLNIMVAGRDTTAGLLSFAMFELARNPKIWNKLREEVEVNFGLGDEARVDEISFETLKKCEYLKAVLNETLRMYPSVPINFRTATRDTTLPRGGGKDGNSPIFVPKGSSVVYSVYKTHRLKQFYGEDAYEFRPERWFEPSTRKLGWAYLPFNGGPRICLGQQFALTEASYVIARLAQMFEHLESKDETYPPNKCIHLTMNHNEGVFISAK

SEQ ID NO: 8663 - protein, 130 aa, Solanum demissum
MEKMAVAGLVLVPALSPCATTLPVFLAVGNSSSMMVLAIIVLLFSTITVMTSLVALSFYGASQLKFHWVECYDKLLVGSVLSLVGILTLIFHDHDHEGGSAGVHIYLKGKKGEPWSNGKFVIGHGYELWN

SEQ ID NO: 8664 - protein, 224 aa, Helianthus annuus
NDFFDYVLEELKQNDTMLTEATALDLMFALLFANFETTSQAITVAIKFLTHNPRALKELTEEHQKILRKRENPKLDLHGKNIVDEIYLQVINETLRLASIVPVLFRKAKKDIKFKGYTIPSGWAVMVCPPAVHLDPVNYKDPLDFNPWRWEDMDLKSASKTFMAFGGGQRFCVGADFAKLQIAIFLHCLVTKYQWQPIKGGDIVRTPGLQFPNGFHVRIFEKET

SEQ ID NO: 8665 - protein, 465 aa, Xanthomonas axonopodis pv. citri str. 306
MPEPSSATAPQFQRSMQVRHLVMLSLGGVIGTGLFFNTGYIIASTGALGTVLAYLIGALVVYLVMQCLGELAVAMPQTGAFHVYAARYLGPATGYVVAWLYWLTWTVALGSSLTAAAFCMQYWFPHSLAWPWCLLFCALIFGLNTVSARWFAEGEFWFSLIKVITILVFIVLGGAAVIGLLPLADGSPAPGLRHLRANGWFAHGTLPILMTMVAVNFAFSGTELIGVAAGETAQPARAIPLAIRTTLVRLVVLFVGTVLVLAALLPARRAAVETSPFVRAFELLGIPYAADILNAVILTAILSAANSGLYAAARMLWSLANEGTLPSGLARLTGRGIPLRAVSLSMLGGLLALLTGVYAPETVFVAISAVSGFAVVVVWLSICAAHYRFRRQWLRDGAALETLAYRAPWYPWTPILGFSLCLLACIGLAFDPQQRIALWCGIPFVALCYGAYALTQWLAARRLYA

SEQ ID NO: 8666 - protein, 348 aa, Mesorhizobium loti
MRYKLFGEHTGLRVSELVLGTGNFGTGWGYGAERDESLGIFDAYAEAGGNFIDTAGVYQGGQAEEFLGEALAGRREDFVVATKYSMPAGSRGGILATGNSRKAMVISVEDSLKRLKTDYIDLLWIHMSDGVTPAEEIVRGFDDLVRSGKILYAGLSDFPAWRVARAATIAELRGVAPIAGLQYEHSLVERTTEQELLPAGKALGLGLVAWSPLGGGMLTGKYRRGEKGRREGFGGNVFQPENSLQRTEILDTLIAVAQEVGVTSGEVAIAWVAAKGSLPIIGPRTVAQLENNLAAANVRLSVEQIARLDDASAIPTVFPYTVLNGPGTRQGYTGGKSDHFDAPALSVA

SEQ ID NO: 8667 - protein, 397 aa, Thermococcus zilligii
MEVGVVGKPNVGKSTFFSAATLVDVDIANYPFTTIEANVGVTYAIADHPCKELGCRPNPQNYEYKDGTALIPVKMIDVAGLVPGAHEGRGLGNKFLDDLRMASALIHVIDATGKTDAEGQPTDHHDPVEDIEFLEREIDYWMLGILKKGWEKFAKRIKLQHMKLEQAIADHLSGIGVKEEDVWEAIHRLGLGDDPTKWTDDELFALVRELRKINKPMIIAANKADAASDEQIERLKKEGEKRGYLVIPTSAAAELTLRKAARAGFIDYIPGSSDFRILKEMNPQQEKALQLIKERVLERFGSTGVQEVINRAVFELLKLIPVYPVQDENKLTDQFGNVLPHVYLLPKGSTPRDLAYKVHTDLGRTFLYAVNARTHRRVGDDYKLEFNDIIKIVATAK

SEQ ID NO: 8668 - protein, 181 aa, Hordeum vulgare
MAGVGRNMVAPLLVLNLIMYIIVIGFASWNLNHFINGITNRPGVGGNGATFYFLVFAILAGVVGAASKLAGVHHVRTWRGDSLATSASSSLVAWAITALAFGLACKEIHVGGYRGWRLRVLEAFVIILAFTQLLYVLALHSGLFGNQFGNNNGGYPAEHAYGAGVGDHHNKGMGTGGVARV

SEQ ID NO: 8669 - protein, 209 aa, Glycine max
MASVVASLPPPLLLPARKSHMGNFPSSPVSLLSGRWNRVSFFFIFIIIIIESSFLPTTFRGALQMASIVASLPPPLLLPARKYHPGNFPSSPFSLLSGRRNHVSFVVKASGESSESSTTLTVFKSVQNVWDQPEDRLGLIGLGFAAIAAFWASTNLIAAIDKLPVFPTVLELIGIFYSVWFTYRYLIFKPDREELFQILNKSASDILGQ

SEQ ID NO: 8670 - protein, 366 aa, Lycopersicon esculentum
MAISISAMSFGTSVSSYSCFRARSFEKSSVLCNSQNPCRFNSVFPIRKSDGASRCSVSRKSCRVRATLLQENEEEVVVEKSFAPKSFPDNVGGGSNGKPPDDSSSNGLEKWVIKLEQSVNILLTDSVIKILDTLYHNRNYARFFVLETIARVPYFAFISVLHMYESFGWWRRADYMKVHFAESWNEMHHLLIMEELGGNAWWFDRFLAQHIAIFYYFMTVLMYALSPRMAYHFSECVESHAYETYDKFIKDQGEELKNLPAPKIAVDYYTGGDLYLFDEFQTSREPNTRRPKIDNLYDVFMNIRDDEAEHCKTMKACQTHGSLRSPHTDPCDDSEDDTGCSVPQADCIGIVDCIKKSVTDTQVTKR

SEQ ID NO: 8671 - protein, 311 aa, Glycine max
MIRLNVYCSLIPSARQARPGSSYGSLIIHNHKASKFSHRISIKAKAIKDEMDGETSGSSGRSWDPGLEIEVPFEQRPVNEYSSLKDGILYSWGELGPGSFFLRLGGLWLAVFTVLGGPIAAASFNPSKEPLRFILAGGTAARSRAESARVRIYLGWSYVGDRLLSAVIPYEESGWYDGQMWVKPPEILARDRLLGSYKVKPVVKLLKQTLVGTGALLVTGVMLFIFATPLENFFRTTFTKEEIKSTVQAPKVNTKLLRKEELLKLPVEVITDDDLAAAAAEAADGRPVYCRDRYYRALAGGQYCKWEDLLK

SEQ ID NO: 8672 - protein, 568 aa, Zea mays
MEEARDHRLSSTAGRPFLSGFCAAALRRKPLGARASAAAAATGEGLVRQLGVLDLVLLGIGASIGAGIFVVTGTVARDAGPGVTISFVLAGAACVLNALCYAELASRFPAVVGGAYLYTYAAFNEITAFLVFTQLMVDYHIGAASIARSLASYFIEFLELIPLLKGQIPSWVGHGEEFFGGVVSINILAPVLLIILTAILCYGVKESSAVNTFMTTLKIIIVIVIVFAGVFEVDVSNWSPFMPNGFKSVVTGATVVFFAYVGFDAVANSAEEAKRPQRDLPIGILGSLIACVLLYVAVCLVITGMVPYTLLGEDAPLAEAFAAKGLKFITVLISIGAVAGLTTTLLVGLYVQSRLYFGLGRDGLLPSVFAEVHPTRHTPVQSQIWVGCVAAVMAGLFNVRMLSHILSVGTLTGYSVVSACVITLRWNDKGTSRRSLGSMSIWQEGVLSLVIVALCGFIVGLCYRFNYAIAFMVVAFLIAVAASFALQFRQVYVDPPGFSCPGVPLVPIISVFFNMVLFAQLHEEAWYRFVILSLIAVGVYAGYGQYNAVPSSSEHSTIGYHGIPSEAA

SEQ ID NO: 8673 - protein, 113 aa, Oryza sativa
  unsure (1)..(113): unsure at all Xaa locations
XERTSLEFGFAADQRADVRLYXGAGNLQTMAYQDRFTNWESTGLKIIPVLSRADDSWKGKWRYVXRIFFLKAXNIANHFSTGAVLCGQKQMSEEITSALVADGVSPDKILTNY

SEQ ID NO: 8674 - protein, 78 aa, Zea mays
  unsure (1)..(78): unsure at all Xaa locations
RTRGVNLSTSACVFMTAIGLDYITXQENYLYTSFSGFYGGLSRLVVGIKQLLPDQEAXLFVLKIKAKGIPSLVAWISI

SEQ ID NO: 8675 - protein, 291 aa, Pyrococcus furiosus
MLPKEIMMPNDNPYALHRVKVLKVYSLTETEKLFLFRFEDPELAEKWTFKPGQFVQLTIPGVGEVPISICSSPMRKGFFELCIRKAGRVTTVVHRLKPGDTVLVRGPYGNGFPVDEWEGMDLLLIAAGLGTAPLRSVFLYAMDNRWKYGNITFINTARYGKDLLFYKELEAMKDLAEAENVKIIQSVTRDPNWPGLKGRPQQFIVEANTNPKNTAVAICGPPRMYKSVFEALINYGYRPENIFVTLERRMKCGIGKCGHCNVGTSTSWKYICKDGPVFTYFDIVSTPGLLD

SEQ ID NO: 8676 - protein, 960 aa, Oryza sativa (japonica cultivar-group)
MGPGASPAQFPVPRALMWAPSFKLPTATSPARRRRRRRGGGGGAAISPSTVCHITGGSYVYDSKGNKYLDTLAGLWCTALGGSEPRLVKAATDQLNKLPFYHSFWNSTAKPPLDLAEELISMFTAKEMGKVFFTNSGSEANDSQVKLVWYYNNALGRPNKKKIIAQSQALPAMHLKFDLPAPFVLHTDCPHYWRFGLPGEAEEEFATRLADNLENLILKEGPETVAAFIAEPVIGAGGVIPPPKTYFEKIQAVLQKYDVLFIADEVITGFGRLGTMFGSDLYNIKPDLVSLAKALSSAYVPIGATLVSPEISDVVHSQSNKIGFFAHGFTYSGHPVSCAVALEALKIYRERNIPAHVKQISPRFQEGIKAFAGSSIIGETRGVGLLLATEFANNKSPNDPFPVEWGVAQIFGAECKKRGMLVKVVGDEIAMSPPLIMSQREVDGLVSIYGEALKATEERVAELRRLNVDIEATTSLELEWRLQTSPQLLRFKGHGMLAPFTAGWQSTDVHPLVIERSEGSYVYDIDGKKYLDSLAGLWCTALGGSEPRLVKAATEQLHKLPFYHSFWNRTTKPSLDLAKELLSMFTAREMGKVFFTNSGSEANDSQVKLVWYYNNALGRPDKKKFIARSKSYHGSTLISASLSGLPALHQKFDLPAPFVLHTDCPHYWRFHLPGETEEEFATRLANNLEELILKEGPETVQSSFHRNLYCAKRSKIAAFIAEPVMGAGGVIPPPKTYFEKVQAIVKKYDILFIADEVITAFGRLGTMFGSDMYNIKPDLVSMAKALSSAYVPIGAIMVSPEISDVIHSQSNKLGSFAHGFTYSGHPVACAVAIEALKIYQERNIPDHVKQISPRFQEGVKAFAGSPIVGEIRGVGLILGTEFADNKSPNDPFPAEWGVGAIFGAECQKRGMLVRVAGDNIMMSPPLIMTPDEVEELVSIYGDALKATEERVAELKSKKNN

SEQ ID NO: 8677 - protein, 466 aa, Lilium superbum
SGKPFYAIVHRVTNCLIIDFEPVNHTESPTTAAGALQSYKLAAKAIAKLQSLPGGSVRRLCETVVQEVFELTGYDRVMAYRFHEDDHGEVFTEVTKPGLEPYVGLHYPATDIPQAARFLFMKNKVRMICDCRARPVKIHQDDKLPAEITFCGSTLRAPHSCHLQYMENMNSIASLVMAVVVNDDDEVLDEQGAPSRQQSGRKKLWGLVVCHHLSPRFVPFPLRYACEFLMQVFAIHVNKEFELENQIREKNILKTQTLLCDMLLRDGDPIGIVSQSPNIMDLVKCDGAALLYNNRIWQLGMAPTGSQIHDIAFWLAESHMDSTGLSTDSLLDAGYPGALALGDTVCGMAAARITTKDIVFWFRSHTASEIKWGGEKHDPEEEDDGRRMHPRSSFNAFLQVVKNRSLPWNDYEMDAIHSSQLILRGTLDDNGKSKKGSLDSGMGDMRLDGMVELQAVTNEMVRLIIT

SEQ ID NO: 8678 - protein, 127 aa, Narcissus pseudonarcissus
  unsure (1)..(127): unsure at all Xaa locations
LPENGYGSNVTAWPARLHKPPRRLQGVEMDSYIAKNELFIAESKFWSDTVDGYIRVFRWKEMNLRNVMDMRAGYGGFAXALIDQRMNCWVMNVVPISGPNTLPVIYDRGLIGVAHDWCEPFDTYPRT

SEQ ID NO: 8679 - protein, 385 aa, Solanum tuberosum
HIITAVIGSGVLSLAWAIAQLGWVAGPAVLFAFSFITYFTSTLLADCYRSPGPISGKRNYTYMDVVRSHLGGVKVTLCGIAQYANLVGVTIGYTITASISMVAVKRSNCFHKNGHEASCSIESYPYMIIFAVIQIVLSQIPNFHKLSWLSILAAVMSFTYASIGLGLSIAKASGVGHHVKTALTGVVVGVDVSGTEKVWRSFQAIGDIAFAYAYSTVLIEIQDTLKSSPSESKVMKRASLAGVSTTTLFYVLCGTIGYAAFGNNAPGNFLTGFGFYEPFWLIDFANVCIAVHLVGAYQVFCQPLYGFVEGRCSERWPDSKFITSEYAMQVPWCGTYNLNLFRLVWRTTYVIVTAVIAMIFPFFNDFLGLIGAASFYPLTVYFPVE

SEQ ID NO: 8680 - protein, 1115 aa, Ipomoea nil
MENYGKAVTFSSSATSNLNTGKAIAQYNADAKLMAEFEQSRESGKSFDYSRSVIHAPQNVTEEEMTAYLSRIQRGGLIQPFGCMLAIEEPSFKIVGFSENCFDLLGLKSGVEPPERMSLIGIDARTLFTLSSRASLAKAVASREISLLNPIWVHSKINQKPFYAVLHRIDVGIVIDLEPANSADPALLLAGAVQSQKLAVRAISRLQSLPGGDIGTLCDTVVEDVQKLTGYDRVMVYKFHDDSHGEVVSEIRRSDLEPYLGLHYPATDIPQAARFLFKQNRVRMICDCNAQPVKVLQCEELKQPLCLVNSTLRSPHGCHTKYMANMGSIASLVMAVVINSSESMKLWGLVVCHHTSPRYVPFPLRYACEFLMQAFSLQLYMELQLASQLAEKKILQTQTLLCDMLLRDAPFGIVTQTPSIMDLVRCDGAALYYNGKCWLLGVTPTETQVKDIAEWLLHNHGDSTGLSTDCLSDAGYPGAPLLGDAVSGMATARITSKDFLFWFRSHTAKEVKWGGAKHHPEDKDDGGRMHPRSSFIAFLEVVKSRSLPWEDSEINAIHSLQLIMRDSLQGIGENYMKSVSSPQQNDSDGVRFYELSSMALELVRLVETATVPIFGVDSSGLINGWNAKIAELTGLQANVAIGKYLIDDVTHEDSHETFKALMCRALQGEEDRNVEVKLLKFGNHPTKEVVYLVVNACTSRDYKNDIIGVCFVGQDITPEKAVMDKFVRLQGDYEAIIQSLNPLIPPIFASDENACCSEWNAAMERLTGLVKCEVIGKRLPGEIFGGLCRLKGQDALTKFMILLYQGISGHDTEKLSFGFFDRKGNFIDVFITANKRTDERGNIIGCFCFLQTMAVDHPQISARDIEDDRECLSTLKEFAYIQQQMKNPLNGIRFTHKLLEGTVTSDHQKQFLETSEACEKQILSIIENMDSGGIVDGNRVELKTEEFVIGNVIDAVVSQVMIPLKEKNLQLLHDIPDQIKSLPIYGDQIKLQLVLSDFLLSIVRHAPSPDGWVEIRVSPGLKLIQDGNVFIHIQFRMTHPGQGLPSALIEDMVRGGTRWTTQEGVVLHLSQKLVRMMNGHVHYVREQQKCYFLIDLDFKTQKPRSRESSMDTKAD

SEQ ID NO: 8681 - protein, 473 aa, Aeropyrum pernix
MLIAFRINDIPKGPKAALEAGVVGVSGEIRAEVVRGFGASRHSHITGLGLDADGRARKIGGGLVGQEEAREAAGVIVEMVREGRLGGRGILIVGPPGTGKTALAIAIARELGEDTPFVALNAGELFRGDSGKLEMLLQAFRKAIGVRVRERREVVEGVVTSISVSKRRTPFSPYPVIAGARITLETKDESRTFTVGPEVAEQLVALGVRRGDVIVIDLETGVVRVVGRGKGRGQSFDIDVVREVELPEGPVRKVKEFVRTLTLHDIDASIAAQRVAFTGLLSMFEAERGVTSEDRKKTDELVKKWVGEGKAEIVAGVIFIDDAHLLDMESFSFLSKAMESDLAPIIVLATNRGVAKIRGTDIESPHGIPRDLLDRLLIITTRPYTRDEIKEIIRIRADEEEVLLSENALERLADIGSEKSLRYAIQLLEPAMIVAKRRGSRRVEAEHVEEAERLFADIKRSIQLVEKYRDLMM

SEQ ID NO: 8682 - protein, 460 aa, Rhodobacter sphaeroides
MMEGLAQANDLSEVIEADRAHMWHHLSQHKQYETVDPRIIVEGKGMRVWDAAGKEHLDAVSGGVWTVNVGYGRESIANAVRDQLIKMNYFAHSAGSIPASRFSKRLIEKMPGLSRVYYSNSGSEANEKVFKMVRQISHRHHGGKKGKILFRERDYHGTTITALATSGQPQRAEQYGPLTPGFVMVPHCLEYRKQWDVENYGERAADAIEEVILREGPDTIGALCLEPVTAGGGVIVPPAGYWERVQEICRKYDILLHIDEVVCGLGRTGTWFGYQNFGVKPDFVTMAKGVASGYAAISCTVTTEAVFDMFKDDPSDPMSYFRDISTFGGCTAGPVAALENMRIIEDEGLLENTLKMGARVVENLSALQEKHAVIGDVRGKGLFCGAELVADRATKEPMDEKRVAAVVADVMAQGVIIGMTNRSLPGFNNTLCLSPALIATPDDIDQITDAIDRALTRVFG

SEQ ID NO: 8683 - protein, 554 aa, Zea mays
GTSSVITKESLLVAQREDLRKVMELLGLREHHARTLLIHYRWDVERIFELLDQKDRDRLFSEAGIPLQYTRNAGPTSSAEVTCNVCYDDVPPSCALEMDCGHSYCNDCWTEYFIVKINEGQSRRVRCMAPKCNAICDEAIIRKLVIARHPDIAERFERFLLESYIEDNDTVKWCPSTPHCGNAIRVKGDIYCEVECTCGCQFCFNCSLRAHSPCSCMMWELWIKKCRDESETVNWITVNTKPCPKCHKPVEKNGGCNLVACICGQAFCWLCGGATGRDHTWSTISGHSCGRFTDDQTKKTEQARRDLYRYMHYHNRYKAHTDSLKQEAKLKNEIQGKISISENKESKIKDYSWVINGLNRLFRSRRVLSYSYPFAFYMFGDEIFKDEMTPEERELKQNLFEDQQQQLEFNVERLSGFLEKDFQLFTDDEVMDTMKHVINLSNVVDRLCKQMYQCIENDLLYPLRTPHNIAPYKSKGIDRASELNISWDPGEQSSQSTKHSQDEHRNKQASNILGKRTHELHGSSSSNKRERVDVNGGGGALFDLNVPAEVVDKI

SEQ ID NO: 8684 - protein, 172 aa, Synechococcus elongatus
MSIDLSRIPAQPKPGVVNVLVEIAGGSRNKYEFDKEMKVFALDRVLYSAVVYPYDYGFIPNTLADDGDPLDGLVMMDEPTFPGCVIPARPIGMLEMIDSGDRDEKILCVPVDDPRYAEVKSLKDIAPHRLEEIAEFFRTYKNLQKKVTEILGWQDVDAVQPLVEKCIKAYKG

SEQ ID NO: 8685 - protein, 161 aa, Pseudomonas syringae pv. tomato str. DC3000
MSENLLNIPVTTIKGEQKTLADFAGKAVLVVNTASKCGFTPQYKGLEKLWQDYKDQGLVVLGFPCNQFGKQEPGDEGAISGFCELNYGVSFPLFKKVDVNGDQAHPLFVQLKEQAPGLLGTERIKWNFTKFLIGQDGKLVKRFAPLTKPEELTDEIEALLR

SEQ ID NO: 8686 - protein, 355 aa, Pyrococcus furiosus DSM 3638
MIKIAVIPGDGIGKEVVAEGLKVLRKIEELSNVKFDFQEYPFGAEHYLKTGETLPDWALEEFRHFDAIYFGAIGDPRVKPGILEHGILLKLRFSLDLYVNLRPVKLYHPKLTPLKGKEKIDMVFIRENTEGLYAGAGGFLRKGTPHEVAIQEMINTRFGVERTIRFAFEYAKTKGRKKVTLVDKANVLTYAHDLWQRVFKEVASEYQEIETDHYYVDAMAMKMIRSPEIFEVVVTPNMFGDILTDLGAEIVGGLGLAASGNINPRGVSMFEPVHGSAPDIAGKGIANPLAAILTAALMLEHLGLDREASLVEKAVAKTIEENKVTPDLGGELKTSEVGNEVVKNLEVLWDEGEES

SEQ ID NO: 8687 - protein, 463 aa, Amycolatopsis mediterranei
MNWTVDVPVDTLPELPPLPPELRTRLDKALALPAAQQPEWPDPEATRRVRGVLESVPPITVPAEIDRLKSRLAMVARGEAFLLQGGDCAETFESNTEPHIRANLRTLLQMAVVLTYGASLPVVKVGRIAGQYAKPRSAATDALGLPVYRGDIINSLVAKPELRVPDPGRMIRAYANAGAAMNLVRALTGAGMADLHQVHDWNKDFVSASPAAQRFEALANEIDRGLRFMSACGVTDTSLQSTEIFASHEALLLDYERSMLRLDQADATNPKLYNLSSHFLWVGERTRQLDGAHIAFAELLANPIGLKIGPTTTPEQALEYVERLDPRSEPGRLTLIARMGNGKVREVLPAIVEKVEASGHKVIWQCDPMHGNTHESSTGYKTRHFDRIVDEVQGFFEVHNKLGTYPGGIHVELTGEDVTECLGGAQEISDVDLSGRYETACDPRLNTQQSLELAFLVAEMLRG

SEQ ID NO: 8688 - protein, 274 aa, Coxiella burnetii RSA 493
MTKEDQIYAWGNSSALSCFGFPADAHIYTPRPVRLPQHLLSPLLLVTDRIIQLTAGHNHILALTRNGCVFAWGNNWFGQLGLGNREAIAQPTLLLFPDLSSSDRIIQLAAGGYHSFARTEKNRVFGWGGNYTHQLGLVNGVDRTQPTELYFPGLSNADDCIIEIGASSDSSFALTKQGVFVWGDNALGQLGLNYKNHKISIERPTYRPLDKRIPPLKFMRSLHIKAQEKTAQITILGSQGKFDEDAKKYVDYCKIEISGIHNLEYLLYNVLVER

SEQ ID NO: 8689 - protein, 338 aa, Microbulbifer degradans 2-40
MKAAQYAGNKSFNVVDGAKVPPAEGEVCLQVGYTGICGTDMHIYHGVMDQRVSIPQIIGHEMSGTVVEVGAGVTDYTVGDRVVVRPLDYCGDCPACNAGHSHVCHNLKFMGIDSPGAFQSYWTVKARTLHALPDNVSLKQGALIEPLSVACHDVARTRLQAGEKALVIGGGPIGQLVALVAKSVGAEVMISEVSEARLKFAAERGIKTVNPVTDDIEAVVKEWTGGKGADAVFEVSGVAAAVETMTKVAAVRGRICMVAIHSQKPQVDLFQFFWKELELLGARVYESADFEHAIELVASGKIDVDSFISSVTSLNDIGTAFASMDNNPAGMKALVECN

SEQ ID NO: 8690 - protein, 462 aa, Oryza sativa
MATDSSSSAAADKNTVFRKLRAKSDNKMCFDCNAKNPTWASVTYGVFLCIDCSAVHRSLGVHVSFVRSTNLDSWTPEQLKMMVYGGNNRAQAFFKQHGWTDGGKIEAKYTSRAADLYRQLLAKDVAKNSTEDGNNSWPSSPVAASQPTNQADAIPDLKLAEASKEVANEKTEPEVIRSPRAPTHSFKKPIVAKKPGNKTGGLGARKLTSKPNESLYEQKPEELAPALPPVTENSTAKSKSHTSRFEYVENTPSAGSNSEENQVIGHVAPPKSSNFFGEFGMDSGYHKKSAPGPSKVQIEESSEARQKFSNAKSISSSQFFGDQASFEKEAQVSLQKFSGSSAISSADLFGHPTNSSNVDLSASDLINRLSFQASQDLSSIKNMAGETGKKLTSLASNIMSDLQDRILLLSTTGNDDLSKVEKKEASDLNREPPVATIITMLEVASMRCSKFIADLEGGVTFL

SEQ ID NO: 8691 - protein, 163 aa, Glycine max
RVTFDASVIWGLIGPNRLFGPGGLYRNLVWLFMIGAVLPVPIWVLSKIFLQKKWIPLINIPVITYGFAGMPPATPANIASWLVTGMIFNYFVFRYNKRWWQKYNYVLSAALDAGTAFMGVLIFFALQNAGHNLKWWGSELDHCPLATCPTAPGIEVDGCPVFK

SEQ ID NO: 8692 - protein, 765 aa, Tolypothrix sp. PCC 7601
MLQLIYNNFIVSLSPENSPENAAIAPFEVDLTNCDREPIHIPGSIQPHGMLLALTEPELTIVQVSRNTDEILGVAATEFINQPLSRLLDAQQIDFFRNCLAQEDLTLVNPIELTIAVGENARAFDGIIHRSDRLLILELEPVLHQKNYTFFNFYHLVKAALSKVQNASTLDELCQIIVKHVRQMNGFDRVMIYRFDENWHGTVIAEDKSAHLSPYLSLRYPASDIPKQARQLYRDNWLRLIPDVDYQPVALLPHHNPVTNQPTDLSHSVLRSVSPLHIEYLHNMGVKASMSISLLKNQKLWGLIACHHESPKYVPYEIRSACEFLGQMTSLELAAKEDSENTEYKMQLKAVQSKLVEYMAAANNFVDGLIGQEPNLLDLVNATGAAVCINGEYQTLGRTPQHREIEQLINWLSQHTQEEVFHTNCLSELLPEASEWKDVASGLMALSISKSQKSYLLWFRPEALQTVDWAGNPHKPVELADDGSLRLSPRKSFDLWKEIVQRQSLPWESYEIEAVWNFRSAIVGVVLRKADELAKMNVELQRSNDELDAFAYIASHDLKEPLRGIHHYSSFLIEDYGNRLDDEGIGRLRTLIRLTQRMENLIDSLLHFSRLGRVELGIQPTDLNDLVQRVIDVLSARIQETGATIRIPRPLPTIMCDRVQVSAIFTNLIANGIKYNDKPEIWVEIGYLEPITLYVRDNGIGIRDRHFESIFRIFKRLHGPTQYGGGTGAGLTIAKKVVERHGGKIWVESTYGEGSTFYFTLQEVK

SEQ ID NO: 8693 - protein, 493 aa, Bradyrhizobium japonicum USDA 110
MAGVSESASVLDEHRPRTYEAPAHMAGYAVPEAAADDSRFAGCVIASMPRSRVSFSSILLTLPENRRRSVNISDLRPFPSQSRCVMGGRPIRRDAGSRREQYCSAGHPGSDQYECVRGRTSELLPEASVGDNDTSSADIGNRPEMTERTPEIRATARMLARYREPDSARGVLELAITAVPLVIIWVLIWAALDHGYWFALLLEVPAAGLLVRLFMIQHDCGHGSFFRGRVANDWVGRAIGVMTLTPYDYWRHNHARHHANSGNLDHRGSGDIDTLTVREFRDQPLWGRMLYRLYRHPLVMFGVGPSYLFILKHRLPVGLMRGGWKPWLSTMGTNVAIAVLVGAMIRLVGYGPFLLVHLPIIVLAASIGVWLFYVQHQFEHTHWSHDDNWNFHDAALYGSSHYQLPGVLRWFTANIGVHHIHHLCSRIPCYRLPDVLRDHPQLAGVGRITLLQSLRTVRLTLWDEERLRLVSFGEAALTSTASPTPAAASRRGR

SEQ ID NO: 8694 - protein, 338 aa, Glycine max
MCTTRIMKRNYEQVPEWWFVSILLLMIVVSLITCEGFGKQLQLPWWGVLMSLVIALVFTLPIGVIQATTNTQVGLNVITELIIGYIYPGRPLANVAFKTYGYISMSQALGFLQDFKLGHYMKIPPKSMFVVQLVGTIVASGVYFGTAWWLLTSIPHICDETSLPAGSPWTCPGDEVFYNASIIWGVVGPQRMFTKDGIYPGMNWFFLIGLLAPVPVWLLARKFPNHKWIELINMPLMIAGGGGIPPARSVNYITWGLVGIFFNFYVYSKFKAWWARHTYILSAALDAGVAFMGVILYFALQNYGVFGPIWWGQDADDHCPLAKCPTAPGIISHGCPVL

SEQ ID NO: 8695 - protein, 334 aa, Pyrococcus abyssi
MIGEIYYSRKFLLHKPDNYHPENPGRLWLVLTAIRELGLENHVLEPSPIGEELIYRIHEREYVEKIRELSRRGGGYLDADTYVSPRTWEAAILALGASRLATLSALRYGGMNLALVRPPGHHAGRRGKALGAPTLGFCIFNNSAMAALTSKEETGKALVIDFDAHHGNGTQEIFWDDADVVHIDLHERDIYPGSGDVGEIGGINAKGSKINLPMPHYSEDGDYIYAWEEVVIPIVEEVKPKVVIVSAGFDGFKGDGLTTLKLTEVFYSYAGATLRKYPLAVILEGGYSSGLKKGFPAFIRGYEEDKVRDHAQPSYETLKLVEEVKDILSPWWSL

SEQ ID NO: 8696 - protein, 347 aa, Escherichia coli K12
MKNSKAILQVPGTMKIISAEIPVPKEDEVLIKVEYVGICGSDVHGFESGPFIPPKDPNQEIGLGHECAGTVVAVGSRVRKFKPGDRVNIEPGVPCGHCRYCLEGKYNICPDVDFMATQPNYRGALTHYLCHPESFTYKLPDNMDTMEGALVEPAAVGMHAAMLADVKPGKKIIILGAGCIGLMTLQACKCLGATEIAVVDVLEKRLAMAEQLGATVVINGAKEDTIARCQQFTEDMGADIVFETAGSAVTVKQAPYLVMRGGKIMIVGTVPGDSAINFLKINREVTIQTVFRYANRYPVTIEAISSGRFDVKSMVTHIYDYRDVQQAFEESVNNKRDIIKGVIKISD

SEQ ID NO: 8697 - protein, 479 aa, Bradyrhizobium japonicum USDA 110
MAPPSSQADQRLSRNALIALVIGSMVGSGIFALPAAFGRTTGALGAMIAWAIAGTGMLMLAFVFQTLSQRKPDLDAGIYAYARAGFGDYIGFASAVGYWIGCCLADVACLVLIKATLGQFFPVFGDGTTPVAIASASVLLWGVHILLLRGITGAAALNTIATYAKIIPILLFIVVAVIAFDGSLFSINFWGTEQPAVSKVVAQVRGTMLLTVFVFVGIEGASVYSRYARSRADVGFATLAGFLTVLCLLVLVTLLSYGVLPRAELADLPTPSMAGVMEAVVGRWGSVFISVALLISVLGNYLSWSLLAAEILHSAAIHRTMPSFLATVNVYKVPAGALWLTNCVIQIFLLVTWFAEYAFTLALKMTSAMTLIPYFFVAAYGLKLAWTSEAYHAGEHARIVDWIRSAIATVYAAGMIYAGGPKFLLLSSILYAPGTLLFLLAKRERKEAIFRPFEIILFAAITIAACAGVYALATGAISI

SEQ ID NO: 8698 - protein, 70 aa, Zea mays
NAGSINISSILTGKCLAKINPGNSSKQKKAWRFQNTVSEALEDITALYYDEDRDEIYTGNRHGLVHVWSN

SEQ ID NO: 8699 - protein, 347 aa, Salmonella enterica subsp. enterica serovar Typhi
MKSVVIHAEGDVRVEERPLPQLQAEDDVLVKVVSSGLCGSDIPRIFAQGAHYYPITLGHEFSGYVESYGTGVTDMQPGDAVACVPLLPCFHCPQCERGYFSLCKQYQFVGSRSEGGNAEYVVVKRANLFRLPSDMPIEDGAFIEPITVGLHAFHLAQGCEGKNVIIVGAGTIGLLALQCARELGARSVTAIDINPQKLELAKALGATHTCNSREMTADDIQTALSDIQFDQLVLETAGTPQTVSLAIDITGPRAQLALVGTLHHDLTLTTRTFGLILRKELTLLGSWMNYSAPWPGEEWETAARLLAEKRLQLTPLIAHRGDAESFAEAVKALNGAPMQGKILLQLS

SEQ ID NO: 8700 - protein, 545 aa, Solanum tuberosum
MPMDTETKQSGDLIFRSKLPDIYIPKHLPLHSYCFENLSEFNSRPCLIDGANDRIYTYAEVELTSRKVAVGLNKLGIQQKDTIMILLPNCPEFVFAFIGASYLGAISTMANPLFTPAEVVKQAKASSAKIVITQACFAGKVKDYAIENDLKVICVDSVPEGCVHFSELIQSDEHEIPDVKIQPDDVVALPYSSGTTGLPKGVMLTHKGLVTSVAQQVDGENANLYMHSDDVLMCVLPLFHIYSLNSVLLCALRVGAAILIMQKFDIAQFLELIPKHKVTIGPFVPPIVLAIAKSPLVDNYDLSSVRTVMSGAAPLGKELEDAVRAKFPNAKLGQGYGMTEAGPVLAMCLAFAKEPFDIKSGACGTVVRNAEMKIVDPDTGCSLPRNQPGEICIRGDQIMKGYLNDPEATARTIEKEGWLHTGDIGFIDDDDELFIVDRLKELIKYKGFQVAPAELEALLINHPDISDAAVVPMIDEQAGEVPVAFVVRSNGSTITEDEVKDFISKQVIFYKRIKRVFFVETVPKSPSGKILRKDLRARLAAGISN

SEQ ID NO: 8701 - protein, 367 aa, Prunus persica
MGKGGMSSQGGALEAHVEQENMAAWLVGVNTLRIQPFKLPTVGPNDVRVKIKAVGICGSDVHYLKTMKCADFVVQEPMVIGHECAGIVDEVGSLVKNLVPGDRVALEPGISCWRCEQCKGGRYNLCPDMKFFATPPVHGSLANQIVHPADLCFKLPENVSLEEGAMCEPLSVGVHACRRANIGPETNVLVIGAGPIGLVSVLSARAFGAARIVIVDVDDERLSIAKSLGADDAVKVSTNPQDLEDEVSKISKAMKGGVDVSFDCVGFNKTMSTALSATRPGGKVCLVGMGHGVMTVPLTPAAAREVDVVGIFRYKNTWPLCLEFLRTGKIDVKPLITHRFGFSQKEIEEAFETSARGGNAIKVMFNL

SEQ ID NO: 8702 - protein, 82 aa, Glycine max
MSTPALSGGTGLFSGFTRLCKGLAVVLVCGHIAVQFFPSAVNYLALIPARYGGGLLMLIIKDGGSSSTAGLGFMRLVYGDLH

SEQ ID NO: 8703 - protein, 371 aa, Tripterygium regelii
ALSIAGAVQSQKLAVLAISQLQSLQGGDIKLLCDTVVESVRDLTGYDRVMVYKFHEDEHGEVVAESKRPDLEPYIGLHYPATDIPQASRFLFKQNRVRTIVDCHALPVRVIQDDGLMQPLCLVGSTLRAPHGCHAQYMENMGSMASLAMAVVINGNDEEVIGGRNTTRLWGLVVCHHTSARCIPFPLRYACEFLMQAFGLQLNMELQLAAQLMEKHVLKTRTLLCDMLLRDSPTGIVTQSPSIMDLVKCDGAALHYQGNYYPLGVTPTEAQIKDIVGWLLDFHGDSTGLSTDSLADAGYPEAALLGDAVCGMAVAYITNRDFLFWFRSHTAKEIKWGGAKHHPEDKDDGQRMHPRSSFKAFLEVVKSRSLP

SEQ ID NO: 8704 - protein, 223 aa, Gnetum gnemon
GCFEHFLHPYPSDADKHLLARQAGLTRSQVSNWFINARVRLWKPMVEEMYQEELKEAAQRHRDRSDARSSLSDNPDDEEEDDDDDNMDKDTSRSEHEKSDTTNNNNNVVVVNLAQHNRSGFVHNAAMPDSEAELKEESCSGAGISSSHDHDNMIFEAMNAHEQQQQQLQGQHRLSSLTSIAHMYQQQQQQQQQHHHSSGDVSLTLGLRHSGPKYSTNSLYFPG

SEQ ID NO: 8705 - protein, 153 aa, Triticum aestivum
MEQLFVDDPAFASSMSSLEADIFSGAGQLPSSPWLDLDLDDDVQDLSMAPTTANAVSSGYGSGGSGSHRKLSHNAYERDRRKQLNELYSSLRALLPDADHTKKLSIPTTVSRVLKYIPELQKQVENLERKKKELTTTSTTNCQPRVLGSQLMS

SEQ ID NO: 8706 - protein, 394 aa, Zea mays subsp. mays
LGAERRARLPPGEMGWPLVGGMWAFLRAFKSGKPDAFIASFVRRFGRTGVYRSFMFSSPTVLVTTAEGCKQVLMDDDAFVTGWPKATVALVGPRSFVAMPHDEHRRIRKLTAAPINGFDALTGYLPFIDSTVTSSLRAWADHGGSVEFLTELRRMTFKIIVQIFLGGADQATTRALERSYTELNYGMRAMAINLPGFAYRGALRARRRLVAVLQGVLDERRAARAKGVSGGGVDMMDRLIEAQDERGRRLDDDEIIDVLVMYLNAGHESSGHITMWATVFLQENPDMFARAKAEQEAIMRSIPSSQRGLTLRDFMKMEYLSQVIDETLRLVNISFVSFRQATRDVFVNGYLIPKGWKVQLWYRSVHMDPQVYPDPTKFDPSRWEGHSPRAGTFL

SEQ ID NO: 8707 - protein, 359 aa, Pasteurella multocida
MQTFNIAVLSGDGIGPEIIAEAIKVLDVVQQKYAFKLNYRTFDVGGIAIDNHGTPLPEATLKGCEESDAILFGSVGGPKWEHLPPAQQPERGALLPLRKHFALFCNLRPATLYKGLEKFCPLRADISAKGFDMVTVRELTGGIYFGQPKGREGEGANEKAFDTEVYHRYEIERIARVAFETAMKRSKHVTSVDKANVLISSVLWREVVCDVAKDYPEVTLDHIYIDNATMQLIKQPEFFDVLLCSNIFGDIISDECAMITGSMGMLPSASLNEKGFGLYEPAGGSAPDIAGKGIANPIAQILSAAMMLRHSFNLNDAATAIENAVKNVLAEGHRTADLADESQPLSTKQMGDLIAQAVE

SEQ ID NO: 8708 - protein, 346 aa, Listeria monocytogenes
  unsure (1)..(346): unsure at all Xaa locations
TDLDQVTTLQADRLGIKSIDGLEYLNNLTQINFSNNQLTDITPLKDLTKLVDILMNNNQIADITPLANLSNLTGLTLFNNQITDIDPLKNLTNLNRLELSSNTISDISALSGLTSLQQLSFGNQVTDLXPLANLTTLERLDISXNKVSDISVLAKLTNLESLIATNNQISDITPLGILTNLDELSLNGNQLKDIGTLASLTNLTDLDLANNQISNLAPLXGLTKLTELKLGANQISNISPLAGLTALTNLELNENQLEDISPISNLKNLTYLTLYFNNISDISPVSSLTKLQRLFFYNNKVSDVSSLANLTNINWLSAGHNQISDLTPLANLTRITQLGLNDQEWT

SEQ ID NO: 8709 - protein, 338 aa, Oryza sativa
  unsure (1)..(338): unsure at all Xaa locations
MIRKYXAPANKAERKAVLDAGAWMFNVVTSVGIIMVNKALMATHGFSFATTLTGLHFATTTLMTLVMKWLGHIQPSYLPLPELVKFVFFANLSIVGMNVSLMWNSVGXFYQIAKLCIIXPVLCILETVWTKVRYSRDTKLSIVLVLVGVAVCTVTDVSVNSKGLLAAVIAVWSTALQQHYVHHLQKKYSLGSFNLLGHTAPAQAASLLILGPFVDFWLTNRRVDTFNYTTIVTFFIVLSCTIAVGTNLSQFICIGRFTAVSFQVLGHMKTILVLTLGFLFFGKEGLNFHVVLGMMLAVIGMIWYGNASSKPGGKERQIYSVPSEKTQKSSQSELDQKV

SEQ ID NO: 8710 - protein, 396 aa, Brasenia schreberi
PYEVPMTAAGALQSYKLAAKAIARLQSLPSGSVGRLIDTVVEEVHQLTGYDRVMTYKFHEDDHGEVVSEIRKPDLEPYLGLHYPATDIPQAARFLFMKNKVRMICDCRAKPVKVYQDENLKTDLTLCGSTLRAPHSCHLQYMDNMGSIASLVMAVVINEGEDEGDDEPEQNQGQQQQQQQKKKRLWGLVVCHNTTPRFVPFPLRYACEFLMQVFAIHVNKEVELENQMREKNILRTQTLLCDMLLRDAPLGIVTQSPNVMNLVKCDGAALLYGNKLWLLGQTPSESQMRDLAVWLSEYHRDSTGLSTDSLYEAGYPGALAIGDVVCGMAAVRITNSDMLFWFRSPTASEIRWGGAKHDPEEKDDGRRMHPRSSFKAFLEVVKTRSLPWKGFEMDAI

SEQ ID NO: 8711 - protein, 352 aa, Carica papaya
MATMSSISKIIFLATCLIIHMGLSSADFYTVGYSQDDLTSIERLIQLFDSWMLKHNKIYESIDEKIYRFEIFRDNLMYIDETNKKNNSYWLGLNGFADLSNDEFKKKYVGFVAEDFTGLEHFDNEDFTYKHVTNYPQSIDWRAKGAVTPVKNQGACGSCWAFSTIATVEGINKIVTGNLLELSEQELVDCDKHSYGCKGGYQTTSLQYVANNGVHTSKVYPYQAKQYKCRATDKPGPKVKITGYKRVPSNCETSFLGALANQPLSFLVEAGGKPFQLYKSGVFDGPCGTKLDHAVTAVGYGTSDGKNYIIIKNSWGPNWGEKGYMRLKRQSGNSQGTCGVYKSSYYPFKGFA

SEQ ID NO: 8712 - protein, 296 aa, Rhizobium sp. USDA 3620
  unsure (1)..(296): unsure at all Xaa locations
RGKTQIKEYAEFPTLDQLPLWGFDGSSTMQAEGHSSDCVLKPVAIYPDPARTNGVLVMCEVMMPDGVTPHASNKRATILDDXGAWFGFEQEYFFYKDGRPLGFPESGYPAPQGPYYTGVGYSNVGSVARQIVEEHLDLCLAAGINHEGINAEVAKGQWEFQIFGKGSKKAADQMWMARYLLQRLTEKYGIDIEYHCKPLGDTDWNGSGMHANFSTAHMREVGGKAYFEALMAAFDKNLMDHIAVYGPDNDKRLTGKHETAPWNKFSYGIADRGASIRVPHSFIKNDYKGYXEDXRP

SEQ ID NO: 8713 - protein, 394 aa, Zea mays
  unsure (1)..(394): unsure at all Xaa locations
QRAAVTAREGSPRYTVLLRQIAPKQIGQRLLLSTPTSCPGINKGRERLAYFDRGVPERAPGNFGVARLMRNRADGQRVAVKYIDRGEKIDENVQRXEIINHRSLRHPNIIRFKEVILTPTHLAIVMEYASGGELFERICNAGRFSEDEARFFFQQLISGVSYCHSMQVCHRDLKLENTLLDGSTAPRVKICDFGYSKSSVLHSQPKSTVGTPAYIAPEVLLKKEYDGKVADVWSCGVTLYVMLVGAYPFEDPDEPKNFRKTIQRILGVQYSVPDYVHISPECQDLISRIFVANPSTRITMPEIRSHPWFLKNLPADLVDDSATTTSKQYEEPEQPMQGMDEIMQILGEATIPAAGSRGLNQFLNDGLDLDDDMEDLDSDADLDLESSGEIVYAM

SEQ ID NO: 8714 - protein, 205 aa, Eucalyptus globulus
MGRGRVQLKRIENKINRQVTFSKRRCGLLKKAHEISVLCDADVALIVFSTKGKLFEYATDCCMERILERYERYSYAESQVLTNNAETNGNWTLEHAKLKARMEILQKNQKNLMGEELDSLSLKELQNLEHQLDTALKNIRSRKIQLMCESISELQRKDKALQEQNNMLAKKVKEKEKALAQQTQWDNPQDDGLTSSSGSLPSEWN

SEQ ID NO: 8715 - protein, 289 aa, Populus alba
EENWAEEVREDWFQDELEGESYCSNNSNKLNTFPILLEQDLSWEDEELSSLFAKEEQNQLCKDLETNPSLARARCEAVEWILKVNEHYSFTALTAVLAVNYLDRFLFSVHLQKEKPWMAQLAAVSCLSLAAKVEETQVPLLLDFQVEDSKYVFEAKTIQRMEILVLSTLKWKMNPVTPISFLDYITRRLGLEHYLCLEFLKRCERMVLSILADSRSMPYVPSVMAAATMLYVIDNIKPSLAAEYQSQLLSILGIDKDKVEDCSKFLMEFALREHFKLLSNKRKFCSLPG

SEQ ID NO: 8716 - protein, 273 aa, Oryza sativa (japonica cultivar-group)
MGTLGRAIYTAGKWIRGTGQAMDRLGSTIQGGLRVDEQLPRHRTIMNIFEKEPRIHKDVFVAPSAAVIGDIEIGHGSSIWYGSILRGDVNSIHIGVGTNIQDNSLVHVSKANISGKVLPTIIGNSVTIGHSAVLHACIVEDEAFVGMGATLLDGVVVEKHSMVGAGSLVKQNTRIPSGEVWVGNPAKFLRKLTEEEMAFIAQSATNYINLAQVHAAENAKTFDEIELEKMLRKKFAHKDEEYDSMLGVVREIPPELILPDSILPNKAQKAVAH

SEQ ID NO: 8717 - protein, 378 aa, Neisseria meningitidis MC58
MEMKQADSTIKSRAAVAFAPNQPLQIVEIDVEMPRKGEVLIRNTHTGVCHTDAFTLSGSDPEGVFPVVLGHEGAGVVVAVGEGVSSVKPGDHVIPLYTAECGECEFCCSGKTNLCVSVRDTQGKGLMPDGTTRFSYQGQPIYHYMGCSTFSEYSVVAEVSLAKINPEANHEQVCLLGCGVTTGIGAVHNTAKVQEGDSVAVFGLGAIGLAVVQGARQAKAGRIIAIDTNPSKFELAKQFGATDCLNPNDYDKPIKDVLLDINKWGIDHTFECIGNVNVMRQALESAHRGWGQSIIIGVAGAGQEISTRPFQLVTGRVWKGSAFGGVKGRSELPKMVEDSMKGDIELEPFVTHTMTLDQINKAFDLMHEGKSIRAVIHY

SEQ ID NO: 8718 - protein, 420 aa, Emericella nidulans
MASDAGKGDLGKMLDTYGNEFKIPDYTIKDIRDAIPSHCYNRSAIRSLSYVFRDLAVLASVFYVFHKYVTPETVPSYPARVALWTLYTVVQGLFGTGIWVLAHECGHQAFSTSKVLNDTVGWILHSALLVPYFSWKISHGKHHKATGNLARDMVFVPKTREVYASRIKKTIYDLNEVMEETPLATATHSILQQLFGWPLYLLTNVTGHDNHERQPEGRGKGKRNGYFTGVNHFNPNSPLFEAKDAKLIILSDIGLAITASILYLIGSKFGWMNLLVWYGIPYLWVNHWLVAITYLQHTDPTLPHYQPESWTFARGAAATIDREFGFIGRHILHGIIETHVLHHYVSTIPFYHADEASEAIKKVMGSHYRSEAHTGPLGFLKALWTSARVCHWVEPTEGTKGENAGVLFFRNTNGIGVPPH

SEQ ID NO: 8719 - protein, 735 aa, Glycine max
MTGHFLRTPLTLKIAAFFFIAVTFFYFGKHWSDGYQQLVFFTQRSDPDSNSNPFVSTSPNNAKSFNVSALIENNTQPAPPENAPPPPAPEEGSIEKLGVVNENGTMSDEFEVGDFDPGMVDQWVNETQVDESEGSSSDVGFGIKKFGLCPREMSEYIPCLDNEDEIRKLPSTEKGERFERHCPEQGRGLNCLVPAPNGYRTPIPWPRSRDEVWYNNVPHTRLVEDKGGQNWISRDKDKFKFPGGGTQFIHGANEYLDHISKVVMMIPDITFGKHIRVVLDVGCGVASFGAYLLSRNVVTMSVAPKDVHENQIQFALERGVPAMAAAFATRRLLYPSQAFDLVHCSRCRINWTRDDGILLLEVNRMLRAGGYFVWAAQPVYKHEEVLEEQWEEMLNLTTRLCWNFLKKDGYIAVWQKPSDNSCYRDREAGTKPPMCDPSDDPDNVWYVDLKACISELPKNGYGANVTEWPARLQTPPDRLQSIKLDAFTSRSELFRAESKYWNEIIASYVRVLHWKEIRLRNVMDMRAGFGGNFPMRIFNLQYIEFCRFAAALINQNLDSWVMNVVPVSGPNTLPVIYDRGLIGVMHDWCEAFDTYPRTYDLLHAANLLSVEKKRCNVSSIMLEMDRILRPGGRVYIRDSLDIMDELQEIAKAIGWYVMLRDTEEGPHASYRVLEDASASTTRHLRSALPYKREEVLSIYSSIPLSLEPDASSSLFVKFNLFVYSKALRALNILFP

SEQ ID NO: 8720 - protein, 294 aa, Caulobacter crescentus CB15
MTDVPYVIALHGGAGVIPGRDYGRALDHLRDLAARMSSKLADGLDAIDAVEIAVTEMEDSGLYVAGRGSAPNAVGVVEMDASIMDGARHRAGAVCAIQGVASPVGAARQVLEATPHVLLAGEGASQFARARGLPLIGDPANFYRTPVGLTQADIDAEAAALAHGTVGAVALDRRGALAAATSTGGVFGKRPGRVGDTPLPGAGVWADGEVAVSCTGVGEYFILGATAYDVAARLRYAGQSLDQACQGAIARIGELGGDGGLIAVDRRGRVSFQFNSPGLKRAVAGCGRLTQALI

SEQ ID NO: 8721 - protein, 217 aa, Bacillus anthracis str. A2012
ELSKAKKDIAIANKETLVAAGHIVTELAKQNGCRLIPVDSEHSAIFQCLNGENNKEIDKLIVTASGGAFRDKTREEMKTLQAKDALKHPNWLMGAKLTIDSATLMNKGFEVMEARWLFDIPYEKINVMIHKESIIHSLVEFIDGSVIAQLGAPDMRMPIQYAFHYPTRLPSSYEKLNLLEIGSLHFEKPDLEKFPCLQYAYECGKIGGITPAVLTQQ

SEQ ID NO: 8722 - protein, 302 aa, Triticum aestivum
  unsure (1)..(302): unsure at all Xaa locations
MSGGGGGGSAATQGQQDLQLPPGFRFHPTDEELVMHYLCRRCAGLPISVPIIAEVDLYKFDPWQLPRMALYGEKEWYFFSPRDRKYPNGSRPNRSAGTGYWKATGADKPVGTPKPLAIKKALVFYAGKAPKGDKTNWIMHEYRLADVDRSARKKNSLRLDDWVLCRIPVRHGXASERPSAGDRTASASPGHAAVGSPPEQKPALLPPYAPQPFSDLAAYYEVRPSDSMPRAHADSSCSEHVLTASCERPEVQSQPKISEWERTFATATPGVNPAGLMLDPAAGLPAGDPLLQDILMYWGKPF

SEQ ID NO: 8723 - protein, 392 aa, Aspicarpa hirtella
DLEPVNPADVPVTAAGALKSYKLAAKAISRLQSLPSGNISLLCDVLVKEVRDLTGYDRVMVYKFHEDEHGEVVLECRRSDLESYLGLHYPATDIPQASRFLFMKNKVRMICDCLAPPVKVIQDKRLPHPLSLCGSTLRSPHGCHAQYMTNMGTIASLVMTVTVNEDDDMMDGDQQHMTKKLWGLVVCHHTSLRFVPFPLRYACEFFIQVFGVQINKEVELAAQVREKHILQIQTMLCDLLLRDAPVTIITQSPNVMDLVKCDGAALYFKNTTWLLGVTPTEEQIRGIAEWLLKYHSGNTGLSTDSLMEAGYPGASGLGDAVCGMAAVSITSRDFLFWFRSHTAKEIKWGGAKHNPDDKDDLRKMHPRSSFKAFLEVVKWRSMPWEDIEMDAI

SEQ ID NO: 8724 - protein, 326 aa, Streptomyces coelicolor A3(2)
MAAEKMALAKAINESLRRALESDPKVLIMGEDVGKLGGVFRVTDGLHKDFGEDRVIDTPLAESGIVGTAIGLALRGYRPVVEIQFDGFVFPAYDQIVTQLAKMHARSLGKVKMPVVIRIPYGGGIGAVEHHSESPEALFAHVAGLKVVSPSNAADAYWMMQQAIQSDDPVIYFEPKRRYWDKAEVDKEAIPGPLHTARVVREGTDLTLAAYGPMVKLCREVADAAAEEGRSLEVVDLRSISPVDFDTIQASVEKTRRLIVVHEAPVFLGSGAEIAARITERCFYHLEAPVLRVGGYHAPYPPARLEEEYLPDLDRVLDAVDRSLAY

SEQ ID NO: 8725 - protein, 272 aa, Oryza sativa (japonica cultivar-group); identical to SEQ ID NO: 2350

SEQ ID NO: 8726 - protein, 489 aa, Salmonella typhimurium LT2
MGSKTKTTEAPALRRELKARHLTMIAIGGSIGTGLFVASGATISQAGPGGALFSYILIGLMVYFLMTSLGELAAYMPVSGSFATYGQNYVEEGFGFALGWNYWYNWAVTIAVDLVAAQLVMGWWFPDTPGWIWSALFLCVIFLLNYISVRGFGEAEYWFSLIKVATVIIFIIVGVAMIIGIFKGVEPVGWSNWTTGDAPFAGGFAAMIGVAMIVGFSFQGTELIGIAAGESENPEKNIPRAVRQVFWRILLFYVFAILIISLIIPYTDPNLLRNDVKDISVSPFTLVFQHAGLLSAAAIMNAVILTAVLSAGNSGMYASTRMLYTLACDGKAPRIFAKLSRGGVPRNALYATTVIAGLCFLTSMFGNQTVYLWLLNTSGMTGFIAWLGIAISHYRFRRGYVLQGYDVNDLPYRSGFFPLGPIFAFVLCLIITLGQNYEAFLKDTIDWGGVAATYIGIPLFLLIWFGYKLIKGTHFVRYSEMHFPERVKK

SEQ ID NO: 8727 - protein, 132 aa, Brassica juncea
DPYQRAQARFWVDFIDKKMYEAQRKVYATKGEEQETGKKEFIEILKTLETELGDKPYFGGDDFGYVDIGLIGFYTWFPGYEKFGNFSIEAECPKLIAWAKRCMQRESVAKSLPDPEKVVEFMAMLRKKFGVE

SEQ ID NO: 8728 - protein, 708 aa, Cryptococcus neoformans var. grubii
MGKGKNHDRKANPGFGKVKSKTGTSTGEFTLKRVKGENFYRDAKSASRVKMLNGGKAVRDRDGKIVEAAAFQKGEKEAEPGRVKPDRRWFGNTRVISQSALDHFRTALKEQKADPYSVLLKRNKLPMGFGSRKNRKQRPHIVETEPFGNTFGPKAQRKRPRLDIGKGNGTADLADIYHPTTSTAREPIYAKGTSRRIWGELYKVLDSSDVVIHVLDARDPLGTRCKPVVEYLRKEKAHKHLVYVLNKVDLVPTWVTSGPYAYPYANGPHFGARWVKHLSLSAPTIAFHASINNSFGKGSLIQLLRQFSVLHSDKKQISVGFIGYPNTGKSSIINTLKKKKVCTVAPIPGETKVWQYITLMRRIYLIDCPGIVPVSAKDSDTDTVLKGVVRVENLATPAEHIPALLERVRPEYLERTYGLEHVEGGWHGEEGATFVLTAIAKKSGKLLKGGEPDQEAAAKMVLNDWIRGKVPFFVAPPTKPESGADAHVSSATTEKVQEQEQKELAEEKETKEMLEEQERSLGKVLGIKRVKGVEQPISKIVTMTKFLGDDARRYVEEEEVDVDDVDKEMAEEDEDEDEDDDDDVEESGEDQEEEELAWDDVFPEEAAGVDAADGEEVEEDDEEEEGDEDDEDVPSAKQLGKRKAIDSDEEEQTAIKAKRMTTNKQKASNFYTHANVKNRNRDRKVPKNPGKRSRGDDEPTGKKAKKRR

SEQ ID NO: 8729 - protein, 196 aa, Ralstonia metallidurans
AQAVLDQAKAVRTLDLAPEEWEALRPFCLITAKPTMYVANVREDGFENNPHLDAVREYAKTTGSPVVAVCAAIEAEIADLDDADKAEFLADLGMEEPGLDRVIRAGFKLLGLQTYFTAGVKEVRAWTIHVGDTAPKAAGVIHTDFERGFIRAQTIAYDDFIAFKGEHGAKEAGKMRAEGKEYVVHDGDVMNFLFNV

SEQ ID NO: 8730 - protein, 342 aa, Lupinus albus
MADPKSSFLNVYSILKSELLQDPAFEFSTDSRQWVERMLDYNVPGGKLNRGLSVIDSYKLLKDGQELNDEEIFLASALGWCIEWLQAYFLVLDDIMDNSHTRRGHPCWFRVPKVGMIAPNDGVVLRNHIPRILKKHFRGKPYYVDLLDLFNEVEFQTASGQMIDLITTLEGEKDLSKYTLSLHRRIVQYKTAYYSFYLPVACALLMVGENLDNHTDVKNILVEMGTYFQVQDDYLDCFGAPETIGKIGTDIEDFKCSWLVVKALELSNEEQKKVLYENYGKPDPANVAKVKTLYNELNLEGAYADYESKSYEKLVTCIEGHPSKAVQGVLKSFWAKIYKRQK

SEQ ID NO: 8731 - protein, 701 aa, Clostridium acetobutylicum
MKKLKCKSLLSALACLTLLFTIIPVNAYKADTTVGITYDAHVQNIGWQNPWSSNGEEIGTDGKGLRVEAFKLKLTNAPSDAKIEYQAHVQNIGWQDWVSNGLEAGTDGKGLRVEALRIKLDNMPDYRVEYCAHVENIGWQDWVSDGAEAGTDGKGLRVEALKIRIVKKSHPDAVTLNKATENLTVGDTDTLSATVTPNNAENKSITWSSSNSNIVSVNNSGKISALAEGNAVITALTVDGQKAASCNVNVSKGDYPRVQYQTHVQNIGWQDPVTDGAEAGTEGQSLRIEALKLNILNAPVGAKINYQTHVENIGWQTPVSNGLEAGTDGKGLRIEALKISLENMPGYSIQYQTYVQNIGWQNWVSDGAEAGTDGQGLRIEALKIKIIKSINVASISLNKSTDTLTVGDTDSLSASFNPSNATNKNLSWTSSDPSKVYVDSNGKITAFGPGNAIITATSNDGNKQATCTVTVNQRVNTNPNEVTFADKNLDSAVRAVLNKPTGTLYKSDVLQIQSIDLTGKGLRSLNGIENLTNLQTLYLANNYIIDIAPLKNLTNLNTLVLDDNSVSDLSPLSSLNNLKSLSLPQNNFSDITPLKNLINLNHLDFSYNNVIDITPLKNLTNLVTLLASYNNINDISAITNVGNLQILGLNSNKINNLTPLNTLTNLNTLYISNNLVTHEGINTLKTALPNCTVIGDNEPSQ

SEQ ID NO: 8732 - protein, 161 aa, Debaryomyces vanrijiae var. yarrowii
MVQAVAVLRSDSKVSRCRLTSNNRQSLTQLLLHGRFLGNDANALRGFHVHTFGDNTNGLYFCWTSLHFNPFTKEHGAPEDDNRHVGDLGNVTTDTSGVAKGSKQDLFVKLIGQNSILGRTVVIHAGTDDLGKGGNAESKKTGNAGARLACGVIGLTNKPNS

SEQ ID NO: 8733 - protein, 353 aa, Gibberella fujikuroi
MATPITSRTETLQKYLKLDQKGMIMAEYVWVDADGGTRSKSRTLPEKEYKPEDLPVWNFDGSSTNQAPGDNSDVYLRPCAVYPDPFRGSPNIIVLAECWNADGTPNKYNFRHDCVKVMDTYADDEPLFGLEQEYTLLGSDNRPYGWPAGGFPAPQGEYYCGVGTGKVVQRDIVEAHYKACLYAGIQISGTNAEVMPAQWEYQVGPCTGIAMGDQLWISRFFLHRVAEEFGAKVSLHPKPIAGDWNGGLHSNFSTKAMREEGGMKVIEEALKKLEPHHVECIAEYGEDNELRLTGRHETGSIDSFSWGVANRGTSIRVPRETAAKGYGYFEDRRPASNADPYRVTKVLLQFSMA

SEQ ID NO: 8734 - protein, 129 aa, Fusobacterium nucleatum subsp. vincentii ATCC 49256
  unsure (1)..(129): unsure at all Xaa locations
MGVANMKTPILYAFTXPEKEFNSSINFLDLIKTSNLTFEEPNRKIFKGIDLAYRAGEIGCTMTTVFNASNEVAVELFMKKKIKFLDIYRIIEEAMNSHQILSLNTDNALNIIKEVDRETRKKVREQWER

SEQ ID NO: 8735 - protein, 180 aa, Bacteroides thetaiotaomicron VPI-5482
MKSFILMVITMVCAISLEAQNKSFYDFNVTTIDGKEFPLSSLKGKKVLVVNVASKCGLTPQYAKLQELYDKYKDKNFVIIGFPANNFMGQEPGSNEEIAQFCSLKYDVTFPMMAKISVKGKNMSPLYQWLTEKKLNGKEDAPVQWNFQKFMIDENGNWVGFVAPKESPLSEKIVTWIEQE

SEQ ID NO: 8736 - protein, 392 aa, Tristellateia madagascariensis
DLEPVNPADVPVTAAGALKSYKLAAKAISRLQSLPSGNISLLCDVLVKEVRDLTGYDRVMVYKFHEDEHGEVVSECRRSDLESYLGLHYPATDIPQASRFLFMKNKVRMICDCLAPPVKVIQDERLPQPLSLCGSTLRSPHGCHAQYMANMGTIASLVMSVTINEDDDTMDGDQQQMARKLWGLVVCHHTSPRFVPFPLRYACEFLIQVFGVQINKELELAAQVREKHILRIQTMLCDMLLRDAPVGIITQSPNVMDLVKCDGAALFYKNKFWLLGITPTEAQIRDIAEWLLEYHSGNTGLSTDSLMEAGYPGASVLGDAVCGMASVSITSRDFLFWFRSHTAKEIKWGGAKHDPDDKDDGRKMHPRSSFKAFLEVVKWRSLPWKDMEMDAI

SEQ ID NO: 8737 - protein, 376 aa, Bothriochloa odorata
ALSIAGAVQSQKLAVRAISRLQALPGGDVKLLCDTVVEHVRELTGYDRVMVYRFHEDEHGEVVAESRRDNLEPYLGLHYPATDIPQASRFLFRQNRVRMIADCRATPVRVIQDPGLSQPLCLVGSTLRAPHGCHAQYMANMGSIASLVMAVIISSGGDHEQTGRGGISSAMKLWGLVVCHHTSPRCIPFPLRYACEFLMQAFGLQLNMELQLAHQLSEKHILRTQTLLCDMLPRDSPTGIVTQSPSIMDLVKCDGAALYYHGRYYPLGVTPTESQIKDIIEWLTVCHGDSTGLSTDSLADAGYLGAAALGDAVCGMAVAYITPSDYLFWFRSHTAKEIKWGGAKHHPEDKDDGQRMHPRSSFKAFLEVVKSRSLPW

SEQ ID NO: 8738 - protein, 345 aa, Lactococcus lactis subsp. lactis
MSKKIVTLAGDGIGPEIMSAGLSVLKAVSKKIDFEYELEAKDFGGIAIDKHGHPLPEETLQAVKNADAILLAAIGHPKYNNAKVRPEQGLLALRKELGLYANVRPLKIYPALKKLSPIRNVENVDFLVIRELTGGIYFGQHELADDKARDVNDYSADEIRRILHFAFKSAQSRPRKLLTSVDKQNVLATSKLWRKMADEIADEYPDVRLEHQLVDSCAMLLITNPQQFDVIVTENLFGDILSDEASSLAGSLGVMPSSSHGFNGLALYEPIHGSAPDIAGKGIANPVSMILSIAMMLRESFGQEDGAAMIEKAVTQTFTDGILTKDLGGTATTKEMTEAILKNCQ

SEQ ID NO: 8739 - protein, 399 aa, Momordica charantia
MGGRGAIGVLRNGGGPKKKMGPGQGLGPGERITHARPPFSISQIKKAIPPHCFQRSLRRSFSYLLSDIALVSAFYYVADTYFHRLPHPLLHYLAWPVYWFCQGAVLTGMWGIAHDCGHHAFSDYQLVDDVVGFLIHSLVFVPYFSFKISHRRHHSNTSSVDRDEVFVPKPKAKMPWYFKYLTNPPARVFIIFITLTLGWPMYLTFNISGRYYGRFTSHFDPNSPIFSPKERVLVHISNAGLVATGYLLYRIAMAKGVGWLIRLYGVPLIVLNACVVLITALQHTHPSFPYYDSTEWDWLRGNLVTVDRDYGPIMNRVFHHITDTHVVHHLFPSMPHYNGKEATVAAKRILGEYYQFDGTPIWKAAWREFRECVYVEPDEDDGATSGSSSKGVFWYHNKL

SEQ ID NO: 8740 - protein, 476 aa, Staphylococcus aureus subsp. aureus Mu50
MNESGDNKLSKSSLIGLVIGSMIGGGAFNIMSDMGGKAGGLAIIIGWIITAIGMISLAFVFQNLTNERPELDGGIYSYAQAGFGDFVGFISAWGYWFSAFLGNVAYATLLMSAVGNFFPIFKGGNTLPSIIVASLLLWGVHFLILKGVETAAFINSIVTVAKLIPILLVIICMIIAFNFDTFKTGFFGMTSEGVLPFSWASTMSQVKSTMLVTVWVFIGIEGAVIFSSRAKNKKDVGSATVIGLISVLIIYFLLTVLAQGVILQNHISQLDSPSMAQVLATIVGGWGSTLVNIGLIISVLGAWLGWTLLAGELPFIVAKDGLFPKWFAKENKNGAPVNALLITNILVQLFLISMLFTQSAYQFAFSLASSAILYPYMFSAFYQVKYTLEHRQQATTKQWTIGIIASIYAIWLIYAAGINYLLLTMLLYIPALLVYSIVQKNNQTRLIKSDYILFMIIIVLAVIGLIKLLMGTINVF

SEQ ID NO: 8741 - protein, 292 aa, Shigella flexneri 2a str. 301
MRRALAHCREVAYITLSSFRVNPEFQDFSLRCSDHPVKCFTLSSQRRRIIGIPIFCTSIFLIFFSVCCFFTLFAAIAHKTVLFCILKDLHKANNAPKVISKSFIAEVSMSDVLRPYRDLFPQIGQRVMIDDSSVVIGDVRLADDVGIWPLVVIRGDVHYVQIGARTNIQDGSMLHVTHKSSYNPDGNPLTIGEDVTVGHKVMLHGCTIGNRVLVGMGSILLDGAIVEDDVMIGAGSLVPQNKRLESGYLYLGSPVKQIRPLSDEEKAGLRYSANNYVKWKDEYLDQGNQTQP

SEQ ID NO: 8742 - protein, 199 aa, Zea mays
MRVEVQVQQRGSPAPAAELEVSLREFALSDADTRAFMSWASDPRVVRFQRRDAYEHVDQARRYIADHVLPHPWYRAICAGAGAPLPVVGSISVKAGPAEDGGPFRASVGYRLARAHWGRGMATRAVRAEAAAMFAARPWLLRLEAVADVDNPASQRVLEKAGFAREGVLRKYVLLKGRPRDMVMFSIVVETEQDKPDGP

SEQ ID NO: 8743 - protein, 246 aa, Rhodococcus erythropolis
MSYALEGKVAVVTGGGSGIGAACVRQLCALGASVVVADIVFDNATLVAKEFGDRAVAVEVDVARVEDAERMVETAVAHFGGLDIAVNNAGVGVPVKASVGDTGFEEWRRVLDVNLDGAFFCMRAELRRMRKGGSVVNLASVMGAVAAEGSSSYVASKHALVGLTKTAALDYATAGIRVNAVGAGFVDTPLMAGRDPEWLAAVAASHPLGRLAQPDEIASVVAFLASSAASFVTGAFIPVDGGYLAR

SEQ ID NO: 8744 - protein, 250 aa, Brassica juncea
MTKSYPTVSEDYQKAIEKCKRKLRGLIAEKNCAPIMVRLAWHSAGTFDCASKTGGPFGTMRFDAEQGHGANSGIHIALRLLDPIREQFPAISFADFHQLAGVVAVEVTGGPEIPFHPGREDKPQPPPEGRLPDATKGCDHLRQVFTKQMGLSDKDIVALSGAHTLGRCHKDRSGFEGAWTSNPLIFDNSYFKELLTGEKEGLLQLVSDKALLDDPVFRPLVEKYAADEEAFFADYAEAHLKLSELGFADA

SEQ ID NO: 8745 - protein, 119 aa, Triticum aestivum
MDCGGEEQARQNGHAGDGGDPAEWKKVAELRAVVEAQDPAAKEEDDFMLRRFLRARDHNISKASAMFLKYLSWKRGAKPRGSITEAEVRGELVQDKLYIQGFDKTGRPMIYLFGNRHFA

SEQ ID NO: 8746 - protein, 416 aa, Moricandia arvensis
YHHSNTLFFVMLVLFPHVLSTNTLSSNEALTISSNKTLVSPGDVFELGFFKTTTRNSTDRWYLGIWYQTTSERTYVWVANRDNPLHNSNGTLKVSHANLVLLDQSDTPVWSTNITRPVTSPVTAELLANGNFVVRGSYTIDQSHFMWQSFDFPVDTLLPEMKLGWNNKTEHGRFLTSWKSPTDPSSGDFSFGLETHEGLHEFYLLKDEYEMYRTGPWNGARFSGIPKMQNWSYIVNSFIDNKEEVSYSFHVNNNHNNIHSRFRMSSTGSLQVITWTSTTPQRNMFWSFPEDACDAYQMCGPYAYCDMNTTPTCNCIKGFVPKDADAWALRDASGGCVRSSRLSCGEGNGFLRMGQMKLPETSTGAVGDKRIGLKECKERCVRDCRCTGFANMDIRNGGSGCVIWTGELMDMRNYGA

SEQ ID NO: 8747 - protein, 175 aa, Zea mays subsp. mays
RLLAANPVYGKIPVLLLPDGRAICESAVIIQCIEDVARGSGGAEASSLLLPDDPYERAMHRFWTAFIDDKFWPALDAVSLAPTPGARAQAVEDTRAALSLLEVAFKDRSNGRAFFSGGDAAPGLLDLALGCFLPALRACERLHGLSLIDASATPLLDGWSQRFAAHPAAKRVCRT

SEQ ID NO: 8748 - protein, 378 aa, Oryza sativa
  unsure (1)..(378): unsure at all Xaa locations
XRLLSKFTRAIRNSRYLKAAQELLDEVVSVWKSIKQKGPKSEGVSSNPQESGANAAPELSTAEKQELQNKMAKLMAMLDEVDRKYKHYYHQMQTVVSSFDVVAGPGSAKPYTAVALQTISRHFRCLKDAINDQINVIRKKLGEEENSSGKEGKLTRLRYIDQQLRQQRAFQQYGMIPQNAWRPQRGLPENSVTILRAWLFEHFLHPYPKDSEKLMLARQTGLTRSQISNWFINARVRLWKPMIEDMYKEEIGDLEQDSNSSSDNEPNPDDSFMNLMLKDQRSNEVDGGLLLHNTVAQHSDENARFMAYHLAELGRYGNGNVSLTLGLQHSSSNLVXXNAQPGFPGVNDTVASSDYDSMNQMDQRQRFEHSPLLHDFVA

SEQ ID NO: 8749 - protein, 160 aa, Neurospora crassa
MSAWDTDAVKIGKNVSRGGAGPRETVVRGKSALNAAQRSGNIIATEKKYAAGNTASKPGVEGQRLTMVDRSDDIVKPKTVSKEVGAAIQKARSAIMIGDKAMTQKELATRCNSTQAIIAQYERGEGVPDQKLLGNLERVLNVKLRGSDIGKPKFEKKEKK

SEQ ID NO: 8750 - protein, 167 aa, Lycopersicon esculentum
MVNRGCGPDVGAYNVKIMNIQGGDLEGMKTLIEEMSDAGLNPDTISYSYSMTCYCKNELMDEAEMVYEDLEKNECNANSATFRTLIFICGRFETGYKVFKESVKVQKIPDFDTLTYLVEGLVKKSKLKDAKGMSRTVKKKFPPNLVKAWTKLEEELGLAEAPDIRVQ

SEQ ID NO: 8751 - protein, 361 aa, Brexia madagascariensis
QSQKLAVRAISRLQSLPGGDIKLLCDTVVESVRDLTGYDRVMVYKFHEDEHGEVVAESQRPDLEPYIGLHYPATDIPQASRFLFKQNRVRIIVDCHASSVRVIQDDGLMQPLCLVGSTLRAPHGCHAQYMENMGSIASLAMAVIINGNDEEVIGGRNPTRLWGLVVCHHTSARCILFPLRYACEFLMQAFGLQLNMELQLAAQLLEKHVLKTQTLLCDMLLRESPTGIVTQSPSIMDLVKCDGAALYYQGNFYPLGVTPTEAQIKDIVEWLLAFHGDSTGLSTDSFADAGYPGAALLGDAVCGMAVAYITNRDFLFWFRSHTAKEIKWGGAKHHPEDKDDGQRMHPRSSFKAFLEVVKRRS

SEQ ID NO: 8752 - protein, 177 aa, Thermosynechococcus elongatus BP-1
MVITAPSAFWPPVASDRAAFIAPNATLVGDVRLGEGCSIWYGAVLRGDVTYIEIGAHTNVQDGAILHGDPGQPTILGEEVTVGHRAVIHGATVEDGCLIGIGAVVLNGVRVGAGSIVGAGAVVSKDVPPRSLVLGIPAKVVREVSDTEAADLRQHARKYEQLAQVHKGTGRNLGFSA

SEQ ID NO: 8753 - protein, 1094 aa, Neurospora crassa
MENATLTPTLYPLIEAVDPLQIELAMTMTRGQENRFRMTPDRDRSPSPDIPFFLDDSDHHPSFPLRELLHQAVLPAGTNSSTTTRGQPTPTSSHSSQDFEVSLIGSTQDRDRVNTLPGRDEPVQTLPGNAHGLLQQLHLHEETGGDNADSDNDSTPSEPVSEEFMTTRQPSLLSVAPGRDSPSYGAITSAPARATSAPQSEGGEPSARAESRSESSARFRTGHDPTGRSSTGDSCDGSVGRSSERLSLSLQKSGEWGGSMTMRGIEGRFEAEVPLEGESLLDHIDELNEFDETEEDPADNSPYAQVRASVAPTDNTTLSINTPRMWTLAVLFSIIGSSTNLFFSLRYPSVAITPVIALLSTHPLGLMWDFFLKRADDPPEEYVDGCRTDSANIPVDHPTDEQPRVFVPWEKRSKLDQLRLWLAQGRWNEKEHSCVYVSSNVSFGFAFATDVIVEQTQFYKQDAPILYQILLTLSTQIMGYTFAGLTRGFLVRPSGMIWPGTLMSAAMFTTIHKQENHVANGWKMTRWKFFMVVFLAGFLFYFVPGLLFPALSYFNVITWFAPKNVVVANLFGVVSGLGLFPMTFDWAQIAYIGSPLLTPFWAAMNVVGGLVVVMWIIAPIAYYSNWLYSSYMPILSAAVFDNTGQVYDVSRILTEDFVFDREAYSKYSRVFLPITYVLGYAVQFAGLASLLTHTICWHGRDIWAQWKQTLGEMHGAEPKGSYEPVAVSTEGLSRTWSRLSSRSSFTRSNSSTENIMNREDVHNRLMRRYKDAPMSWYLITCILMLAIGIFVVEYYPVHLPWYGLLLALGICSILFIPIGIIMAVTNQHSSIYLICQLVAGAVFPGRPVANMVFVTYGYISSAQGIKFAADLKLGHYMKIPPRILFSVQMVATIVSSLTQIGVLNWMFKNVPGLCTPEALNGFTCPIARVHFNGSILWGVVGPSEFFGPGATYRPLVWAFAVGAVLPIPLWLYARKRKDSIVRKLNLPVLFGSLGWIPPATGLNFSVWALVCYVFNYVIKNRARAWWAKYTMTLSAALDSGLAFGIVVVFFGFIYPGVVKGFSWWGTEVYKQGCDWQACAYQAVPEGGRFGPDVW

SEQ ID NO: 8754 - protein, 117 aa, Zea mays
VAAGGTHSVVLTQEGHVWTWGQPWPPGDIKQISTPVRVQGLEKVRVIAVGAFHNLALTEDGILWAWGNNEYGQLGTGDTQPRSHPIRVEGLSDLSLVDIAAGGWHSTALTIQGEVFP

SEQ ID NO: 8755 - protein, 468 aa, Pseudomonas putida KT2440
MTQTSPIATDEPHLQRNLTNRHIQLIAIGGAIGTGLFMGSGKTISLAGPSIIFVYMIIGFMLFFVMRAMGELLLSNLNYKSFIDFSADLLGPWAGYFTGWTYWFCWVVTGIADVVAIAAYTQFWFPDLPQWIPALTCVGLLLSLNLVTVKMFGELEFWFALVKIVAILGLVATGLYMVITGFTSPSGRTAQLANLWNDGGMFPHGLMGFFAGFQIAVFAFVGIELVGTTAAEAKNPERTLPRAINSIPIRIIVFYVLALIAIMAVTPWRDVVPGKSPFVELFVLAGLPAAASIINFVVLTSAASSANSGVFSTSRMLYGLSQEGDAPKAFEKLSSRSVPANGLYFSCTCLLLGAVLIYLVPNVVEAFTLVTTVSAVLFMFVWTLILLSYLKYRKDRAALHQASNYKMPGGRFMCYVCLSFFAFILVLLSLEADTRSALVVTPIWFVVLAVTYQLVRSRRHPRTAVRNG

SEQ ID NO: 8756 - protein, 351 aa, Oceanobacillus iheyensis HTE831
MKAAVWYGKHDIRVENKEEPIIKPGKVKIKVAWTGICGSDLHAYHGAEGVVQVGEPHPVTGEMAPLTLGHEFSGVIHEIGEGVSGLSVGDRVAIEPAIKCGKCENCVRGNYNLCEHNGFVGLQSDGAFAEYAIVDPHMVHKLPDNISFEEATAIEPTAVSFHALKLSNMKAGDTVAVFGVGPIGLTAILCAKAAGASRIYAIDVSNERLEMAQKLGATTVINAIEENAAEKIYAETGSGVTIAFDCAGAEATVNSAIDSLAKGGQLVIVSIIPEPIKVNLLQANLKEINILATIGYRDVYKDVIAMVESGQLDLKPIITKKIGLDDIIEEGFHALTNDKSQAKILVSPTGV

SEQ ID NO: 8757 - protein, 246 aa, Oryza sativa
  unsure (1)..(246): unsure at all Xaa locations
MAAKQSLYPEVNQSHPDLNTAFLANPNRAATASPGGSLYPSVDPQQLAENLFPDAADDAAXXPPPTTEEALVAVPGAQLHLVDPDRSMDLGAGTLSVVRLRQGDHSVAVLARLQEPVQWPLTRDVAAVKLDTAHYFFSLHVPHTDHEDDDAEGAEAEKDADGEAALSYGLTVASKGQEAVLAQLDKVLEEYTTFSVKQVEPAAKEKSEGMDTKAVTENTPEEAVGERREWGEEQSXAFWTTIAPNX

SEQ ID NO: 8758 - protein, 510 aa, Zea mays
MEATADSLPWAAQCAGAALFAAALCVTALGVVLVFLRRWPWCSCHVCRAYLTGSWARDFTNLGDWYAHLLRESPTGTIHVHVLGCTVTANPANVEYMLRTNFDNFPKGKAFAALLGDLLGGGIFNVDGHAWRHQRKMASLELGSVAVRSYAFGIVAQEVESRLVPVLAAAADAGAVVDLQDVFRRFAFDTICKISFGLDPGCLEREMPVSRLADAFDVATRLCAMRGAAASPLVWRAKRLLNVGSERELREAIALVDELAAAVIRERRKLGVVGSHDLLSRFMASAGAGDGDDKYLRDIVVSFLLAGRDTVSSALTTLFMLLSKNPGVVAAMRAEAGDGDGDGDSAPLTYEHLKRLHYTHAVLYENMRLFPPVQFDSKFCAGPDVLPDGTYVAGGTRVTYHPYAMGRMPRIWGADHGAFRPDRWLTGAGASFVPESLYRYPVFQAGLRVCLGKELAVTEMKVVAVAVVRAFDVEVVGDSGATACAPKFVSGLTASISGGLPVRVRRRVVR

SEQ ID NO: 8759 - protein, 341 aa, Burkholderia fungorum
MVYQIEMAGTGERFEARADESLLQAATSAGVAIPHDCQLGGCGTCRVKVISGTHEYEEFPFGISQEEADAGFMLACQARASSDMVIAAAHVGGDASAPAEIEARVVAVSPLGPGVRHLSIELPEQAELRFNPGQYMNVLLGEGERRSFSMASAAAGSVLDFHIRRVPGGRFTDHMLASLKPGDPLNVELPLGSFRFHVEDYRPLLMVATGTGLAPVKAILESLMDDPDCPPVWLYWGARTEADLYLHDEIQQWGARLYEFQYVPVLSRPGSEWAGRQGYVQHAVCEDFADLSEYAVYLCGSPTMINDARRHFLEKGASINHLYADSFTFQHDAEALANSGT

SEQ ID NO: 8760 - protein, 378 aa, Schizosaccharomyces pombe
MSFEGKTITCKAAVAWGAKEPLSIEDIQVAPPKAHEVRVKVDWSAVCHTDAYTLSGVDPEGAFPIVLGHEGAGIVESIGEGVINVRPGDHVILLYTPECKECKFCRSGKTNLCSKIRETQGRGLMPVGTSRFSCRDKTLLHYMGCSSFSQYTVVADISLVAISHSAPLRSICLLGCGVTTGFGAVTHSAKVESGSTVAVVGCGCVSLAAMQGAVAAGASRIIAIDINADKEVYAKKFGATDFIDSSKVKDLVQYVIDVTDGGVDYAFDCTGNVTVMQQELQFCHKGWGKLCVIGVAAAGKTLDFRPFLVVTGRQVLGSAFGGVKGRSELPNFVDEYMQGHFKVDEYITNEEPLKNINKAFDHMHEGKCIRCVVDMNKP

SEQ ID NO: 8761 - protein, 236 aa, Zea mays
  unsure (1)..(236): unsure at all Xaa locations
MASLDAVRGDLALLILYLNKAEARDKICRAIQYGSKFISNGEPGPAQNVDKSTSLARKVFRLCKFVNDLHALISPPAKGTPLPLILLGKSKNAMLSTFLFLDQIVWAGRTGIYKNKERXAEFLGRIAFYCFLGSNTCTAIIELAELQRLSTSMKKLEKELKHQELYKNEQYRMKLHKSNERLLALVKSSLDIVVAVGLLQLAPKKVTPRVTGAFGFASSLIACYQLLPSPPAKQSK

SEQ ID NO: 8762 - protein, 253 aa, Vitis labrusca x Vitis vinifera
MVRAPCCDKVGLKKGPWTTQEDQILTAYVLQHGHGNWRALPKQAGLLRCGKSCRLRWINYLRPDIKRGNFSREEEDTIIELHEKLGNKWSAIAASLPGRTDNEIKNVWHTHLKKRLTKKLATPDSKGHFTAAASTCDSDSFNSSGKMSPQPSSSEFSSFTDSSTRTMETHSTGVKNEQMEEYSPESFPEIDESFWSDALSSDNSSMASDFPAVADELQLQTPELAYGQISNMMDDGMEFWYDVFIRAGGLQEL

SEQ ID NO: 8763 - protein, 87 aa, Oxalis picchensis
  unsure (1)..(87): unsure at all Xaa locations
GTNXEVMPXQWEYQVGPSVGIEAGDHIWASRYILERITEQAGVVLTLDPKPIDGDWNGAGCHTNYXTXSXXDXGGFEXIXKAIFNLS

SEQ ID NO: 8764 - protein, 687 aa, Emericella nidulans
MASGTSGPAGPPLDPIDLNVSGDRSKRVAYFYDSDVGNYAYVSGHPMKPHRIRMTHSLVMNYSLYKKMEIYRAKPASKFEMTQFHTDEYIDFLSKVTPDNMDAFAKEQSKYNVGDDCPVFDGLFEFCGISAGGSMEGAARLNRNKCDIAVNWAGGLHHAKKSEASGFCYVNDIVLGILELLRFKQRVLYVDIDVHHGDGVEEAFYTTDRVMTVSFHKYGEYFPGTGELRDIGVGQGKYYAVNFPLRDGIDDVSYKSIFEPVIKSVMEWYRPEAVVLQCGGDSLSGDRLGCFNLSMRGHANCVKYVKSFNLPTLIVGGGGYTMRNVARTWAFETGILVGDNLGSELPYNDYYEYFAPDYELDVRPSNMDNANTREYLDKIRTQVVENLKRTAFAPSVQMTDVPREPLVDGMDDEAEAALDDLDEDENKDKRFTKRRFDQYVEKPGELSDSEDEDENAANGVTRKPAHLKRRNQANYRLDLADSGVESGMATPQDASSVADEEMDTGTDVKITEAPGPEPDSEAQGTSSAAEPPSRAGNGSVDEPSEMIVDSKEPPRSVPVSRPVSPKPTDEDTAMEDADMPVPEVNQENTPEASQATQNKPAEGTPASESAVAKLTSQTKASFESNEGRKQLEPETVKEAGLAAVTTETKDKTPEAPRAGALPAVTAEQETTKQGEPSAEAQPEAAKE

SEQ ID NO: 8765 - protein, 484 aa, Oenococcus oeni MCW
MQNWLTKQADLFPERMALFYRGQSWTFAELKKEVERICGHLASLEINSNKRVAILPGNTAASYMTILAIQQIGLQPVLLNFRLSNDELQSQLVDAGLQNVLIDDSLKSRFKEGQKLNVSCLFISELESLKIVPPQIVEDFPNQKIASIMYTSGTTGKAHGVLQTYGNHFYSAVGSAFNLGFDPEDQWLCVVPIFHISGFSIMMRSLVYGMGVVLLSHFDPENVTKLLSSHAISLVSVVPLMLKQLLRLYPKDGYQNSFRAFLLGGEPIDQNTLDICLRKGIKVIQSYGMTETCSQVVALNFQDATRKIGSVGKALFPVQLRIADDKTNEVQLKGPNLAKGYLNDDQRFKSKFTGDGWFKTGDVGLIDEEGFLFIKGRLDEMFISGGENIFPNEIENVYAKLTGIKEIGIIGISDQKWGKVPCAFIVPASSKLPDQEELLSYGRRHMAHYKVPKKFIFVDNLPHTASGKLQHSKLHTIYLENYNR

SEQ ID NO: 8766 - protein, 185 aa, Xanthomonas campestris pv. campestris str. ATCC 33913
MSLNRLLVLVFAGLFSTAAVAAGTSVLDLDYRPLAGKAPINLNRSYGGKVVMVVNTASKCGFTPQYEGLEALNQRFGSRGFTVLGFPSNDFQGQEPGSEKQIQEFCTLTYGVKFPMFEKVHVLGAQATPLYQRLTRETGVAPGWNFHKYLIGRNGHVVAQFPSKVKPDDPQVLAAIERELKAPAR

SEQ ID NO: 8767 - protein, 233 aa, Triticum aestivum
  unsure (1)..(233): unsure at all Xaa locations
GPRVCAFLVEPIQGEAGIIVPEAGYLMKAFNLCKKHNVLFIADEIQTGLCRTGKLLAVDYDGVKPDILILGKALSGGMYPVSAVLANKPVMECIQPGTHGSTYGGNPLGCAVAIAALKVLKEEKLAENAYNLGVKFRQALIDIKSPLITTVRGRGLLNAIVIDDTKMDKTAWHVCLMMKKYGLLAKPTHQNIIRLAPPLCITEEQXMDGVKIIDKVLKEIVSMNVKDIPGHEL

SEQ ID NO: 8768 - protein, 213 aa, Zea mays
MGSSRPAGGCPYPPNWFAKHSSLVPMETTLPMVRGNGRLLPLSLLLLAAADFTTVHGQGQQPEGPYYSRSFNPSMAIVIVVLIAAFFFLGFFSVYVRHCYGDGSSGYSASPAPGGAAARSRRQQRGLDSAVLESFPTMAYADVKAHKAGKGALECAVCLSEFDDDETLRLLPKCSHVFHPDCIDTWLASHVTCPVCREASRLGIAVDAEERPD

SEQ ID NO: 8769 - protein, 130 aa, Glycine max
MVKAVAVLGSSEGVTGTIFFTQEGNGPTTVTGSLAGLKPGLHGFHVHALGDTTNGCLSTGAHFNPNNNEHGAPEDENRHAGDLGNVNVGDDGTVSFSITDSQIPLTGPNSIIGRAVVVHADSDDLGKGIH

SEQ ID NO: 8770 - protein, 397 aa, Pyrococcus furiosus DSM 3638
MEIGVVGKPNVGKSTFFSAATLVDVEIANYPFTTINANVGVTYAITEHPCKELGCTPNPQNYEYREGLALIPVKMIDVAGLVPGAHEGRGLGNKFLDDLRMASALIHVIDATGKTDEEGRPTDFHDPVEDIEFLEREIDYWIYGILKKGWEKFAKRIKLQKMKIETAIAEHLSGIGVTENDVWEAMHRLGLPDDPTAWSDEDLLSFASEIRKINKPMIIAANKADAASDEDIKRLKREGEKRGYIVVPTSAAAELTLRKAAKAGFIEYIPGSSDFKILKEMSEKQKKALMLIKERVLDRFGSTGVQEVINKAVFELLKLIPVYPVQDENKLTDQFGNVLPHVFLMKKGSTPRDLAFKVHTDLGKGFLYAINAKTKRRVGEDYELQFNDIIKIVAVTK

SEQ ID NO: 8771 - protein, 151 aa, Photobacterium leiognathi
QDLTVKMTDLQTGKPVGTIELSQNKYGVAFIPELADLTPGMHGFHIHQNGSCASSEKDGKVVLGGAAGGHYDPEHTNKHGFPWTDDNHKGDLPALFVSANGLATNPVLAPRLTLKELKGHAIMIHAGGDNHSDMPKALGGGGARVACGVIQ

SEQ ID NO: 8772 - protein, 459 aa, Caulobacter crescentus CB15
MTARWTPAAWRAKPAKHLPTDYPDMGAVERVEQTLRQMPPLVFAGEARRLKSQLGEVAEGRAFLLQGGDCAESFKEFHADNIRDTFRLILQMAVVLTFAGGKPVVKVGRIAGQFAKPRSEPIEVQGDVTLPSYRGDIINGMDFNEAERVPDPDRLLKAYGQSAATLNLLRAFASGGYADLYNIHRWTLGFVGDSPQGARYRELSEKISEALTFMSAVGVTPDTQPDLRRVEFFTSHEALLLGFEEAMTRVDSTSGDWYDTSAHLLWIGERTRQLDGAHVEFMRGVKNPIGLKCGPTMEGDDLLRLIDVLNPHNEPGRLTLYGRFGSDKIADRLPRLMKATKSAGRSVVWATDPMHGNTLKASTGYKTRPFDRILSEVKSFVEIAQAEGVHPGGVHLEMTGQNVTECLGGARAVSETDLADRYHTHCDPRLNGEQALELAFLVAEKLKAARDDQRRLAAG

SEQ ID NO: 8773 - protein, 453 aa, Glycine max
MATWYHQKCGLKPLAPVIPRPRTGAALSSTSRVEFLDTNKVVAGPKFQPLRCNLRERNWGLKVSAPLRVASIEEEQKSVDLTNGTNGVEHEKLPEFDPGAPPPFNLADIRAAIPKHCWVKDPWRSMSYVVRDVIAVFGLAAAAAYLNNWLVWPLYWAAQGTMFWALFVLGHDCGHGSFSNNSKLNSVVGHLLHSSILVPYHGWRISHRTHHQHHGHAENDESWHPLPEKLFRSLDTVTRMLRFTAPFPLLAFPVYLFSRSPGKTGSHFDPSSDLFVPNERKDVITSTACWAAMLGLLVGLGFVMGPIQLLKLYGVPYVIFVMWLDLVTYLHHHGHEDKLPWYRGKEWSYLRGGLTTLDRDYGWINNIHHDIGTHVIHHLFPQIPHYHLVEATEAAKPVFGKYYREPKKSAAPLPFHLIGEIIRSFKTDHFVSDTGDVVYYQTDSKINGSSKLE

SEQ ID NO: 8774 - protein, 73 aa, Zea mays
  unsure (1)..(73): unsure at all Xaa locations
DVKNIIIFMGPYFQVQDDYLVCYCDPEFMAKIATDIVDYXVTXLVVHALERADESQTRILFEYYRTERSSLCG

SEQ ID NO: 8775 - protein, 223 aa, Neurospora crassa
MASLKSLLSGFLLLAGAAQALKFDLEATSSHHSNQRRCIRNFVNKDTLVVVTATLDGYKGDGMNVNMHISDSHGNEYGKAKDIAGEQRIVFTSHHDAAFDVCFENYLTAKYVENPRRHVELDIDIGADAKDWSAIQATEKLKPLETDLRRIEELVGEVVNEMDYLRAREQKLRDTNESTNNRVKWFGMATTFLLIALWGWQIMYLRAYFRFVFPSSGANGFSY

SEQ ID NO: 8776 - protein, 54 aa, Zea mays
  unsure (1)..(54): unsure at all Xaa locations
SHNYLLLPYXQSLTLQDSTTDLFYYCSFHMLSFDELTLQLDTSHLQFLMEIANP

SEQ ID NO: 8777 - protein, 451 aa, Vernicia fordii
MAVWALSDCGIRPLPKIYSKPRLAFTSNNPQPTKPPIPRPELRNGSSFKLSSAGLRDKWVVNLSAPLRGGLVEEDEDNFEGNRVISIDESGGEDFDPDAPPPDTLADIRAAIPKHRWTKNPEISLSYVVRNVAVVSGLAAVAAYFNDWAFWSPYWICQGTMLSALFVLGHDCGHGSFSNNPNLDSVVGHLLHYSILVPYHGWRISYRTHYRHHQHAENDESWHPLSEKIYKGLNNVTRTLRLSLPFSLLAYPSYLWSRSPGKKGFHFHPSSDLFVPSEKKDVITSTVCWTAMLALLVGSSFVMGLVQLLKPYGIPYLIFVMWLDLVTYLHHHGHENKIPWYRGEEWSYLRGRLTTVGRDYGWFNKIHHDIGIHVIHHLFPQIPHYHLIEATEAAKPVLGKYYREPKKSGPLPFHLLGSLIRSMKEDHYVSDAGDVVYYQKEPKLSGARCLS

SEQ ID NO: 8778 - protein, 326 aa, Rhizobium leguminosarum bv. phaseoli
MTKFKLEYIWLDGYTPVPNLRGKTQIKEFDEFPTLEQLPLWGFDGSSTMQAEGSSDCVLKPVAIYPDPARTNGALVMCEVMMPDGHAHASNARATILDDEDAWFGFEQEYFFYQNGRPLGFPEQGYPAPQPYYTGVGYSNVGDVAREIVEEHLDLCLAAGINHEGINAEVAKGQWEFQIFGKGSKKAADQIWMARYLLQRLTEKYGIDIEYHCKPLGDTDWNGSGMHCNFSTKYLREVGGKEYFEALMASSDKNLMDHIAVYGPDNDKRLTGKHETAPWNKFSYGVADRGASIRVPHSFIKNDYKGYLEDRRPNSQGDPYQIVRRF

SEQ ID NO: 8779 - protein, 213 aa, Mesorhizobium loti
MLVLPKGVRHMPAYLSRAIQDALVEDVRSIVQQAPLFVPAMPRTGKEMSVRMTNCGPLGWVTDKERGYRYQPTHPLTGEPWPPIPESLLDLWRQVSGYPNPPEACLINFYTADAKMGLHQDRDEADFSAPVVSVSLGDDCLFRVGQTTRDGATKSFRLKSGDVVVLGGEGRLAFHGVDRIYPSTSALLKNGGRINLTLRRVTKPHEECLTSRS

SEQ ID NO: 8780 - protein, 472 aa, Escherichia coli CFT073
MPLNKKDTQGKGVKNASTVSEDTASNQEPTLHRGLHNRHIQLIALGGAIGTGLFLGIGPAIQMAGPAVLLGYGVAGIIAFLIMRQLGEMVVEEPVSGSFAHFAYKYWGPFAGFLSGWNYWVMFVLVGMAELTAAGIYMQYWFPDVPTWIWAAAFFIIINAVNLVNVRLYGETEFWFALIKVLAIIGMIGFGLWLLFSGHGGEKASINNLWRYGGFFATGWNGLILSLAVIMFSFGGLELIGITAAEARDPEKSIPKAVNQVVYRILLFYIGSLVVLLALYPWVEVKSNSSPFVMIFHNLDSNVVASALNFVILVASLSVYNSGVYSNSRMLFGLSVQGNAPKFLTRVSRRGVPINSLMLSGAITSLVVLINYLLPQKAFGLLMALVVATLLLNWIMICLAHLRFRAAMRRQGRETQFKALLYPFGNYLCIAFLGMILLLMCTMDDMRLSAILLPVWIVFLFVAFKTLRRKVN

SEQ ID NO: 8781 - protein, 303 aa, Pseudomonas aeruginosa UCBPP-PA14
MTYGDPAWRPWVLDEERARPFIREALEAGIDFFDSADIYSTGESERILGRALRDFAQREDLVIATKAFFPMSDRPNACGLSRKHLLASVDASLRRLGTDYLDLFVIHRFDPDTPIAETCETLDSLVRVGKVRYLGASSMPAWRFMKMLAFQRHHGLAQFISMQSQYNLIVREDEEDLMPLCREEGIALTPWSPLARGLLAGARSAGTLRTRTDEQAPRWYGGREEVESTLGALEKLAAARGLPPAQLALAWLLGRNGVAAPIVGLSRPHHLEDALAALTLDLAEEECATLEAPLTVRARTPRW

SEQ ID NO: 8782 - protein, 196 aa, Escherichia coli
MPIYQIDGLTPVVPEESFVHPTAVLIGDVILGKGVYVGPNASLRGDFGRIVVKDGANIQDNCVMHGFPEQDTVVEEDGHIGHSAILHGCIIRRNALVGMNAVVMDGAVIGENSIVGASAFVKAKAEMPANYLIVGSPAKAIRELSEQELAWKKQGTHEYQVLVTRCKQTLHQVEPLREVEPNRKRLVFDENLRPKQ

SEQ ID NO: 8783 - protein, 581 aa, Zea mays subsp. mays
MKREYQDAGGSGGDMGSSKDKMMAAAAGAGEQEEEDVDELLAALGYKVRSSDMADVAQKLEQLEMAMGMGGVGGAGATADDGFVSHLATDTVHYNPSDLSSWVESMLSELNAPPAPLPPATPAPRLASTSSTVTSGAAAGAGYFDLPPAVDSSSSTYALKPIPSPVAAPSADPSTDSAREPKRMRTGGGSTSSSSSSSSSMDGGRTRSSVVEAAPPATQASAAANGPAVPVVVVDTQEAGIRLVHALLACAEAVQQENFSAAEALVKQIPMLASSQGGAMRKVAAYFGEALARRVYRFRPPPDSSLLDAAFADLLHAHFYESCPYLKFAHFTANQAILEAFAGCRRVHVVDFGIKQGMQWPALLQALALRPGGPPSFRLTGVGPPQPDETDALQQVGWKLAQFAHTIRVDFQYRGLVAATLADLEPFMLQPEGDDTDDEPEVIAVNSVFELHRLLAQPGALEKVLGTVRAVRPRIVTVVEQEANHNSGTFLDRFTESLHHYSTMFDSLEGAGAGSGQSTDASPAAAGGTDQVMSEVYLGRQICNVVACEGAERTERHETLGQWRSRLGGSGFAPVHLGSNA

SEQ ID NO: 8784 - protein, 133 aa, Kandelia candel
DPLDGFFSSAVANVPFNSANEAAAFANARFDWKETPEAHVFKADLPGLKKEEVKVEVEEGRILQISGERRKEQEEKNDKWHRLERSSGKFLRRFRLPENAKMYQVKASMENGVLTITVPKEEEKKPEVEAIEI

SEQ ID NO: 8785 - protein, 214 aa, Paeonia arietina
IVESVGEGVTDLKPGDHVLPVFAGECKVCRHCKSEESNMCDLLRINTDRGVMLNDGKSRFSINGQPIFHFVGTSTFSEYTVVHVGCVAKINPEAPLDKVCVLSCGISTGLGATLNVAKPKKGSSIAIFGLGAVGLAAAEGARIAGASRIIGVDLNPKRFEEAKKFGVTEFVNPKDYNKPVQEVIAEMTDGGVDRSVECTGSIMAMISAFECVHD

SEQ ID NO: 8786 - protein, 721 aa, Petunia x hybrida
MIAIPQGAKGVLGVSSFMPSISSEEQICKKDANFARNDPQICKKDGNFARNEPQICKKEGNFTRNEPVSVLDTRSPSPSSSSCSYAGKVEGQKEELVKELQPFPLVGLEPEKCSLGFGDLDNLLPELCGADQTLLRWISGDMEDPSVSLKQLLLGGNANGFHGSSGFEASAAGSLVHTDNVSFSGSDVSLNANIEKIGSVIDSNGRPSNGFDYLNANLYAKSLPLPPASSFQEQKLGQKPQSFSPNQALFQNASYGNMFDSSSYDDTNQEQPPSKRHNSGTLGSSVGGLLPKVPFFDPSGDLSMRRQLLGEMQQHFNLLPPQQFQPKPLIVPKLEAACGGGNGSLMVPRHQQQEQQFIYDQIFQASELLLAGHFSNAQMILARLNQQLSPIGKPFKRAAFYFKEALQLPFLLPCTSTFLPPRSPTPFDCVLKMDAYKSFSEVSPLIQFMNFTSNQAILEALGDVERIHIIDFDIGFGAQWSSFMQELPSSNRKATSLKITAFASPSTHHSVEIAIMHESLTQFANDAGIRFELEVINLDTFDPKSYPLSSLRSSDCEAIAINFPIWSISSCLFAFPSLLHYMKQLSPKIIVSLERGCERTELPLKHHLLHALQYYEILLASIDAANVTPEIGKKIEKSLLLPSIENMVLGRLRSPDRMPQWRNLFASAGFSPVAFSNLTEIQAECVVKRTQVGGFHVEKRQSSLVLCWKQQELLSALTWRC

SEQ ID NO: 8787 - protein, 368 aa, Glycine max
MAQPSSSSKPVVPLLKDELDIVIPTIRNLDFLEMWRPFFEPYHLIIVQDGDPNRTINVPEGFDYELYNRNDINRILGPKASCISFKDSACRCFGYMVSKKKYIYTIDDDCFVAKDPSGKDINALEQHIKNLLCPSTPFFFNTLYDPYREGADFVRGYPFSLREGAPTAVSHGLWLNIPDYDAPTQLVKPLERNTRYVDAVLTIPKGTLFPMCGMNLAFDRQLIGPAMYFGLMGDGQPIGRYDDMWAGWCVKVICDHLGLGVKTGLPYIWHSKASNPFVNLKKEYKGIFWQEEIIPFFQSATLSKECTSVQKCYIELSKQVKEKLGAVDPYFIKLADAMVTWIEAWDELNNNTSEEVPSKPTNGAAAAK

SEQ ID NO: 8788 - protein, 364 aa, Buchnera aphidicola (Uroleucon obscurum)
MKTQYRIAVLPGDGIGPEVMREAYKILKILKNNFLLSFEIEEFNVGGIAIDQEGLALPKKTLLGCEKSDAILFGSVGGKKWDNFPIEERPERAALLPLRKHFNLFANLRPAKIYSELKHLSPLRSNIVRDGFDILCIRELTGGIYFGQPSGRRLEKNNIEYAFDTEIYYDYEINRIAHLAFQLAQSRSHKVCSIDKSNVLNSSILWKEIVQKVSKNYPDVDLSHLYIDNAIMQIIKNPNQFDVLLCPNLFGDIISDECAIITGSIGMLPSASLNEKKFGLYEPAGGSAPDIAGKNIANPIAQILSLSMLVRYGMNLKDIADKIDKSVLSVLKKGYRTADISNNNNYLKTNEMGDVIANALISGE

SEQ ID NO: 8789 - protein, 380 aa, Listeria innocua
MKKIILLGATGSIGTQTLTIIRENPEKFQLVAFSFGRNIERGRAIIQEFKPKMVAVWHTRDRVTLESEFPDVKFFNGLDGLREVATYLDGDVLLNAVMGSVGLLPTLDAIEAGKAIAIANKETLVTAGHLVMQAAKEKNISLLPVDSEHSAILQALNGENRERIEKIILTASGGSFRDKTREQLSEVTVKEALKHPNWNMGNKLTIDSATMFNKGLEVMEAHWLFGVDYDDIEVVIQRESIVHSMVQFVDGSFIAQLGTPDMRMPIQYALTYPDRLSIPYEKEFRITDFSALHFEEVNYERFPALKLAYNAGKIGGTMPTVLNAANEIAVAGFLNGQVAFYNIEALVENAMNRHTSISNPNLDTILQVDQETRAYVKTLL

SEQ ID NO: 8790 - protein, 227 aa, Zea mays
LLSADFSSPAGGSDVAEDRISALPESILRGIVSRLPVKDAARTTLLSSRWLPLWRSTPLVLIDALVVPSAGHGGNALSGAVTAVVSQVLEAHPGPFRCVDLTSNSMAAHHAELVRWFYLLATKGVEELIFVNRPWPLDVPLPVAIFSLPFIRRLHLGVWRFPNTAALLSRGVAFPRLQELRLGCMAMDDEDLDFVLARSPVLETLVLYTSQGQVNLGISSSSLWSVQ

SEQ ID NO: 8791 - protein, 761 aa, Oryza sativa (japonica cultivar-group)
MVRFFCFSSSTSTTHHRAKEHFLPAEQVILGASQKDTMLAVSQMDSQDQTVKSNAGSASPNQLTDVNDHSNVSRQYDTSPSSHQECWRSEDLNRYACSDDSKESGHLKKSLSLGNMLHKDHDHHFSEGAECDIIDCDHKGHCSSLKSNSAVGDSAKLNTKGNENAFDALSDLVSPSGDHVVDSDSHYLCYDQTKFPRSQSAIFQNNSNCGTEGSADSEILGPRCRSYEDLCSAVSEKVDYLNSDLCSAVSEKVDYLNSVEPHHSKSNLDVHCAGPSSPDVYERMNFEDNGSIGCSDAADGGQRSTASAEESFVRDGMLSHEYWDNKYVSGHQSVDPVAPYYSGTGDGSHHSNNDGGINEALDQERKDNLWNRDSTPYHKSLVIDASDLKLCDSKDISEELKHNRTGINDNQYFDVDPDELSPRTFSIKRIEDWINQIDIDDGTLVEEQGESSNSVLTKYNEPVAGVPAVRPDAKSPLGMEIAYTYISKLTPTSSSAQLGNLGLVAIPRLSAFLGLRLLNLSGNSIVRITAGALPRGLHMLSLSKNNISTIEGLRELTRLRLLDISYNRISRIGHGLASCSSLKELYLGGNKISEVDGLHRLLKLKVLDLRHNKISTSKGLGQLAANYSSLEAVNLDGNPAQKNVGDEHLKKYLVGLLPNLGFYNKHPIRASGSKEVSDRHTRKISSSHRSDRSGRSDRKSSRLVASTSSYKAQSSRHARSGHASSSFLKNPRGRSMAVAASGPRLMEYGGAGDVQIERKAQ

SEQ ID NO: 8792 - protein, 491 aa, Lycopersicon esculentum
MAAASGQEREVQKSYWIEHTAELTVEAMMLDSKAADLDKEERPEVLSLLPPYEGKTVLELGAGIGRFTGELAQKAGQLIALDFIEGAIKKNENINGHYKNVKFMCADVTSPNLIFSPESVDLIFSNWLLMYLSDEEVKALVERMVIWLKVGGHIFFRESCFHQSGDHKRKNNPTHYRDPSFYTKVFRECHVNAGDGKSFELSLAGCKCIGAYVKNKKNQNQICWTWQKVTSKDDMEFQRFLDTVQYKCSGILRYERVFGQGFVSTGGLETTKEFVAMLDLQRGQKVLDVGCGIGGGNFYMAEKYDVHVVGIDLSINMISFALERAIGLKCAVEFEVADCTKKTYPDCTFDVIYSRDTILHIQDKPALFRSFYKWLRPGGKVLISDYCKRAGPASKEFEGYIKQRGYDLHDVEAYGQMLRDAGFHEVVAEDRTEQFIKVLQKELDTVEKERESFIHEFSEQDYNEIVGGWKSKLIRSSSGEQRWGLFIAKKK

SEQ ID NO: 8793 - protein, 262 aa, Zea mays
  unsure (1)..(262): unsure at all Xaa locations
MASLDAVRGDLALLILYLNKAEARDKICRAIQYGSKFISNGEPGPAQNVDKSTSLARKVFRLCKVLLLLLLLCSRIMVWFRXDSEPVLVLQFVNDLHALISPPAKGTPLPLILLGKSKNAMLSTFLFLDQIVWAGRTGIYKNKERAEFLGRIAFYCFLGSNTCTAIIELAELQRLSTSMKKLEKELKHQELYKNEQYRMKLHKSNERLLALVKSSLDIVVAVGLLQLAPKKVTPRVTGAFGFASSLIACYQLLPSPPAKQSK

SEQ ID NO: 8794 - protein, 358 aa, Glycine max
IRRFPKCLPPPPPSSPLIGSKSKSKSSSKKMQYKNLGRSGLKVSQLSYGAWVSFGNQLDVKEAKALLQCCRDHGVNFFDNAEVYANGRAEEIMGQAIRELGWKRSDIVVSTKIFWGGQGPNDKGLSRKHVVEGTKASLKRLEMEYVDVLYCHRPDTSTPIEETVRAMNHVIDRGWAFYWGTSEWSAQQITEAWAVAQRLDLVGPIVEQPEYNLLSRHKVESEFLPLYTNYGTGLTTWSPLASGVLTGKYKKGVIPPDSRFALENYKNLASRSLVDDVLKKVDGLKPIADELGVPLSQLAIAWCAANPNVSSVICGATKESQIQENMKAIDVIPLLTPVVMEKIEAVVQSKPKRPESYR

SEQ ID NO: 8795 - protein, 254 aa, Adiantum raddianum
DLLKDRSDVQCLHRWQKVLNPNLVKGPWTKEEDEKIAELVNKNGPKKWSVVARSLPGRIGKQCRERWHNHLDPHIKKDAWTPEEEQALIEAHQRNGNKWAEIAKSLPGRTDNAIKNHWNSSLKKKLEFTNLHRPVLDRLKELEGVSSGVGSTIGVSRSDCHTELAERVGASAGFSKPGQSEKAGENSFNRIRDTNRNRHLAGPGALGGSNCLSPFRTESVMLSNQRCSSIRNGSTLLVAARLNQVAAENDVAST

SEQ ID NO: 8796 - protein, 510 aa, Triticum aestivum
LELHRGGGRSRTSGSPGLQEFARDHYREHPNRKKPPPAPTHPPPLAPHPPPPRRTPTPLAPVPTARRPPTASPGADALARVVAASTRVTSLPRRNPNTKRAAKPPQPQTPPAADAGSIADQKLPKPLGAQPAGKAESDAGHKLGKPLGGVLKALIRERDPDKLVSEFVEASTVSSRFREGRRVYDVAVSRLTSLGRQDGIEAIIEAQKPFLETSSEGFATRLIRLYGRASMPSHAAATFHALPPPHKPTMTSTALLAASAEAGNFDGLTAAFQEIPATHPSIVPRAKRYHRTKRALEPKPAPSPPLAVVVLIAEEGGAAPVITPLTALGDLFNKDNREEADAVLVKMMKGKKEPDAKCYNAKLRGLVAEGRTDDAAAVLEGLEKDGPKPDTVSYNELIRGYLKAGRLQEAKKLYDDLGKSHCAANKGTYETLVPHLVQAGDLDCALRYCYEMFSSKRSSRVECGVLQDVVNALVDASRVEEAAKLVDIGRKKYNYSRKGLRRPGRAKGSV

SEQ ID NO: 8797 - protein, 346 aa, Escherichia coli
MKSVVNDTDGIVRVAESVIPEIKHQDEVRVKIASSGLCGSDLPRIFKNGAHYYPITLGHEFSGYIDAVGSGVDDLHPGDAVACVPLLPCFTCPECLKGFYSQCAKYDFIGSRRDGGFAEYIVVKRKNVFALPTDMPIEDGAFIEPITVGLHAFHLAQGCENKNVIIIGAGTIGLLAIQCAVALGAKSVTAIDISSEKLALAKSFGAMQTFNSLEMSAPQMQGVLRDVRFNQLILETAGVPQTVELAVEIAGPHAQLALVGTLHQDLHLTSTTFGKILRKELTVIGSWMNYSSPWPGQEWETASRLLTERKLSLEPLIAHRGSFESFTQVVRDIARNAMPGKVLLIP

SEQ ID NO: 8798 - protein, 202 aa, Medicago sativa
MASHSLMSPSPLTSHSLLRSSFSGVSVKLSPQFSTLSRSKFQPLSVVAAAKKAVAVLKGNSTVEGVVTLTQENESPTTVNVRITGLTPGLHGFHLHEYGDTTNGCISTGPHFNPNQLTHGAPEDEIRHAGDLGNIIADANGVAEATIVDNQIPLTGPNSVIGRALVVHELEDDLGKGGHELSLSTGNAGGRLACGVVGLTPV

SEQ ID NO: 8799 - protein, 456 aa, Bacillus anthracis str. Ames
MVGAGIFMVPSTLAQTASPLGVTLAWLTTGFGVLMLALVFGNLAIRRPDLTTGPQSHAYALFSTPKKKKMAGFSMVWGYWVANWASNVAIITSFAGYLSLFFPIMKDTRLLFSIGSFNVEVGKLITFTICSILLWGTHVILTNGVSGAGKLNFLATTTKVTGFLLFIVVTLFAFEASKFGQWYTPMIDKSGVSHGLLSQVNLAALTTLWAFIGIESAVLLSNRAVSPKTVKRATVAGLLITVAIYLGITILTMGVLHVDTLQASERPLADALNAAMGHGGGKLMALLALTSLFGSILGWILLSSEVPYQAAKEGFFPSFFAKTNKKGSPIYSLRLTNIMSQVFLFSTLSGTIAEAYTFVITVSTLAYLIPYLVSPIFQLKLVATGETYKNEMRARITDGIVAVIALCYALWVIKTGASDIKTFLLGIGLFVIGFAFYPLMNRDQKKNNEKKDGQVA

SEQ ID NO: 8800 - protein, 732 aa, Azospirillum irakense
MKVHQLFKAALATSLCLTAFAGGAMAQAKGAWQNTSLSPDERARLLDAELTLDERISLLHGPMPLPFPGSPPIPEGPSLVPVIFPGVPRLGIPALKETDASLGVTNPMNVRPGDTATALPSGLALASTFNPKLSYDGGAAIAKEAASKGFNVLLAGGANLARDPRNGRNFEYLGEDPLLAGILAGESIRGIQSQNIISTVKHFSLNGQETNRHWGNSVIDEAAHRESDLLAFQIAIERGQPGSVMCAYNLVNGAYSCGNDHLLNKVLKGDWGYKGWVMSDWGAVPATDFALKGLDQQSGQQLDEKIWFGDLLKEAAAAGTIPAERLSDMSRRILRSMFAAGFFDGKPGKPVVDLDAHAAIAKQVADEGIVLLANDKGLLPLAAGSQKIAVIGGFADQGVLSGAGSSQVTSVGGNPVVIPVGGEGMLAAFLRQAYHNSSPLKALKERLPNATIRFNDGRYSAAAAALARQSDIVILFANQWMSEGMDAYDLKLPQGQDALIEAVAEANPNAVIVLQTGGPVLMPWKDKVGAIVSAWYSGQKGGEAIADILVGKTNPSGRLPSTFPASADQYPHPEVPGWNLPEKQQFDVVYEEGSDVGYRRFAAKGMKPLFPFGHGLSYTTFAYDKLKVKGGETLEVSFQVTNTGKLQGKDAPQIYLAGANGQKLQRLIGFEKIDLKPGERRTVTIKADPRLLARFDEQGHQWRIDGGDYDVVVGRSATMTVLSGKAASASVP

SEQ ID NO: 8801 - protein, 477 aa, Glycine max
MYSGSSDGESHDAPQNQRKIPPASSMLWVRNLRRFIGSGAGLGSEALMELETKRILLDIFKEKQKKTAEAATIPTFYKKKPEDGSISHRVQRLAKYRFLRKQSDLLLNADDLDAMWICLRENCVIDDATGAEKMNYEDFCHIASVCTEQIGPKCRRFFSPSNFMKFEKDEQGRIAILPFYLYVMRTVSLTQARIDMSELDEDSDGFLQPHEMEAYIRGLIPNLAQLRDMPAAFVQMYCRIAAHKFFFFCDPHRRGKACIKKVLLSNCLQELMELHQESEEEVTDTEQAENWFSLTSAQRICDMFLALDKDTNGTLSKQELREYADATLADIFIERVYDEHVRRGKSGGGNAREMDFESFLDFVLALENKDTPEGLTYLFRCLDLQGRGYLTTADVHSLFRDVHHKWIEGGNYELCIEDVRDEIWDMVKPEDPLKITLADLLACKQGGTVASMLIDVRGFWAHDNRETLLQEEEPEEE

SEQ ID NO: 8802 - protein, 453 aa, Methanosarcina acetivorans C2A
MNRATPLLENGSSYHGIPVMHVLYFLLILIAPFAGVDLLLFLSFGLFLGLRFSGKFLPCRRDAASLSFSLTLMLFVSAVTKDLQYTYPYYIVLAAFAIAAVGNHISFFTERGFMADLESEKNRKRQRRFSLLWSSIFLSLRIIAAFLAASWIVYWQDLPIPYSFIFFISVIGAVTGSLFESIPTKIDSNIPVPLGAGMTMWIFEDFRYWVPPEKMLVALAFSLFLGAMAYRAKIADVSALLSAALLGVLIIVFSGLPWFLLLLTFFILGGGFTRYKYAYKESIGIAQAKDGIRSYENVFSNSTAALVLAVAYGVFPEQSLPIIYAYMGTVATATGDTLASEIGTTAKGRPRMITTLKLSEPGADGAVSSLGELAAIFGSAIIGVLGYVLGISDNLLLSVLITTAGGFFGTNIDSLLGATLQKRGLLSNSGVNFAATFAGAGISAIIYLLVSSF

SEQ ID NO: 8803 - protein, 400 aa, Pirellula sp.
MWGAATMMGDFVALHLPPRFSTFTMHSSRKLSVLWFVSLFCLSLAFAPASSADDEKKPGDKQESAPAEKAAEVKEAAKSEKPAQKDEDKKPEAKKEEKKPEAKKPEPKKADKKADKAEMKEEKKEDKKPEEKPVVKSVFPDKALESAVRAEVFAKRHNDEPITAEDVAKISRVVGTGKGIQSLEGLQHCKSLMLIDLADNKIEDLSPIADLKRLQSVTLANNKIASLDPVAELVAMQLLDVSGNELTSLDPLAKMSNLRTLYVADNKLTSLDPLAGLTKIWSLDAAGNELTSLDPVAKLGWLTTLEISDNKITSLAPLTSLKDLDMLIAPGNPFANLKPLVDMCRADVEGDRRFAPYLNVYLSPAQMKHADWSDDLAALKQLGVRLHEYERKKSGESSNP

SEQ ID NO: 8804 - protein, 429 aa, Pseudomonas fluorescens PfO-1
MPLNMTASHGWNSGYRGIGIAHCNILPHSTFSQSRPNAEPASAVQATNLCWSWGWLCVKKPAATVPALFCRRRSYSMSQWPDTRILDLFGIELPIIQGPMAGATNSSMVIAACNAGGLGSMPAAMLTIEQLREELKTIRQGTNKPFNVNFFCHQPPAADEQKARDWKNLLEPYYRELGVDFDAPTPVSNRAPFDTAACEVLEEFRPEVVSFHFGLPEKTLLDRVKATGAKIISSATTVDEAIWLEQNGCDAIIAMGYESGGHRGMFLSDDLSSQVGTFALVPQVVDAVSVPVIAAGAIADARGVAAAFLLGASAVQVGTAYLFTPEAKVSASHHKALRTAKESETAVTNLFTGRPARGILNRVMRELGPMSDKAPAFPLAGGALMPLRAKGEAEFSNLWAGQAFTLGKDLGTAELTRQLAEGALAKLTR

SEQ ID NO: 8805 - protein, 220 aa, Oryza sativa (japonica cultivar-group)
MASTTAAAEDHKGKRPLPPEEADEAAAAPPPAAAEEEGEKLVLVSDDGVEVLASVAAARVSKTLRGMIEDECATGAIPIAGVHSDVLALLVEYCERHAPHYDPEASDRDRYPFPPFPVELPPTASSIKPVTFVDPDADPHGLKAFDKKFLDVDNSTLFEIIMAANYLNIEELLDDACTAVADKMRGKKPEEIRDIFEIENDYTPEQEAEVRRENAWAFED

SEQ ID NO: 8806 - protein, 214 aa, Paeonia suffruticosa subsp. spontanea
IVESVGEGVTDVKPGDHVLPIFTGECKECRHCKSEESNMCDLLRINTDRGVMLNDGKSRFSINGQPIFHFVGTSTFSEYTVLHVGCLAKINPDAPLDKVCVLSCGISTGLGATLNVAKPKKGSTVAIFGLGAVGLAAAEGARIACASRIIGVDLNPKRFDEARKFGVTEFVNPKDYNKPVQEVIAEMTGGGVDRSVECTGSIMAMMSAFECVHD

SEQ ID NO: 8807 - protein, 394 aa, Synechocystis sp. PCC 6803; identical to SEQ ID NO: 1743

SEQ ID NO: 8808 - protein, 535 aa, Cytophaga hutchinsonii
MSNQTIQTPTTNGMPSGIPFIVGNEAAERFSFYGMRAILAVFMTSYLHMTESTATEWAHTFNSAVYFTPILGAFLADIFIGKYRTILYLSVLYCFGHLVLALNESKDGLFWGLTLISIGAGGIKPCVSAHVGDQFGIKNKHLIERVFSIFYFAVNFGSLFSTLLIPYLLEHYGPAYAFGLPGILMFVATFIFWSGRNKFVHVPPFGKAYFKTVFGKEGLSAIGRLIFIYAFIAIFWALYDQHASTWVYQSKSAFLNKDINLFGLVEFTLLPSQIQAANPVLVLVLIPAFAFFIYPALNKIITLKPLIKILLGMFMCVLAFLVAAYIEKRISSGIETSVWWQFLAYLILTMAEVMVSITALEFSYTQAPNQMKSTVMGIFMFSISLGNILVAVISNYNNLHEEVKTVEIGTKTYISIKDYTPVKGEKIEFEDGTGLFILQQNSKTSLMDTIPLGGTYLVGDVDAVSNRFTLEDNGWHAIQTIKKSELPKGYKVVFHRFKHQSYFYMYALLMFVTAVLFIGVALKYKGKTYIQGEAV

SEQ ID NO: 8809 - protein, 177 aa, Triticum aestivum
  unsure (1)..(177): unsure at all Xaa locations
MLELRLVQGSLLKKVLEAIKELVTDANFDCSGTGFSLQAMDSSHVALVALLLRSEGFEHYRCDRNLSMGMNLGNMAKMLRCAGNDDIITIKXADDGSDTVTFMFESPNQDKIADFEMKLMDIDSEHXGIPDSEYQAIVRMPSLEISRICQDLSSIGDTVINSVTKXEGVKFSTAGDI

SEQ ID NO: 8810 - protein, 250 aa, Chloroflexus aurantiacus
MLLDLSGRVAIVTGGSRGIGRATAERLAGSGAAVVVNYRGNAAAAEATVAAITAAGGTAIAVQGDVSQPADVEQMVKTTLERFGRIDILVNNAGITRDTLLLRMKESDFDEVIATNLRGVFLCTRAVLRPMTKQRFGRIINITSVVGLTGNVGQANYAAAKAGILGFTKSTAREMASRGITVNAIAPGFIETEMTEALNEEARKAILATIPLGRFGQPAEVAGLVCFLASDAGAYISGQTLTIDGGMVMS

SEQ ID NO: 8811 - protein, 1123 aa, Neurospora crassa
MQTAKGKAEALGRKAKLASSYQELLDEFSSKDLRSVGNYTLGRLIGKGSFGKVYLATHKLTNGSKVVLKSANKDDTNLAREIHHHRQFVHPHIARLYEVVVTENLVWMVLEYCPGDELYNYLLQHGKLPVDKVQRIFAQLVGAVCYVHRQSCVHRDLKLENILLDKHENVKLCDFGFTREYEGSAKYLQTFCGTICYSAPEMLKGEKYAGEKVDVWSLGVILFALLCGELPFDDDDEQVTRRKILGEEPVYPDTLPEDALSLLKTLLSKRPLIRPSLPDILAHPFLAEYAPQQQEILKLEHPPPFSTPLEKETLHRMRSAGVDTEAVMESVIAQKCDALAGWWTLLIEKEERKAARRERKRREKEENRNSRRFSQASSRLNALATVEESQYAPFGEHSQRPRGRSESRRSGHYPALLIPDMPNLADYPRSATDTRSPIEGDMPPPPLDKDSIRGRSTSSSRHRKPIPPPKEGILRSARSRGSTLHLVTTSEVLDLNGSLQLPDDQNQVKKRPSKTKIFWKNWTHWLFESTRRHKNSQKRASQSTPNLADKAAVQSVKDGKSKDGDIQRPQTTNGYANKASPALSAGSAPFKNSNGCVGLSSSLPSSLPPVPRTYTSGSHKRQSLSPSPVTPRSTMRRASGTAGLRGRKSTSSSVSSIRSMHPTHHHTHSKASSTSSNNSVSTSVSKSALQASRSPHHSVKVLPATPTTVGFPSNIRYVRDRTGPPLGIGSIGGPSLFANSPNDYGSSDDGRLNAAFLGNGGGGRGGLSALNTNTQYYHMPPAPGSPNPFASVNSGGYFAPRAPGNGSPVVGPGGHGGVMFAKRKKNIFKGPVLNFGGSSAGASSRQREERSNSGASGSASASHSRSASASGMGRRSGEITIQEEEEPGEEEEEEQNAHGGGGYTGGGGGGYHNSHWGGSRTGAGWGGLGMAGMEEEEEVEEVDSFSPIITGPGEIVEERIIEDGEEEEEDDDAQESADEGTITDQRSRRSRPRSQDYDEEEEGMDVAGDARRHSNSNSNSNSNPIQTPTRPSAHGVEEEEEEEDHVDVGEEFKGLGYDVGVAITTAPHRLSADGPPLSSSTVRAVPEQQQKRGHRRGWSNGTSSSGGGGSNNNGEGSSGKVSR

SEQ ID NO: 8812 - protein, 466 aa, Aristolochia grandiflora
SGKPVYAIIHRVTGSLIIDFEPVKPYEAPMTAAGALQSYKLAAKAISRLQSLPSGSMERLVDTVVQEVYELTGYDRVMAYKFHDDDHGEVISEVTKPDLEPYLGLHYPATDIPQAARFLFMKNKVRMICDCYAKPVKVFQDEKLSFDLTLCGSTLRAPHSCHLQHMKNMSSIASLVMAVVVNEGEEDDNPDPNQQQQVPKRKRLWGLVVCHNTTPRFVPFPLRYACEFFMQVFAIHVNNEIELENQIREKNILRTQTLLCDMLLRDSPLSIVTRSPNIMDLVKCDGAALMYQNKVYTLGLSPTESQISEINRWLLEYHMDSTGLSTDSLHDAGYPNAPSLGDIVCGMAAVRITSTDMLFWFRSHTAGEVRWGGAKHDPSDKDDGRRMHPRSSFKAFLEVVKNRSLPWKDYEMDAIHSLQLILRGSTKETAAIDTKTVISSQLNNLKLDGLHELQAVTNEMVRLMET

SEQ ID NO: 8813 - protein, 305 aa, Miscanthus transmorrisonensis
IESVGEGVTDVAPGDHVLPVFTGECKECPHCKSAESNMCDLLRFNTDRGVMIGDGKSRFSINGKPIYHFVGTSTFSEYTVMHVGCVAKINPQAPLDKVCVLSCGISTGLGASINVAKPPKGSTVAIFDLGAVGLAAAEGARIAGASRIIGVDLNPSRFEEARKFGRTEFVNQKDHKKPVQEVLAEMTNRGVDRNVECTGNINAMIQAFECVHDGWGVAVLVGVPHKDAEFKTHPMNFLNERTLKGTFFGNFKPRTDLPNVVELYMKKELEVEKFITHSIPFAEINKAFDLMAKGEGIRCIIRMEN

SEQ ID NO: 8814 - protein, 183 aa, Cryptococcus neoformans var. grubii
MVKAVVVLKGESYAHGIVCFTQESENAPVCITGEIKDMDADAKRGMHVHEFGDNTNGCTSAAPHYNPFKKHHGAPTDSERHVGDLGNIQTNSCGAAQLDFSDKIISLYGPHSIIGGSFVVHASTDDLGKGGNEESLKTGNAGARLACGVIGISTCQCYHSKLIVFAAVFLPKRTVTTYSWLNK

SEQ ID NO: 8815 - protein, 341 aa, Actinobacillus pleuropneumoniae serovar 1 str. 4074
MVDTGQVAAEYGRLKSDKKGNAKPKVEEKEEPKPEEVVEDEPTPQEIAEEQAKEQQRIAMIEEQKKQEEQRKEEQRKKAEEKRQQEIEKQEQLKKEQAEEATRKKAAEAARLKAEAEAKNLEAAAKAAEEEKKAKEAKAKAEKEAKEKAEKEAKLKAEKEAKEKAEKEAKLKAEKDAKAKAEKEAKAKAAAEAKAKADAAAKAAQAKNNKALDDFLSGGDIGGGSSKGGNKNTAGSQGNGNAKGIGDGRGTADTGYAQLIKKKLARTYRVDPSFSGRECQVKIFIDPAGNITNHQVLSGPDDICRAAVTAITSARNVPRAPNEETYNKYKSPIIKFGLKVL

SEQ ID NO: 8816 - protein, 189 aa, Lactuca sativa
MGSGGRATQRDNSGNKVVKRAPSSKPPFTLSDIKKTIPPHCFNRSLLRSSSYLFVDLFFSFFFYYVASTYIIHLPTPLSYVAWVVYWILQGCVQMGLWVIGHECGHQAFSDYTWLNDTIGYFLHTSLLAPYFSWKYSHRRHHSNTASLEHDESFVPKKKSSLNSFARLLNTPPGRFFRLVILCTIGWLL

SEQ ID NO: 8817 - protein, 471 aa, Oryza sativa
MPFALLLALLIPILLHFVIRRKYSSYNLPPGSLGFPVIGQSISLLRALRSNTDYQWYQDRIKKYGPVSKMSVFGSPTVLLTGPAANRFVFSNQDLIITETKAANALIGRSILTLSGEELKQVRSALQGYLRTEMVTKCIRKMDEEVRRHIDLNWVGQKTVTVAPLAKRLTFDIICSVIFGQGAGPIREALAADFKKMVQAMLSIPVNIPFTKFNKGLSASRRVRKVLRQIARDREAALQQGHSSSADDFFTYMLVLRSEGTQEDIVDNAILLLLAGYETSSVLITFLLRYLANEPDILGKITEEQEEIARYKGPDEPLTWDDVSRMKYTWKVAMETLQTVPPIFGSLRTAIKDIEYQGYHIPKGWQVFTAIIITHLDANFSDDPNKFNPARFHNQSSVPPYCFVPFGGGPRMCPGNEFARTETLVAMHYLVRQFRWKLCCKDEGYRKDPVPMPLELPIELETRSSPWICLK

SEQ ID NO: 8818 - protein, 217 aa, Oryza sativa (japonica cultivar-group)
MAGRVVRSCVQTGLKAVNSVLGLAGMAVILYALWMLRAWYRDVADLHYRLPVPWFIYTFIGLGVFMCLLTCSGHIAAETANSHCLSCYMIFVFIIIILEGAITTDVFLNSNWEEDFPDDPSGKFEEFKDFIRSNFEICEWIGLSVVAAQVLSIVLGMVLRALGPDRESDYDSDDDPSVPARLPLLRNQYQHGINYSEHTLPQSSDSWSLRILDKANK

SEQ ID NO: 8819 - protein, 107 aa, Glycine max
  unsure (1)..(107): unsure at all Xaa locations
RALYSIGTELTRDDRRKLYSNFGLLYPYGHEELAVCEDIDQVRAVMGKNPPYQSIFAKLSYGXESQMLDKAFYEEGXVKRLCLXFEQQVHPFSSDYHKFLPPCSEPS

SEQ ID NO: 8820 - protein, 379 aa, Streptococcus mutans UA159
MSNLFQNYTRADLEFIKAEGNYLFDTQGKKYLDFSTGIGVTNLGFHPQVQVALQKQAEQIWHTPNLYQNSLQEEVAAKLMAGKDYLAFFCNSGAEANEAAIKIARKATGKQEIITFQNSFHGRTFGSMSATGQDKIKVGFGDAVPHFHYAVFNDLNSVKALVTENTAAVMLELVQGESGVLPAEQDFVTALADYCQKNGLLLIIDEVQTGMGRTGKLYAFQHYGIEPDIFTLAKGLANGVPVGAMLAKKQFGSAFGPGSHGSTFGGNKLAMAASSAVLDIMTKAGFLEQAWENAHYLQEQLTSALQVADTVTQVRGLGYMIGIETTADLGQLVKATRDRGLIVLTAGTNVIRLLPPLTLTKDEIDQGIMILQEVFEQHN

SEQ ID NO: 8821 - protein, 250 aa, Oryza sativa
  unsure (1)..(250): unsure at all Xaa locations
HEALSPTAPRPRPPAPGGRREGERERERVGASRSAAMAALAVVVAVVAAACLLLCAEAVWLDLPQSGTKCVSEEIQSNVVVLADYALMYESHPSSHPTIAVKVTSPYGNTLHHNENATVGQFAFTTSEAGNXKQEXYLACFWIDSAEKGSGISINLDWKIGIAAKDWDVIAKKEKIEGVELELRKLEVAVQSIHQNMIYLKAREAEMRTVSEKTNARVAWFSILSLSVCIVVSILQLWHLQGYFQKKKLI

SEQ ID NO: 8822 - protein, 376 aa, Xylella fastidiosa Dixon
MLKKHLFIVKPIEPTNHTGTGKGETQLKRSLTARQLVMLGIGAVIGAGIFVLSGHAAAEYAGPAVVLSYILAGIACALAGLCYAEFAAMLPVSGSAYSYAYATLGEFTAWFIGWNLVLEYMFSASTVAVGWSGYLNSFLSSFGYGLPASLSSAPLDVVDGRLIYSGGLINLPAVAIVAAISGLCYVGITQSAFVNSITVAIKVSVIVLFIAFATRYVNTDNWVPFVPDNVAPGKYGIEGVIRGAAVVFFSYIGFDAVSTTAGEAKNPQRDMPIGILGSLAICTVIYIVFSGVLTGLMHYSQLDTPKPVATALETYPTLSWLKHVVEIGAIAGLSSTMLMMLMAQPRIFYAMSQDGLLPKLLSKVHPKFQTPHVGTL

SEQ ID NO: 8823 - protein, 367 aa, Nostoc punctiforme
MLKAQLRKNMPFFCQMKKSILAVGILLVSSMFPIKVSAAIFDKIFVFGDDLSDTGNFFNATGQTSPSSPPFYQGRASNGPIWIDYLSQYLGLNPTPYTAVLGGASSSQGINYAYINATTGTANLFANLTSDPLLALGLQQEINAFTTTNPTADPNALYIVWAGAADYIPVTNSFQPYQTPTQTISNLSQAINSLVKVGAQNIFVPNLPDLGKNPYIQDTPLATPLNTLTSEHNADLAKLINIQNQSLDNGVKIQLFDVNSLFNAILSNPAKYGFTNVQDSCLDQLDPSKITLCGTQPNIQNQYLFWYSLEPTTAFHKIVADAAYQQLVPVHEPSTGLGLLALGAVSAIFVTRVKYTSRKAKMSQLSS

SEQ ID NO: 8824 - protein, 225 aa, Lactobacillus sakei
EFGVKRIVFSSTAATYGEPKAIPIKESDPQVPTNPYGESKLMMETMMKWADKAYGIKFVALRYFNVVGAKPDGSIGEDHHPETHLLPIVLQVAAGKRDQLSIFGDDYDTPDGTNVRDYVHVLDLADAHILAFEYLKDGHDSNAFNLGSSTGFSNMEIVEAARKVTGKAIPVTMAPRRAGDPSTLIAASDKARETLGWAPKYDNMEAIIETAWNWHLNHPNGYADR

SEQ ID NO: 8825 - protein, 73 aa, Glycine max
AEELTGIEDPILAGQEFLKRGIRTKWVNVIDSVGCGDSFVAAIVYGFIHNMPLVNTLAIANAVGAATAMGCGA

SEQ ID NO: 8826 - protein, 429 aa, uncultured bacterium pCosAS1
MTTDDLAFDRQHIWHPYTSMTQPLPVYPVVEAHGCELTLASGEQLVDGMSSWWAAIHGYNHPRLNAAMKAQIDRMSHVMFGGITHQPAVDLCRRLVAMTPETLECVFPADSGSVAVEVAMKMALQYWHAKGESRQRFITFRNGYHGDTFGAMSVCDPDNSMHSLWKGYLPENLFAPAPQSRFDGAWDEMDMVGLAPLMAAHRHEIAAVILEPIVQGAGGMRMYHPEWLKRIRRMCDREGILLIADEIATGFGRTGKLFACEHAGITPDILCLGKALTGGTMTMSATLTTRQVAETISNGEAGCFMHGPTFMGNPLACAVASESLALLESGEWQDQVAAIESQLQEELAVARDSEFVADVRVLGAIGVVETTHPVNMAALQRFFVARGVWVRPFGKLIYLMPPYVIRPDQLSKLTRAVVDAVQAPAHFTR

SEQ ID NO: 8827 - protein, 439 aa, Brassica rapa
KYHHSYTFFFVILVLFPHAFSTNTLSSNEALTISSNKTLVSPGDVFELGFFKTTTRNSQDGSTDRWYLGIWYKTTSDKRTYVWVANRDNPLRNSMGTLKISHASLVLLDQSDTTVWSTNLTGVAHLPVTAELLANGNFVLRDSKTNDLDRFMWQSFDFPVDTLLPEMKIGRNRNGSGKEKILTSWKSPTDPSSGDYSFILETEGFLHEFYLLNNELKVYRTGPWNGVRFNGIPNLQNWSYIDNSFIDNNEEVAYTFKVHNNNNMIHSRFRMSSTGYLQVITWTKTVPQRNMFWSFPEDTCDLYKVCGPYAYCDMHTSPTCNCIKGFVPKNAGRWDLRDMSGGCVRSSKLSCGEGDGFLRMSQMKLPETSEALVEKRIGLKECREKCVRDCNCTGYANMDIMNGGSGCVTWTGELVDMRKYDAGGQDLYVKVAEASLVPS

SEQ ID NO: 8828 - protein, 159 aa, Burkholderia fungorum
MTSIYSFSARTLGGEEVSLEQYSGKVLLIVNTASECGFTPQYAGLQKLYETYAARGLAVLGFPCNQFGKQEPGDAAQIGSFCEKNYGVTFPMFDKVDVNGANAHPLFRYLTGEAPGVLGLEAIKWNFTKFLIDREGNVVKRYAPLTKPEAITEDIEKLL

SEQ ID NO: 8829 - protein, 465 aa, Bacillus subtilis subsp. subtilis str. 168
MKGSVFRKKSIQDLIAATSGEKSLKRELGAFDLTLLGIGAIIGTGIFVLTGTGAVTAGPGLTISFVVAALACLFAALSYAEFASSVPVSGSVYTFTYATLGELMAFIIGWDLILEYMLAVSAVSVGWSGYFQSFLSGLGIHLPVALTAAPGAVKGTFTLFNLPAFVIVMAITYLLYLGIKESKRVNNIMVILKILVVLLFIAVAAVYVKPHNWQPFMPMGFGGVFSAAALVFFAFIGFDAVSSAAEETKNPAKDLPKGIIFSLLVCTILYVTVSAIMTGVIPFAQFAGVDHPVSLVLQSAGQNWVAGIIDIGAVLGMTTVMLVMLYGQTRVMFAMSRDGLVPGSLSKVHPKHKTPYVATWFFGTMSALLGSLVPLDELAKLVNIGTLSAFVLISVAVIVLRKKQPDLPRAFKCPGVPVIPGLAILFCLFLILNLGWVTIVRFLVWLLIGLVIYFLYSRKHSKLNQ

SEQ ID NO: 8830 - protein, 81 aa, Glycine max
VPAYASIFNKLGFGESQMLDKLLYKEEVKRCVMTFEQQFHYGVFYAYVKLREQEIPNVMWISECVAQDQKARINDGIVFTF

SEQ ID NO: 8831 - protein, 331 aa, Oryza sativa
MAPASKAERKAVLDAGAWMFNVVTSVGIIMVNKALMATHGFSFATTLTGLHFATTTLMTLVMKWLGHIQPSYLPLPELVKFVFFANLSIVGMNVSLMWNSVGFYQIAKLCIIPVLCILEILFDKVRYSRNTKLSIVLVLVGVAVCTVTDVSVNSRGLLAAVIAVWSTALQQHYVHHLQKKYSLGSFNLLGHTAPAQAASLLILGPFVDFWLTNRRVDTFNYTTIVTFFIVLSCTIAVGTNLSQFICIGRFTAVSFQVLGHMKTILVLTLGFLFFGKEGLNFHVVLGMMLAVIGMIWYGNASSKPGGKERQVYSVPSEKTQKSSQSELDQKV

SEQ ID NO: 8832 - protein, 429 aa, Acidithiobacillus thiooxidans
MTTHIQKPATGSPLTLLNGVLQVPDQPIIPFIEGDGIGCDVTPAMRSVVDAAVAKVYGGQRQIAWMELFAGQKAVQLYGEGQYLPDETMAAIREYKVAIKGPLETPVGGGIRSLNVAMRQDLDLYVCLRPVRYFEGTPSPMRHPEKVDMVIFRENSEDIYAGIEWPAGSPEAEKIIRFLREEMGVTKIRFPDSSAIGIKPVSTEGSERLIRRTIQYALEHGKPSVSLVHKGNIMKFTEGGFRDWGYALAEREFAGRVFTWRQKAAISKAEGKAAGQKAEQQAIADGKLIIKDVIADNFLQQILLRPEDYSVVATLNLNGDYVSDALAAEVGGIGMAPGANLSDTHAIFEATHGTAPDIAGQGKANPSSLILSAVMMLEHLGWGEAAQAIVAAMNATIAAGEVTGDLAALRGDVPALSTTEFTAALIRRF

SEQ ID NO: 8833 - protein, 1033 aa, Oryza sativa
  unsure (1)..(1033): unsure at all Xaa locations
MVYREEITPVALGLCMVAAVLQHSMAKHQYMLQSQELHLVLSSRMNTVNALFSHTGAATRRGRIGGGGGRPFLVLVQQLLALTLVLHEAIDVPDAHTVTRSPPSGLAVVVAEMPAKYLQMLGEERRPELHRQQAGCVTGILQAFDRRYPLAAHHSHNRLLPPAHALSSSPSVGEERTRYSSQIVLDKNMSKSWIDNQRVTVELSQGSYSSSSCSSSSSLDGNRSGQQDLSSTDRMLFPEKPFKSSPKLKSSSDSDCGVDLRNLVKDSIYRDTRDFSIRTFTKEAEKDHLFNCGDPPRIFQEKNKGTMDIDESLRVLAKLRNPSESVQQPRLSYDAPRFSCEGRXXSASKLREVPRLSLDIKESPLRNREIDVRPKPSMTDEDRRSSIKHNACKRLPSVVAKLMGLEDLPEHKDNTAISSQVSKSVTERSEEPTMLRPLSLSSQNEATPRQQRNLDATIKNVPNSKFPVETAPWKXXRRRLCYLENCRRDQRELMEKSNMXASVYSEIEKRLKDLDFQQSNKDLRALKQILDSMQAKGLLQNKKREEHVTDVNLRLNSTSNTKQAPEGTPSFTTEEDSTTERSFKSPIVIMKPAKSAESDVTEDSAVGPLGGLSELPQLRTANSADKRKSSKNTREAVEQHTKSSSRAPTPQHLASFDKRANGRNEEISRKQKQRENNGSLLKHKNSTSPRVQQKKPDSERRARPPIPSPDSSKNQRPVERSHLDSVSPRSKFRRKPAQAQGEDFHQNGVSRRTRSRDQEGKCARSDGSISVASELDVEVTSTDRSAEVNILRSQHGTQTPSGRNPQKVKTSYDANKDLPSMDPAATITERPSPVSVLDSSFDQEESFHTSKTTNSSNVDDEHHPSPSEESCKPSEKKSTELPTQPKNSKLANIASLLKKLQQLSVNKDEAPPVDHIAFLCETPSPDHRYVSEILLASGLLMKDLGSGLSQMQLHTSGYPINPDLFFVLEQRKSGWTSKPEGIHQSRSTTNKRAHRKLMFEAVNELLLDKFEKETTLITGVAARDPVMSSGQQL

SEQ ID NO: 8834 - protein, 264 aa, Gerbera hybrid cv. 'Terra Regina'
MENSDVLELDFSCVDRSMSFPDDTGDMSPQRKMGKGKIEIKRIENTTNRQVTFCKRRNGLLKKAYELSVLCDAEVALIVFSSRGRLYEYANNSVKGTIDKYKKACLDPPTSGTVAEANTQYYQQEAAKLRQQIANLQNQNRQFYRNIMGESLGDMPVKDLKNLEGKLEKAISRIRAKKNELLFAEIEYMQKRELELHNSNQFLRAKIVENERAQQHHMSLMPGSSDYELVTPHQPFDGRNYLQTNDLQPNNDYSCQDQTPLQLV

SEQ ID NO: 8835 - protein, 396 aa, Amylomyces rouxii
MATKRNVTSNAPAAEDISISNKAVIDEAIERNWEIPNFTIKEIRDAIPAHCFRRDTFRSFTHVLHDIIIMPILAIGASYIDSIPNTYARIALWPLYWIAQGIVGTGVWVIGHECGHQAFSPSKTINNSVGYVLHTALLVPYHSWRFSHSKHHKATGHMSKDQVFVPSTRKEYGLPPREQDPEVDGPHDALDEVPLLSCIACSFNLPLAGLFISSPMSLVKITPVGLLISTPSVLSTIENQFWDVMSSTAGVLGMIGFLAYCGQVLALLLSSSTMLFPYLNVNFWLVLITYLQHTDPKLPHYRENVWNFQRGAALTVDRSYGFLLDYFHHHISDTHVAHHFFSTMPHYHAEEATVHIKKALGKHYHCDNTPVPIALWKVWKSCRFVEDEGDVVFFKN

SEQ ID NO: 8836 - protein, 131 aa, Glycine max
MATAVTASATAATRFTRLAGVALRRSSCRPHTAVRFQRPGLTTTALLRPTELNPKDQGQPETLDYRVFLVDGADRKVSPWHDVPLRAGDGAIHFIVEIPKESSAKMEVATDEAYTPIKQDTKKGNLRYYPY

SEQ ID NO: 8837 - protein, 394 aa, Zea mays subsp. mays
  unsure (1)..(394): unsure at all Xaa locations
LGAARRARLPPGEMGWPLVGGMWAFLRAFKSGKPDAFIASFVRRFGRTGVYRSFMFSSPTVLVTTAEGCKQVLMDDDAFVTGWPKXTVALVGPRSFVAMPYDEHRRIRKLTAAPINGFDALTGYLPFIDRTVTSSLRAWADHGGSVEFLTELRRMTFKIIVQIFLGGADQATTRALERSYTELNYGMRAMAINLPGFAYRGALRARRRLVAVLQGVLDERRAARAKGVSGGGVDMMDRLIEAQDERGRRLDDDEIIDVLVMYLNAGHESSGHITMWATVFLQENPDMFARAKAEQEAIMRSIPSSQQGLTLRDFRKMEYLSQVIDETLRLVNISFVSFRQATRDVFVNGYLIPKGWKVQLWYRSVHMDPQVYPDPTKFDPSRWEGHSPRAGTFL

SEQ ID NO: 8838 - protein, 92 aa, Candida albicans
MAPGERKKSSRKKKDPDAPKRSLSAYMFFANENRDIVRAENPGISFGQVGKLLGEKWKALNSEDKLPYENKAEADKKRYEKEKAEYAKKNSA

SEQ ID NO: 8839 - protein, 331 aa, Triticum aestivum
  unsure (1)..(331): unsure at all Xaa locations
MVSAVLRTILVTGGAGYIGSHTVLQLLLQGFRVLVVDSLDNASEEAIRRVRQLANAPQNSLDFRKVDLRDKEALDQIFSTQRFEAVIHFAGLKAVGESVDKPLLYYDNNLIGTITLLQVMAAHGCKKLVFSSSXNPPGATEPATEDIGYYTPRPEPVGTIIPLHSSNPVCAPPSGDRREDHTALPIHLYRRXPRGPIGQQPLLTPNGPVPNLKQATAVREYVHAVDLADCHTTALNRDSEIIGWEVYNLGTGKGTSVLEMVAAFEKACGKKIPLVYAGRRAGDAETVYAATAKAEKELKWKAKYGVEEMCRDLWNWASKNPYGYGSTDNGH

SEQ ID NO: 8840 - protein, 139 aa, Solanum tuberosum
MSGISQDWEPVVIRKKAPTSAARKDEKAVNAARRSGAEIETVKKSNAGSNRAASSSTSLNTRKLDEDTENLSHEKVPTELKKAIMQARQDKKLTQSQLAQLINEKPQIIQEYESGKAIPNQQIISKLERALGAKLRGKK

SEQ ID NO: 8841 - protein, 260 aa, Zea mays
MANAGGGAAGEGEWLKVAQLRALVQAQDEDHRAKEVDNLTLRRFLRARGHNVDKAAAMLLKSLRWRAEAAPGGGTVREEQVRGELEQDKIYMGGVDRTGRPIIVGLLAKHYSANRDMAEFKSTSTTWPLPFFINQNACVLIPRGQEKFLAIMDLKGWGFANCDVRAYIAAIEIMQNYYPERLGKALMINVPYIFLKVWKTMIYPFIDANTRDKFVFVDDKSLRETLRREIDETQLPEFLGGKMPLVSLKDYAQQPQPVCE

SEQ ID NO: 8842 - protein, 465 aa, Tetracentron sinense
SGKPFYAIVHRVTGSLIIDFEPVKPYEVPMTAAGALQSYKLAAKAIARLQSLPSGSIERLCDTVVQEVFELTGYDRAMVYKFHEDDHGEVVSEITKPGLEPYLGLHYPATDIPQAARFLFMKNKVRMICDCRAKHVKVLQDEKLPFDLTLCGSTLRAPHSCHLQYMENMNSIASLVMAVVVNEEDEEGESSSSEQSQKRKKLWGLLVCHHTTPRFVPFPLRYACEFLAQVFAIHVNKELELENQILEKNILRTQTLLCDMLMRDAPLGIVSQSPNIMDLVKCDGAVLLYKNRIWQLGSTPSEFHIHDITSWLSEYHMDSTGLSTDSLYDAGFPGALALGDGVCGMAAVRITSKDMLFWFRSHTAAEVRWGGAKHEPGEKDDGRKMHPRSSFKAFLEVVKTRSLPWKDYEMDAIHSLQLILRNAFKDVENEGLNTSTIRTQLNDLSIEGTEELEAVTNEMVRLMET

SEQ ID NO: 8843 - protein, 410 aa, Erysimum cheiri
YYHSFTFFFFFVVLVLFPHVFSINTLSSTETLTISSNQTIVSPGNVFELGFFKITGDRWYLGIWYKAISERTYVWVANRDSPLPSSSGTLKISYANLVLLDHSDTPVWSTNVTKPVKSPVVAELLDNGNFVLRDSESNDRNRFLWQSFDFPADTLLPEMKIGRNLKTGHESFLRSWRSPYDPSSGDFSFKLQIHGLPEFYLYEKDFILYRTGPWNGVGFSGIPTMQNWSYFHFVNNFIENREEVAYSFKVTNKTLPSRFTMSSEGSLQMLAMSTTSEWNLFGVLPIEECDLYQICGSYSYCDMKTSPVCNCIKGFYPKNVTAWALGETFDGCVRKSRLSCRGDGFLLMKRMKLPDTSTSIVDKRIGLNECKERCSKDCNCTGFANKDIRNGGSGCVIWTGELRDMRNYVT

SEQ ID NO: 8844 - protein, 305 aa, Miscanthus sinensis var. sinensis
IESVGEGVTDVAPGDHVLPVFTGECKECPHCKSAESNMCDLLRINTDRGVMIGDGKSRFSINGKPIYHFVGTSTFSEYTVMHVGCVAKINPQAPLDKVCVLSCGISTGLGASINVAKPLKGSTVAIFGLGAVGLAAAEGARIAGASRIIGVDLNPSRFEEARKFGCTEFLNPKDHKKPVQEVLAEMTNGGVDRSVECTGNINAMIQAFECVHDGWGVAVLVGVPHKDAEFKTHPMNFLNERTLKGTFFGNFKPRTDLPNVVELYMKKELEVEKFITHSIPFAEINKAFDLMAKGEGIRCIIRMEN

SEQ ID NO: 8845 - protein, 866 aa, Microbulbifer degradans 2-40
MLLSLKNTQLKRSMNMNLKHLFLVALALNIAACNVKEPAATNDNHISYQAAREARLAKVEAEVERLLPLLTLEEKASLVHANSKFSIASIERLGIHEMWMSDGPHGVRYQIERHGWAPAGWTDDNSTYLPPLTTVAASWNPEIAALHGDVLGAEARHRRKDVILGPGVNLARLPLYGRNFEYMGEDPFLASRLAVAEIKAIQENDVAACIKHFALNNQELNRTGVNAKPDERTLREVYLPAFEAAVKEAGVHTIMGAYNEFRGTNANQSKHLVMDILKGEWGYKGVLLTDWNVDINTYDAAVNGLDIEMGTNVDSYDDYMLAQPMIDMIKAGSIPESVLDDKVRRILRVQLSIGMMDKYRLSGERNTAKHHEAARKIASEGIVLLKNENILPLNKNKIKNVLVLGPNADKVHGLGGGSSEVPALYEITPLQGLKQKLGDNVNITVMRARYDGVLMPIASDYVTSRHWTGTPAWNMVRYSDAARTQAIGDSAIVDSAYSSPAGTTKEYVTMTATIKPLKSGEHTLKTSVMGDFELKINGKTTVKHSSTSGDVVTQKIALNGGETYSFEILYSGNKNFTLGWDAPGDLFTAEKEYIAAAKKADVVFYFGGLTHGDDREAIDRPHMKLPNHQDPVISKVLAANPNTVVFLIAGSAVEMPWADKAKAIVWGWYGGMEAGNAYADMLFGDTNPSGKMPITLPKALEDTAPIALNDYNPVESLYTEGVFIGYRWFEKQNIEPLFPFGHGLSYTQFKYNNIKLSSANIKGDQTVTVSATITNTGKVAGAEVVQLYLHDEQASVERPAKELKGFQKVFLKPGESKAVNITLNKRALSFWDENSNDWLAETGKFNVLLGASVSDIRLQTSFQYQQ

SEQ ID NO: 8846 - protein, 336 aa, Streptococcus thermophilus
MAILVLGGAGYIGSHMVDRLVEKGQEKVVVVDSLVTGHRAAVHPDAIFYQGDLSDQDFMRKVFKENPDVDAVIHFAAYSLVGESMEKPLKYFDNNTAGMIKLLEVMNECGVKYIVFSSTAATYGIPEEIPILETTPQNPINPYGESKLMMETIMKWSDQAYGIKYVPLRYFNVAGAKPDGSIGEDHDPETHLLPIILQVAQGVREKIMIFGDDYNTPDGTNVRDYVHPFDLADAHLLTVEYLRKGNESTALDLGSSTGFSNLQILEAACKVTGKEIPAEKADRLRGDPDILIASSEKARTVFGWKPQFDNIDNIIASAWAWHSNHPKGYDDRGLLK

SEQ ID NO: 8847 - protein, 455 aa, Blumeria graminis
MPGQSTPRARPSPQLKLSTPKKSSHTPLELQQTHHLVDRHGISISNIQSAGGGSESSEAHSRSGSFGLLDGRGSVPVSAGSQYSALSFAQNGLRHLQGTPDPSSAVGSLYSERSEIGVGVERDGSLNELDSFARLSLERARTLDVEELDDEGWRIASTENRIQELSSLGEGAGGAVTKCILRGGKTIFALKIITTNPDPDVKKQIVRELGFNKDCANEHICRYYGAFVEPSTATISIAMEFCEGGSLDSIYREVRKLGGRTGEKVLGKIAEGVLNGLTYLHGKKIIHRDIKPSNILLCRDGQVKLCDFGVSGEFGTKGDANTFIGTSYYMAPERITGQSYTITSDVWSTGVTLLEVAQHRFPFPADGTEVQPRAGLIDLLTYIVRQPVPKLKDEPEAGIKWSDNFKYFIECCLEKTPSRRASPWRMLEHPWMIEMQSKRVHMAHFLATVWGWEEK

SEQ ID NO: 8848 - protein, 113 aa, Glycine max
MTNYGTIPTSSTPSTNLEFISRAKQRVKEGLGTRRPWKLMFNFRSFALPAGVGDAVSRVRENISYFQMNYAIVVLIVLFLSLLWHPISLIVFVVLMAAWLFLYFLRDEPLIIF

SEQ ID NO: 8849 - protein, 359 aa, Oryza sativa
MVQCHEVGQPRGERRKVQEEEKHQGQYIDGLSPHRPPLHLISSFPNHSLLLEHTPLFLIIISSLIREELANMHIYKEQEAEPSTGLMMPEPAPVASPGSGGSGGSGSVGAEKIGSRGKIEIKRIENTTNRQVTFCKRRSGLLKKAYELSVLCDAEVALVVFSSRGRLYEYSNNSVKETIERYKKANSDTSNASTVAEINAQHYQQEAAKLKQQITNLQNSNRTLVGDNITTMNHRELKQLEGRLDKGLGKIRARKNELLCAEIEYMQRRETELQNDNMYLKSKVAESERGLQTVNMMGSASTSEYVQNMIHYDPRNFLQFNIMHQPQYYPEQEDRKAFMSGKKYSQCNIVRVHSSTNEI

SEQ ID NO: 8850 - protein, 323 aa, Microstegium nudum
ALSIAGAVQSQKLAVRAISRLQALPGGDVKLLCDTVVEHVRELTGYDRVMVYRFHEDEHGEVVAESRRDNLEPYLGLHYPATDIPQASRFLFRQNRVRMIADCHATPVRVIQDPGLSQPLCLVGSTLRAPHGCHAQYMANMGSIASLVMAVIISSGGDDEQTGRGGISSAMKLWGLVVCHHTSPRCIPFPLRYACEFLMQAFGLQLNMELQLAHQLSEKHILRTQTLLCDMLLRDSPTGIVTQSPSIMDLVKCDGAALYYHGKYYPLGVTPTESQIKDIIEWLTVCHGDSTGLSTDSLADAGYLGAAALGDAVCGMAVAYITP

SEQ ID NO: 8851 - protein, 332 aa, Mesorhizobium loti
MDATVRELSYAQAIQEAMAIAMDMDERVFLMGEDIGVYGGAFQVTGDLVERYGTERVIDTPISELGGAGVAVGAALTGMRPIFEFQFSDFATLAMEQIVNQAAKMRFMLGGEVSVPVVMRFPAGSGTGAAAQHSQSLEAWLGHVPGLKVIQPATPYDAKGMLLAAVADPDPVMIFEHKLLYKMKGPVPEGYYTVPIGKADIRREGRDLTIVATSIMVQKALDAAATLEAEGIDVEVVDLRTIRPMDKQTVIDSVKKTSRLMCVYEAVKTLGIGAEVSAMIAESEAFDYLDAPIVRLGGAETPIPYNPELEKATVPQVPDIISAARDLVKGVR

SEQ ID NO: 8852 - protein, 394 aa, Triticum aestivum; identical to SEQ ID NO: 2106

SEQ ID NO: 8853 - protein, 142 aa, Brassica rapa subsp. pekinensis
KNLGVRPGEALAVNFAFVLHHMSDESVSTENHRDRLLRMVKSLSPKVVTLVEQESNTNTAAFFPRFKETMDYYDAMFESIDVTLPRNHKQRINVEQHCLARDVVNIIACEGADRVERHELLGKWRSRFGMAGFTPYPLSPLV

SEQ ID NO: 8854 - protein, 364 aa, Zea mays
MDRAALTVGPGMDMPIMHDGDRYELVRDIGSGNFGVARLMRNRADGQLVAVKYIDRGEKIDENVQREIINHRSLRHPNIIRFKEVILTPTHLAIVMEYASGGELFERICNAGRFSEDEARFFFQQLISGVSYCHSMQVCHRDLKLENTLLDGSTAPRVKICDFGYSKSSVLHSQPKSTVGTPAYIAPEVLLKKEYDGKVADVWSCGVTLYVMLVGAYPFEDPDEPKNFRKTIQRILGVQYSVPDYVHISPECQDLISRIFVANPSTRITMPEIRSHPWFLKNLPADLVDDSATTTSKQYEEPEQPMQGMDEIMQILGEATIPAAGSRGLNQFLNDGLDLDDDMEDLDSDADLDLESSGEIVYAM

SEQ ID NO: 8855 - protein, 463 aa, Pseudomonas putida KT2440
MQTHKNNLSHGLKSRHVTMLSIAGVIGAGLFVGSGRAIAEAGPATILAYILAGGLVVLVMRMLAEMAVASPDTGSFSTYADLAIGKWAGYTIGWLYWWFWVLIIPIEANIAATIINSWVPQLEIWVLSLVITLLLTATNLFSVKNYGEFEFWLALVKVVAIVSFIALGVCAIFGLLPGAGVSGVSRLWDTGGFMPNGFGAVLSAMLITMFSFLGAEVVTIAAAESDEAGKHISKATNSVIWRITLFYILSIFIVIALVPWTDPRLATEGSYVTVLDTLGVPNAKAIIDFVVLTSVTSCLNSSLYTASRMVYSLSRRGDAPACAQITSRSGTPVVAVLLSTGAAFLAVIANYLVPAKVFGFLMASSGAIALLVYLVIAISQLRLRQRLTAQGKTLGYRMWLFPWLTWGVILFISGVLVLMLFRPDHRLEVVSTMVLAVLVVCSGVLVTRRRARGGAVAGVGQGA

SEQ ID NO: 8856 - protein, 200 aa, Zea mays
SSRVDLQQQQAPGPRIVPHPHAAPPPAKKSRRGPRSRSSQYRGVTFYRRTGRWESHIWDCGKQVYLANRFTGEFFVMAYDRAAIKFRGVDADINFNLSDYEDDMKQMGSLSKEEFVHVLRRQSTGFSRGSSRYRGVTLHKCGRWEARMGQFLAKKYIYLGLFDSEVEAARAYDKAAIKCNGREAVTNFEPSTYHGELPTE

SEQ ID NO: 8857 - protein, 428 aa, Brassica napus
MAQILAASPTCQMKLTKPSPIASSKLWSSVMLKQKKQNSSKLRSFKAMALQSDNSTINRVESLLNLDTKPFTDRIIAEYIWIGGSGIDLRSKSRTLEKPVEDPSELPKWNYDGSSTGQAPGEDSEVILYPQAIFRDPFRGGNNILVICDTYTPAGEPIPTNKRARAAEIFSNKKVNEEIPWFGIEQEYTLLQPNVNWPLGWPVGAYPGPQGPYYCGVGAEKSWGRDISDAHYKACLYAGINISGTNGEVMPGQWEFQVGPSVGIEAGDHVWCARYLLERITEQAGVVLTLDPKPIEGDWNGAGCHTNYSTKSMREEGGFDVIKKDILNLSLRHMEHISAYGEGNERRLTGKHETASIDQFSWGVANRGCSIRVGRDTEKKGKGYLEDRRPASNMDPYIVTSLLAETTLLWEPTLEAEALAAQKLSLKV

SEQ ID NO: 8858 - protein, 754 aa, Clostridium thermocellum
MAVDIKKIIKQMTLEEKAGLCSGLDFWHTKPVERLGIPSIMMTDGPHGLRKQREDAEIADINNSVPATCFPSAAGLACSWDRELVERVGAALGEECQAENVSILLGPGANIKRSPLCGRNFEYFPEDPYLSSELAASHIKGVQSQGVGACLKHFAANNQEHRRMTVDTIVDERTLREIYFASFENAVKKARPWVVMCAYNKLNGEYCSENRYLLTEVLKNEWMHDGFVVSDWGAVNDRVSGLDAGLDLEMPTSHGITDKKIVEAVKSGKLSENILNRAVERILKVIIMALENKKENAQYEQDAHHRLARQAAAESMVLLKNEDDVLPLKKSGTIALIGAFVKKPRYQGSGSSHITPTRLDDIYEEIKKAGADKVNLVYSEGYRLENDGIDEELINEAKKAASSSDVAVVFAGLPDEYESEGFDRTHMSIPENQNRLIEAVAEVQSNIVVVLLNGSPVEMPWIDKVKSVLEAYLGGQALGGRWRMCYSVKSIVGKLAETFPVKLSHNPSYLNFPGEDDRVEYKEGLFVGYRYYDTKGIEPLFPFGHGLSYTKFEYSDISVDKKDVSDNSIINVSVKVKNVGKMAGKEIVQLYVKDVKSSVRRPEKELKGFEKVFLNPGEEKTVTFTLDKRAFAYYNTQIKDWHVESGEFLILIGRSSRDIVLKESVRVNSTVKIRKRFTVNSAVEDVMSDSSAAAVLGPVLKEITDALQIDMDNAHDMMAANIKNMPLRSLVGYSQGRLSEEMLEELVDKINNVE

SEQ ID NO: 8859 - protein, 357 aa, Xanthomonas axonopodis pv. citri str. 306
MSKQILILPGDGIGPEIMAEAVKVLKRIDAQHGLGFQLVYDELGGTAYDKYGSPLADETLERARGADAVLLGAVGGPQWDTIDPALRPERGLLKIRSQLGLFANLRPALLYPQLADASTLKPEVVAGLDLLILRELTGGIYFGQPRGNRTLDNGERQAYDTLPYSESEIRRIAKAGFDMARLRGKKLCSVDKANVLASSQLWRAVVEEVAKDYPDIALSHMYVDNAAMQLVRAPKQFDVIVTDNMFGDILSDQASMLTGSIGMLPSASLDANSKGMYEPCHGSAPDIAGKGIANPLATILSVAMMLRYTFARATAADAIEHAVGKVLDQGLRTADIWSEGTTKVGTVAMGDAVVAAL

SEQ ID NO: 8860 - protein, 532 aa, Neurospora crassa
MADSIRNESTPTTPSPDQMYCHACHHQWQRQGETLQCPACNNATTEIVSNQTSSTTLDTRTTLLTQDHQITPENDPRHFHRRPLPATVEDAPAEDELQPDYSAAATVTESQQPTEVPTSNTETQNANESNGHNDARPQTEANGTSTTSGNTQTSDETNTRGTQEQTSNASNTEAPRSGSRSTNTQHFDIRFIFPPMTFFTTVISEPLTPRSQQQPAGSQPNGQAQSTEQSNEQPNNQQSNASNTSTNVPTPNGSTASGPSPITFFGLHFFTPRPPHAHTAPASNAASNTTQTEGTAQQQSQSNDEQAQASQQQQPQQGPQPATQGQSSPFGSGPVPAGLMNAILSAMFSPLSPLVLGNLNFVNDGVYSQEAFDRIITQLREQHAAQNPGGAPPASQAAIEKLRVKDIDEQMLQGCQDNKAKCVICVDEMTLGDKATLLPCNHFFHGECVTPWLKVHNTCPVCRRSVEVEEAPESKKRKNVAEHEPTGRDGHGIDEAEDEDEQQSAEVAAAIPERQRRPYGPERLRGEGTDCA

SEQ ID NO: 8861 - protein, 129 aa, Zea mays
MAKYNVVQKNKRQCNQDRKRAAHGEPGTGKLKQRTAPVSMSGKRKKKLERRLNRKQKEAAMIKALENNMGDVDMVSVEESSEAAKGKSQVKFSVKKNSRIQIKRLKGKGRKKAKNAKPPAKEKVDAMVE

SEQ ID NO: 8862 - protein, 284 aa, Oryza sativa (japonica cultivar-group)
MDATALAASLVPSWSAVVVLFSYLGYLATAGAVLPGKLVPGAVLPDSSRLHYRCNGTAAAALALLLRFSMPSFLCFLAISCVCSCVTRAGLVSLLLLLVLSALGVYMGWMSPTVIADRGIELLSATFIFSVIWYIVDYFVHEELMTSTWDIIAERLGFMLVFGDLVFIPFTFTIQSVYSLPKDLAGAGELRKKRKKKHTSRENVVQFGDPILLPNIPVHFADMEGTKGRSKVLREVQGDLGRILQACALEDLSLRVLDQKILRSSCIVVEPQHDSSRAIQMKMP

SEQ ID NO: 8863 - protein, 80 aa, Triticum aestivum
GEIQELWSQLGVKIIPVLSRPDDSWNGERGHVQDAFFKNKNIVNPSSTGAVLCGQNEMQEEITSALVADGVSRDKILTNY

SEQ ID NO: 8864 - protein, 240 aa, Ralstonia solanacearum
MTPDLHKLWVYLAATPLLGLTATLVAYVFAYGIYQRLRFNPLANPVLIAVAILATLLTATGTPYKTYFDGAQFVHFLLGPATVALAVPLYHQWPKLRRHAIPLLSGLLAGSLVATLSAVGVAWLLGASPETLRSLASKSVTIPIAMGVSEKIGGSPSLTAVLVMMTGLLGASTTTRLLNLLGIREYSVRGFATGIAAHGIGTARAFQVSPEAGAFAALGMGLNGILTAVMVPLLAAWIPH

SEQ ID NO: 8865 - protein, 473 aa, Hordeum vulgare
GSFGKVKIAEHIITGHKVAIKILNRRKIKSMEMEEKVKREIKILRLFMHPHIIRLYEVIDTPADIYVVMEYVKSGELFDYIVEKGRLQEEEARRFFQQIISGVEYCHRNMVVHRDLKPENLLLDSKCNVKIADFGLSNVMRDGHFLKTSCGRPNYAAPEVISGKLYAGPEVDVWSCGVILYALLCGTLPFDDENIPNLFKKIKGGIYTLPSHLSPLARDLIPRMLVVDPMKRITIREIREHSWFKARLPRYLAVPPPDTAQQVKKLDDETLNDVIKMGFDKNQLTESLQKRLQNEATVAYYLLLDNKLRTTSGYLGAEYQESMDSSFSQISPETPSSASEARQYGSPGFGLRQHFAAERKWALGLQSRAHPREIITEVLKALQELNVCWKKIGHYNMKCRWSPGFFENMMHNNNGFGVESAIIEADGLGDKSTHIVKFEIQLYKTRGDKYLLDLQRVSGPQLLFLDLCSAFLT

SEQ ID NO: 8866 - protein, 396 aa, Pirellula sp.
MLCTLKTSLKRDSKLSVITRSVSKRWSCPELHATALGLSDVPTQPFYRQSTGNPMQSAAVVNYAPEPGSVEIREIDRPEIGSQDVLLEVSHVGVCGSDLHQWTAHHSWPVNYPVVLGHEFGGHIVQLGSDVEGWKEGDRVVSETAAIIDSNNPMSRRGLYNLDPTRKGFGYGVNGAMTRYVRVPSRILHEVPHSLAFEHACLTEPCCVAYNAVVRNARIEPGDRVIVMGPGTIGILCAAMARLCGAEVALVGLESDRHRLNIAEENYGCQGIVGDPTDWANQRDGLGCDGVIDAAGSSVTLEIAMQVVRPAGWISKVGWGPQPLGYNLDPLVQKNVTLQGSFSHNWPIWERVLALLTSGQLNVAPIIGGIWPIDQWQTAFDKMHRGEVVKSVLQPI

SEQ ID NO: 8867 - protein, 149 aa, Zea mays
EREEMAASDVEYRCFVGGLAWATDDHSLNNAFSTYGEVLESKIILDRETQRSRGFGFVTFSTEDAMRSAIEGMNGKELDGRNITVNEAQSRGGRGGGGGGYGGGRRDGGGYGGGGGGYGGGRGGYGGGGGYGGANRGGGYGNNDGNWRN

SEQ ID NO: 8868 - protein, 72 aa, Glycine max
FKQVNDVAVEVLEGDPRNVLCEAVEKHQASMLVVGSHGYGTLKRAVLGSVSDYCAHHAHCTVMIVKKPKHKH

SEQ ID NO: 8869 - protein, 315 aa, Hordeum vulgare subsp. spontaneum
MATAGKVIKCKAAVAWEAGKPLSIEEVEVAPPQAMEVRVKILYTALCHTDVYFWEAKGQTPVFPRILGHEAGGIVESVGEGVTELVPGDHVLPVFTGECKDCAHCKSEESNLCDLLRINVDRGVMIGDGQSRFTINGKPIFHFVGTSTFSEYTVIHVGCLAKINPEAPLDKVCVLSCGISTGLGATLNVAKPKKGSTVAIFGLGAVGLAAMEGARMAGASRIIGVDLNPAKYEQAKKFGCTDFVNPKDHTKPVQEMLVDMTNGGVDRAVECTGHIDAMIAAFECVHDGWGVAVLVGVPHKEAVFKTHPMNFLNEK

SEQ ID NO: 8870 - protein, 154 aa, Pinus sylvestris
MGLLKAVVVLNGAADVKGVVQFTQEGDGPTTVTGKISGLSPGLHGFHVHALGDTTNGCMSTGPHFNPLGKEHGAPTDDNRHAGDLGNVTVGTDGTVEFSITDSQIPLSGPHSIVGRAVVVHADPDDLGKGGHELSKSTGNAGGRLACGVVGLQG

SEQ ID NO: 8871 - protein, 250 aa, Mesorhizobium loti
MLLKGKAVVISGAASPRGIGRSTATLMAEQGARIAILDLDEEQARDAAASLGPEHIGLACNVADLDSCKRAAAEVTEAFGRVEVLCNIAGITQPVKTLDIGPADWDRILDVNLRGVLYLSQAFIPHMRENGGGSIICMSSVSAQRGGGIFGGPHYSAAKAGVLGLAKAMAREFGPDGIRINCVTPGLIQTDITGGKLTDAMRADIIKGIPLSRLGDARDVAGAYLFLASDLASYITGAVIDVNGGMLIHG

SEQ ID NO: 8872 - protein, 378 aa, Phanerochaete chrysosporium
MAFKSLIAFVALAAAVRAAPTAVCPDGTRVSHAACCAFIPLAQDLQETIFQNECGEDAHEVIRLTFHDAIAISRSQGPKAGGGADGSMLLFPTVEPNFSANNGIDDSVNNLIPFMQKHNTISAADLVQFAGAVALSNCPGAPRLEFLAGRPNKTIAAVDGLIPEPQDSVTKILQRFEDAGGFTPFEVVSLLASHSVARADKVDQTIDAAPFDSTPFTFDTQVFLEVLLKGVGFPGSANNTGEVASPLPLGSGSDTGEMRLQSDFALAHDPRTACIWQGFVNEQAFMAASFRAAMSKLAVLGHNRNSLIDCSDVVPVPKPATGQPAMFPASTGPQDLELSCPSERFPTLTTQPGASQSLIAHCPDGSMSCPGVQFNGPA

SEQ ID NO: 8873 - protein, 239 aa, Mesorhizobium loti
MRLYAIGDVHGRLDLLAAMHQRIESELEWKPVRDWRVIHLGDYVDRGPDSKGVIDFLIAARERDPRHLMLAGNHDIGFLDFLRTPEPEGLFMRYGGVQTALSYGVSLTADASWFGKMETMRRGHQALLEAMPPGHVDFLRSLPFSLTFGDFFFCHAGIRPGIPLDKQNPQDLIWIRDVFHDHTGLFPKIVVHGHTPVPEAEVMANRVNVDTLAWQSGMLTAFVVDGADKRILEMAIKGA

SEQ ID NO: 8874 - protein, 374 aa, Zinowiewia concinna
ALSIAGAVQSQKLAVRAISQLQSLPGGDIKLLCDTVVETVRVLTGYDRVMVYKFHEDEHGEVVAESKRPDLEPYIGLHYPATDIPQASRFLFKQNRVRMIVDCHATPVSVIQDAGLMQPLCLVGSTLRAPHGCHAQYMENMGSIASLAMAVIINGNDEEGIGGRNTTRLWGLVVCHHTTARCIPFPLRYACEFLLQALGLQLNMELQLAAQLSEKHVLRTQTLLCDMLLRDSHTGIVTQSPSIMDLVKCDGAALYYQGKYYPLEVTPTEAQIKDIVEWLLAFHGDSTGLSTDSLADAGYPGAASLGDAVCGMAVAYITDRDFLFWFRSNTAKEIKWGGAKHHPEDKDDGQRMHPRSSFKAFLEVVKSRSLPWEN

SEQ ID NO: 8875 - protein, 138 aa, Zea mays; identical to SEQ ID NO: 6633

SEQ ID NO: 8876 - protein, 249 aa, Bradyrhizobium japonicum USDA 110
MLLSGKTAIISGAASPRGIGLATARRFAAEGARVAILDIDAGAATDAAASLGNSHIGLGCDVADKSSCEQAVARVIESFGGTDVLINNAGITQPVKFLEISAADWDRIQDVNLKGILFLSQAVIPHMRGRKAGSIACMSSVSAQRGGGIFGGPHYSAAKAGVLGLAKAMAREFGPDGIRVNCVTPGLIGTDITAGKLTDEMRAKILEGIPLNRLGTAEDVAGIYTFLASDLSAYVTGAVIDVNGGMLIH

SEQ ID NO: 8877 - protein, 303 aa, Zea mays
MRPMASNGMASAPSPFFPPNFLLQMQQTPSDHEHQEQHHHHHHHHEHHLAAPPLHPHHNPFLPSSQCPSLQDFRGMAPIMLGKRPMYGADVQVVGGEEVNGCGGVNEDELSDDGSQAGGEKKRRLNVEQVRTLEKNFELGNKLEPERKLQLARALGLQPRQVAIWFQNRRARWKTKQLEKDYDALKRQLDAVKADNDALLSHNKKLQAELGRTAHSYPAWPCLPLWNLAAGATAKAKGRKREDFSKGQQQNMQAELRGVLSEEDAAAAGAVNGFMMAVPILALKGREAAGGSSELINLNKETE

SEQ ID NO: 8878 - protein, 212 aa, Brucella melitensis 16M
MKDLFDNLNTREIMAPGAVLLRGFALACEESILSAVARVCAAAPFRHMTTPGGYRMSVAMTNCGPVGWVTDRTGYRYSPADPETGKPWPSMPDTFLALAQDAARQAGYPDFTPDACLINRYKPGARLSLHQDKDERNFSNPIVSVSLGLPATFQFGGMKRTDPITKYILHHGDVVVWGGPSRLFYHGILPLKSGEHERLGPFRLNLTFRKAF

SEQ ID NO: 8879 - protein, 502 aa, Daucus carota
MADIAISGEPNFSDLVPTKKGRSRKALKPKTPSSNETNILPVPVSQASPVKKAMTESTGKENEKKKTKKKAAKEAKPQEGDFEKMFEEMQKKLEQMTLEKAKTEEMLKEREEALRRKEEELETRGREQEKLQIEIKKLGKMKEFKPTVNFPLVQAPKEKELGKKEKKKVCPEKKKPSPPYALWLKDQWTEVKKENPDAEFKEISTMLAAKWKTVTAEEKKPYEEKYQAEKEAYLKIVGAEKRENEAMKLLEEEQKQRTAMELLEQYMQFKEETENDKKKKTKKEKDPLKPKHPVSAFFLFMNERRADLVAEKKNVLEVGKITGEEWKNMTEKEKAPYEEMAKKNKNQYLQQMEVYKKKKDEEAASLQKEEEELSKIQKQEAMQLLKKKEKTENLIKKTKEERQKKQKGEKKIVDPNKPKRPASSFLLFSKEARKTISEERPGINNSTLNALISVKWKEISHEEKQLWNEKAAGAMEAYKKEMEEYNKTTAAEESSSSCSGPQ

SEQ ID NO: 8880 - protein, 256 aa, Haloarcula marismortui
MDGGIVRFKMFNAIVSADTLQATLDSVSVLVDECKIHLEEDGLEIRAVDPANVGMVDLRLDAAAFESYETDGGLIGVNLSRLEDIAGMADAGQLVHLDLDEETRKLHISIDGLEYTLALIDPDSIRQEPDLPDLDLSANIVIEGKDIDRSVTAADMVSDHIALGVDATDELFYVDAEGDTDDVHLELTRDDLIDLTPGDAHSLFSLDYLKNMNKAIPKDAEVEMELGEEFPVKMHFSFAEGQGRVTYMLAPRIQSE

SEQ ID NO: 8881 - protein, 366 aa, Pirellula sp.
MSDSFILCSGKTATGTKKVFRRLASMTKCKLEYIWLDGYQPTQSMRSKTKIVEDFSGKVEDAEMWSFDGSSTEQAPGGASDCLLKPVFCLPDPDRLGTGFLVMCEVMNADGTPHRSNGRATIKDDDNDFWFGFEQEYTIFDPETKKPIGFPAEGFPGPQGPYYCSVGAGKAVGREIVEEHLELCLQAGLNVEGINAEVMMGQWEFQIFAKGAAQAGDEIWLARYLLDRTGEKYGMEINYHCKPVKGDWNGSGMHANFSNTTLRTCGSKEVYEAICQAFEPRITEHIDVYGADNDQRLTGLHETQSIDKFSYGISDRGASIRIPIATVEKGWKGWLEDRRPASNADPYMVASAIIATVKTANVPAGV

SEQ ID NO: 8882 - protein, 222 aa, Triticum aestivum
DITVVVGEQSFHLHKFPLLSKSGLLERLIREKIEKGEDSCAIDLSDIPGGAKAFELAAKFCYGVKFELTSSNVVHLRCASEYLEMAEEIAEGNLIAQTENFLTQTVLKSWKDSIKALHTCDDVIDLAEKLQVVKKCGDSVATKSSTDPDVFGWPVAQYGGPTQSPGGSFLWNGISTGARPRNCSSNWWYDDVSCLSLPLYKKVISAMEYRGVNQDIIVGSLN

SEQ ID NO: 8883 - protein, 165 aa, Oryza sativa; identical to SEQ ID NO: 7626

SEQ ID NO: 8884 - protein, 305 aa, Listeria innocua
MKRITIGNSDLTASEISLGCMRMADLSKEEANKVINTALENGIDFFDHADIYGGGKSEEVFADAIDMNATVREKMILQSKCGIRQGFFDFSKEHIISSVEGSLKRLKTDYLDTLLLHRPDTLFEPEEVAAAFTELEKSGKVRHFGVSNQNPGQIELLKKYVDQELIANQLQFSIMHTGMIDTGFNVNMTIDPSLDRDGGILEYSRLHNMTIQAWSPFQYGFFEGVFLDNDKFPELNKTIDKIAAYKGVTNSAIAVAWIQRHPASFQTVVGTMNPGRIADIAKASDVTLSREEWYEIYSAAGNQLP

SEQ ID NO: 8885 - protein, 97 aa, Glycine max
  unsure (1)..(97): unsure at all Xaa locations
MWVTTRMLMHVVVEEVLLGRVGLEHXRCDRNTFMGMNVNSMGKMLKCARDDDIRTMKADDGSDTVTLMCESPTQDKISDVEMMLMDIDSEHLGIQRQ

SEQ ID NO: 8886 - protein, 102 aa, Zea mays
  unsure (1)..(102): unsure at all Xaa locations
EEFKEALADCXEKPEFIPGEQGVIQVAGHSDAVTVVTRIVGXACLKTTVCCIXTGQDIKLSNIETLIAXVLLELPLAHKHKMTNIPGDANRFAIYHIIQSLY

SEQ ID NO: 8887 - protein, 349 aa, Mentha x piperita
MANLNGAASDLRKTFLGVYSTLKSELLNDPAFEWTDGSRQWVERMLDYNVPGGKLNRGLSVIDSYQLLKEGKDLTDDEVFLASALGWCIEWLQAYFLVLDDIMDNSHTRRGQPCWFKVPKVGMIAINDGIILRNHIPRILKKHFRSKPYYVDLLDLFNEVEFQTASGQMIDLITTIEGEKDLSKYSLPLHRRIVQYKTAYYSFYLPVACALLMAGENLENHPTVKDVLIDMGIYFQVQDDYLDCFGEPEKIGKIGTDIEDFKCSWLVVKALELCNEEQKKTLFEHYGKENPADVAKIKALYNDINLQGMFADFESKSYEKITSSIEAHPSKSVQAVLKSFLGKIYKRQK

SEQ ID NO: 8888 - protein, 481 aa, Mycobacterium tuberculosis H37Rv
MVGPRTRGYAIHKLGFCSVVMLGINSIIGAGIFLTPGEVIGLAGPFAPMAYVLAGIFAGVVAIVFATAARYVRTNGASYAYTTAAFGRRIGIYVGVTHAITASIAWGVLASFFVSTLLRVAFPDKAWADAEQLFSVKTLTFLGFIGVLLAINLFGNRAIKWANGTSTVGKAFALSAFIVGGLWIITTQHVNNYATAWSAYSATPYSLLGVAEIGKGTFSSMALATIVALYAFTGFESIANAAEEMDAPDRNLPRAIPIAIFSVGAIYLLTLTVAMLLGSNKIAASDDTVKLAAAIGNATFRTIIVVGALISMFGINVAASFGAPRLWTALADSGVLPTRLSRKNQYDVPMVSFAITASLALAFPLALRFDNLHLTGLAVIARFVQFIIVPIALIALARSQAVEHAAVRRNAFTDKVLPLVAIVVSVGLAVSYDYRCIFLVRGGPNYFSIALIVITFVVVPAMAYLHYYRIIRRVGDRPSTR

SEQ ID NO: 8889 - protein, 347 aa, Zea mays
MSTSTLKEPNVSQSKDVENGKDNSVKSCISKPVLNGNKCANKEQNVLSCCPGAVTNGNEAGNADVEYIDSENLVDLPDVDATLCTLVKRLDSKDWVMTCEALNNVRQLAMYHKERLQELLEPLVPLIVKSVKNPRSAVCKTALMTCADIFKAYGDLLVESIDPLLVQLFLKASQDKRFVCEAAEAALTSMTSWISPLLLLPRMQPYLKNRNPRVRAKASVCFSKSVPCLDMQGVREYGMDKLVQIAATQLSDQLPESREAARNLALELQVLYEKSQASTSDENEGEPSVSQDAESWESFCQSKLSALSAQAILRVTSTTPKEGVASTSNARKEGVTAAPKEGLDVDC

SEQ ID NO: 8890 - protein, 211 aa, Zea mays; identical to SEQ ID NO: 4307

SEQ ID NO: 8891 - protein, 249 aa, Zea mays
LPENRGRNRYTDVLPFDQSRVQLESSTGNDYINASHIEIAGRNLTKFISTQGPLANTIEDFWQMVYENHCPVIVMLTKFDGLKCDEYLPLSKGQAVFGKFTIKITKFRKDGQLLLRGVEIRQDESDEVRSLLHIEYPEWPDHGVPNSSADVRRILKRLYHIPRERPIVAHCSAGIGRTGAYTTIHNTIERILLGEQGAADLVETVKKFRSQRPGMVQTEEQYKCCHHAIRDELEDLVSSSKIEPLSRNG

SEQ ID NO: 8892 - protein, 186 aa, Zea mays
  unsure (1)..(186): unsure at all Xaa locations
MAATRAIAIASNSTCSLLTKKPFLGTHSLLNNLKVSRTSRSYTCRAIYNPQVXVKEEGQPQTLDYRVFFVDQSGKKVSPWHDIPLQLGDGVFNFIVEIPKESSAKMEVATDEPFTXPLKQDTKKGKLRFYPYNIHWNYGLLPQTWEDPSFANSEVEXASGDNDPXXVVEIXXSRRKXXXXLXFNPW

SEQ ID NO: 8893 - protein, 386 aa, Saccharomyces cerevisiae
MRIARIVKHLYQSDDRSFLSNHVLRPFWRKFATIFPLWMAPNLVTLLGFCFIIFNVLTTLYYDPYFDQESPRWTYFSYAIGLFLYQTFDACDGMHARRTGQQGPLGELFDHCIDSINTTLSMIPVCSMTGMGYTYMTIFSQFAILCSFYLSTWEEYHTHKLYLAEFCGPVEGIIVLCISFIAVGIYGPQTIWHTKVAQFSWQDFVFDVETVHLMYAFCTGALIFNIVTAHTNVVRYYESQSTKSATPSKTAENISKAVNGLLPFFAYFSSIFTLVLIQPSFISLALILSIGFSVAFVVGRMIIAHLTMQPFPMVNFPFLIPTIQLVLYAFMVYVLDYQKGSIVSALVWMGLGLTLAIHGMFINDIIYDITTFLDIYALSIKHPKEI

SEQ ID NO: 8894 - protein, 228 aa, Gossypium nobile
  unsure (1)..(228): unsure at all Xaa locations
FTSLCHTDVYFWEAKGQTPLFPRIFGHEAGGIVESVGEGVTHLKPGDHVLPVFTGECGNCRHCKSKESNMCDLLRINTDRGVMLSDGKTRFSXNGKPIYHFVGTSTFSEYTVAHVGSVAKINPAAPLDKVCILSCGISTGLGATLNVAKPAKGSTVAIFGLGAVGLAAAEGARIAGASRIIGVDLNPNRFEEAKKFGCTEFVNPKDHNKPVQEVLAEMTNGGVDRSVE

SEQ ID NO: 8895 - protein, 578 aa, Ferroplasma acidarmanus
MDIFLISFSGMVGSGWLLGVLAGPAYAGPASILTWVVAGVFFIILALVFSELGTLFPYSGSLVRFNEFSHGPVSNFYLGWAYMIGAIATPPVEAAALTGFISSYVPGIYNSSVALLTPLGVIVALALLGLFIIVQYAGVNVFGKSNAVMTWFKMAAIILTIIFVFAFIFHARNFFALSHGFLPYGPSSVFAAMVPAGVIFSYEGFRQGLDYAGETKNPKRSVPLGMISAMLAAMATYIMLQIVFIGAVNWKAAGVPVGDWSGLLSSTWSANPFFYAFHSTDETLLIGFSIFLIIVAVVSSASTLGVYVGSSARSLYGMAKMNYIPAFFGKIHPRFRTPWISLVVTFIIGAMFLLPFPSWYALVGINSSFTVFAYLAAGITNTSLRKTAPEMERPFKTPFLTVMAPLAFVIASMLVYFSGWSTVALLLLIVDGGLPIFLLSRYGRETFHINMRSASLFSAIYWVIFIFIGIIYALSLLPFEEYFALFSATILVTPYLLYRMSGRTASIHIRASIWIVVYSIILGIMSYYGSLGINAIPFPYDYIIMAIMSLTIYFIAINTGYHTDKLKEYQSTGGVTDE

SEQ ID NO: 8896 - protein, 225 aa, Zea mays
  unsure (1)..(225): unsure at all Xaa locations
MDGPKRHLRVRLRVTARRRGAYGDGAGGALGPRRRKCRMETPVLNSAAKLQRREIGGRQLAARGGGPAAAVPERFRNMQLQEEFDTYDDNANLFVKLQFLKRRSKINEIVAAKDIIFALANSGLCAAFNRVTNKRIGFLNLSPDEVIRSLFYNKNNDSLITVSVYASDNFSTLKCRTTXVEYIRRNQLDAGFPLLESESLKWPGIXWEFDDLNGKVLTYSAQDGI

SEQ ID NO: 8897 - protein, 360 aa, Pseudomonas aeruginosa
MSKQILVLPGDGIGPEIMAEAVKVLELANDRFQLGFELAEDVIGGAAIDKHGVPLADQTLQRARQADAVLLGAVGGPKWDRIERDIRPERGLLKFRSQLGLFANLRPAILYPQLAAASSLKPEVVAGLDILIVRELTGGIYFGQPREQRVLENGERQAYDTLPYSESEIRRIARVGFDMARVRNNRLCSVDKANVLASSQLWREVVEEVAKDYPDVELSHMYVDNAAMQLVRAPKQFDVMVTDNMFGDILSDEASMLTGSIGMLPSASLDANNKGMYEPCHGSAPDIAGQGIANPLATILSVSMMLRYSFSQATAADAIEQAVSKVLDQGLRTGDIWSEGCRKVGTREMGDAVVAALKNL

SEQ ID NO: 8898 - protein, 474 aa, Schizosaccharomyces pombe
MSSTATVTESTHFFPNEPQGPSIKTETIPGPKGKAAAEEMSKYHDISAVKFPVDYEKSIGNYLVDLDGNVLLDVYSQIATIPIGYNNPTLLKAAKSDEVATILMNRPALGNYPPKEWARVAYEGAIKYAPKGQKYVYFQMSGSDANEIAYKLAMLHHFNNKPRPTGDYTAEENESCLNNAAPGSPEVAVLSFRHSFHGRLFGSLSTTRSKPVHKLGMPAFPWPQADFPALKYPLEEHVEENAKEEQRCIDQVEQILTNHHCPVVACIIEPIQSEGGDNHASPDFFHKLQATLKKHDVKFIVDEVQTGVGSTGTLWAHEQWNLPYPPDMVTFSKKFQAAGIFYHDLALRPHAYQHFNTWMGDPFRAVQSRYILQEIQDKDLLNNVKSVGDFLYAGLEELARKHPGKINNLRGKGKGTFIAWDCESPAARDKFCADMRINGVNIGGCGVAAIRLRPMLVFQKHHAQILLKKIDELI

SEQ ID NO: 8899 - protein, 751 aa, Geobacillus stearothermophilus
MENQNRQNAAQCPFHGSVTNQSSNRTTNKDWWPNQLNLSILHQHDRKTNPHDEEFNYAEEFQKLDYWALKEDLRKLMTESQDWWPADYGHYGPLFIRMAWHSAGTYRIGDGRGGASTGTQRFAPLNSWPDNANLDKARRLLWPIKKKYGNKISWADLFILAGNVAIESMGGKTIGFGGGRVDVWHPEEDVYWGSEKEWLASERYSGDRELENPLAAVQMGLIYVNPEGPDGKPDPKAAARDIRETFRRMGMNDEETVALIAGGHTFGKAHGAGPATHVGPEPEAAPIEAQGLGWISSYGKGKGSDTITSGIEGAWTPTPTQWDTSYFDMLFGYDWWLTKSPAGAWQWMAVDPDEKDLAPDAEDPSKKVPTMMMTTDLALRFDPEYEKIARRFHQNPEEFAEAFARAWFKLTHRDMGPKTRYLGPEVPKEDFIWQDPIPEVDYELTEAEIEEIKAKILNSGLTVSELVKTAWASASTFRNSDKRGGANGARIRLAPQKDWEVNEPERLAKVLSVYEDIQRELPKKVSIADLIVLGGSAAVEKAARDAGFDVKVPFFPGRGDATQEQTDVESFAVLEPFADGFRNYQKQEYSVPPEELLVDKAQLLGLTAPEMTVLVGGLRVLGANYRDLPHGVFTDRIGVLTNDFFVNLLDMNYEWVPTDSGIYEIRDRKTGEVRWTATRVDLIFGSNSILRSYAEFYAQDDNQEKFVRDFINAWVKVMNADRFDLVKKARESVTALQINLLHRSERGNELQ

SEQ ID NO: 8900 - protein, 267 aa, Schizosaccharomyces pombe
MMGINERKGFDFEYYQRNLLLQEKGFPTPKATSTGTTIVGVIAKDCIVLGADTRATAGPIIADKNCKKLHLISPNIWCAGAGTAADTEFVTSMISSNIELHSLYTNRKPRVVTALTMLKQHLFRYQGHIGAYLVLGGYDCKGPHLFTIAAHGSSDKLPYVALGSGSLAAISVLETKYQPDLERHEAMELVKEAIEAGIFNDLGSGSNCDLVVIDEEKATPYRGYSKPNERATKQSKYTYDRGTTAVLKEDIYKFVTVQDLDEMQVDV

SEQ ID NO: 8901 - protein, 423 aa, Zea mays
MAVEKTLPGASAGRTVLVTGGAGYIGSHAVLQLLLAGFRAVVIDNLNNSSELAVRRVAALAGDHSRNLSFHKIDLRDKGALEMVFASTRFEAVIHFAGLKAVGESVQKPLLYYDNNVIGTINLLEVMSVHGCKKLVFSSSAAVYGSPKNSPCTENFPLTPNNPYGKTKLVVEDICRDIYRSDPEWKIILLRYFNPVGAHPSGYLGEDPRGIPNNLMPYVQQVAVGRRPALTVLGNDYATRDGTGVRDYIHVVDLADGHIAALQKLFENSSIGCEAYNLGTGRGTSVLEIVKAFEKASGKKIPLIFGERRPGDAEILFSETTKAERELNWKAKYGIEEMCRDQWNWASKNPYGYGSPDSIKQNGHQTNGSADSSKQNGHRTNGSTDSPKRNGHHAYGSADSPKRNGHCVFGSSDLKPNGNGHLR

SEQ ID NO: 8902 - protein, 178 aa, Brassica rapa
MENMGTRVIEPLIVGRVVGDVLDNFTPTIKMNVSYNKKQVSNGHEFLPLAVSSKPRVEIHDGDLRSFFTLVMTDPDVPNPSDPFLKERLHWLVMNIPGTTDATFGKEVVSYELPKPNIGIHRYVFVLFRQKQRRVKFPSNIISRDQFNTREFAIENDLGLPVAAVFFNAQRETASCRR

SEQ ID NO: 8903 - protein, 364 aa, Vigna mungo
MARYSLCALLLFAAVAAAAGANTDADDILIRQVVPEGEVEDHLLNAEHHFSNFKAKFGKTYATKEEHDHRFGVFKSNLRRARLHAQLDPSAVHGVTKFSDLTAAEFQRQFLGLKPLGLPANAQKAPILPTNNLPKDFDWRDKGAVTNVKDQGACGSCWSFSTTGALEGAHFLATGELVSLSEQQLVDCDHVCDPEEYGACDSGCNGGLMNNAFEYILGAGGVQREEDYPYAGRDSSCKFDKSKIAASVANYSVISLDEDQIAANLVKNGPLAVGINAVYMQTYIGGVSCPYICAKRLDHGVQIVGYGESGYAPIRFKEKPYWIIKNSWGESWGENGYYKICRGQNACGVDSMVSTVGAIHASRQ

SEQ ID NO: 8904 - protein, 305 aa, Pyrococcus horikoshii
MVAIIVHGGAGTIKKEERIPKVIEGVKEAVIVGWKELRKGSALDAVEEAIKVLEDNPIFNAGTGSVLTIDGKVEMDAAIMRGKTLEAGAVAGIWGVKNPISVARKVMEKTDHVLLVGEGAVKFARLMGFPEYNPITEERIEQWKELKEKLMKGEIKYWKKLGELIKEYPEVLRSTVGAVAFDGEEIVAGTSTGGVFLKMFGRVGDTPIIGAGTYANEVAGASCTGLGEVAIRLALAKTATDFVRLGMDAQAASNAAISLATKYFGKDTMGIIMVDAAGNVGFAKNTKHMSYAYMKDGMEEPEAGV

SEQ ID NO: 8905 - protein, 383 aa, Olea europaea subsp. europaea
MGAGGRMSVPPEGKKSKSDVIQRVPHSKPQFSLGDIKKAIPPHCFQRSVLRSFSYVVYDLTIASLLCYVASTYIQFLPNPLCYFGWLLYWICQGCVLTGVWVVAHECGHHAFSDYQWLDDTVGLILHSSLLVPYFSWKYSHRRHHSNTGSLERDEVFVPRVKSGIRWISKNLNNPPGRVLLLVFQLTLGWPLYLMFNVSGRHYDRFACHYNPNSPMYSDRERAQILISDAGVLAVTCGLYRLTAAKGLAWVFCVYGGPLLVVNGFLVLITYLQHTHPSLPHYDSSGWDWLRGALATVDRDWGILNKVFRNITDTHVSHHLFSTMPHYHAMEATKAIKPILWNYYQFDGTPIFKAMWREAKECIYVERDEGDQNKGVFWYNNTL

SEQ ID NO: 8906 - protein, 174 aa, Trichodesmium erythraeum IMS101
MSNQPFFWPSPDLSKAAFVADNATVIGKVEVGKGASIWYGTVVRGDVEKIIIGNHANVQDGAVLHGDPGLVTVLEDYVTVGHRAVIHSAHIEKGCLIGIGAVILNGLRVGAGSIIGAGSIVTKDVPPSCLVVGVPAKKVRDLSEQEVTNLLKHAEHYEKLALVHSGKGTDIGFS

SEQ ID NO: 8907 - protein, 357 aa, Xylella fastidiosa Dixon
MSKQILILPGDGIGHEIVAEAVKVLEHVNVRHTLNMRLSFDALGGAAYEKYGSPLADETLARAREADAVLLGAVGGPQWDTIDPALRPERGLLKIRAQLGLFANLRPALLYPQLADASTLKPEVVAGLDILIVRELTGGLYFGQPRGSRISKNGEREAFDTLPYCESEIRRILKVGFEMARLRGKKLCSVDKANVLASSQLWRTVAGEMAKDYPDVTLSHMYVDNAAMQLVRHPKQFDVIVTENMFGDILSDQASMLTGSIGMLPSASLDANNKGMYEPCHGSAPDIAGQGVANPLATILSVAMLLRYSMGYIKTADAIEYAVGVVLDSGLRTADIWSEGMTKVGTVAMGDAVVAAL

SEQ ID NO: 8908 - protein, 349 aa, Vicia faba
MDMPPPIMHDSDRYDFVRDIGSGNFGVARLMTDKLTKDLVAVKYIERGDKIDENVKREIINHRSLRHPNIVRFKEVILTPTHLAIVMEYASGGEMSDRISKAGRFTEDEARFFFQQLISGVSYCHSMQVCHRDLKLENTLLDGDPALHLKICDFGYSKSSVLHSQPKSTVGTPAYIAPEVLLKQEYDGKIADVWSCGVTLYVMLVGSYPFEDPDNPKDFRKTIQRVLSVQYSVPDFVQISPECRDIISRIFVFDPAERITIPEIMKNEWFRKNLPADLVNENIMDNQFEEPDQPMQSMDTIMQIISEATVPAAGSYYFDEFIEVDEDMDEIDSDYELDVDSSGEIVYAI

SEQ ID NO: 8909 - protein, 95 aa, Fagopyrum rubifolium
GRLYEYANQSVKATIDRYKKACSDSAGVTSVAEANAQYYQQEAAKLRNQIRTLQNNSRNLSRHMMGEGLSSLSMKDLKNLETRLEKGISRIRAKK

SEQ ID NO: 8910 - protein, 256 aa, Arabidopsis thaliana
MSQEQPRRPREPVKYGDVFEVSGELADKPIAPEDAKMMQSAETHVFGHTQKGGPAAVMQSAATTNIRGGFVHPDDKTELVAERGATVEQTVPAATVTTEFVGGQVVGQHVEPRRVVAAARTDEEALQSTITIGEALEATVKTAGNKPVDQSDAAAIQAAEMRASGTNVIALAGVAASAQSAADHNATVDRDERKIKLRDVLTGAAGKLSADRAVTREDAEGVVSAEMRNNPKLCTHPGGVAASLTVAARLNERVDI

SEQ ID NO: 8911 - protein, 157 aa, Glycine max
  unsure (1)..(157): unsure at all Xaa locations
MATCFAPFSVSGGSHELWLTKRVGPKLTVQRRSNLVIKRNHTSSISAEYRDNRGGGGGDFVAGFLLGGAVFGTLAYIFAPQLVMQIRRSLLFEDDHGSRKAKRPIYSEEGLERXRQTLNVKIGQLHSAIDXLSSRLRGANNVPPAKIESDPEVEAPM

SEQ ID NO: 8912 - protein, 124 aa, Zea mays
MVKAVAVLGSSEGVKGTIFFTQEGDGPTTVTGSVSGLKPGLHGFHVHALGDTTNGCMSTGPHYNPASKEHGAPEDENRHAGDLGNVTAGADGVANINVTDSQIPLTGPNSIIGRAVVVHADPDD

SEQ ID NO: 8913 - protein, 196 aa, Zea mays
MRLRMMMTLIFLVMKLRRTRRQLMSVHKKIPVLLHDGRPVCESLVIVQYLDEAFPEAAPALLPADPYARAQARFWADYVDKKLYDCGTRLWKLKGDGQAQARAEMVEILRTLEGALGDGPFFGGDALGFVDVALVPFTSWFLAYDRFGGVSVEKECPRLAAWAKRCAERPSVAKNLYPPEKVYDLVCGMKKRLGIE

SEQ ID NO: 8914 - protein, 148 aa, Castanea sativa
MAGQLTGQIAEFKGIFSLFDKDGDGCITTKELGTVMRSLGQNPTEAELQDMINEVDADQNGTIDFSEFLNLMARKMKDTDSEEELKEAFKVFDKDQNGFISAAELRHVMTNLGEKLTDEEVDEMIQKADLDGDGQVNYQEFVRMMLAK

SEQ ID NO: 8915 - protein, 124 aa, Glycine max
  unsure (1)..(124): unsure at all Xaa locations
LQEEYDTHDPKGPSSMVLQFLXXXSKIIEIVAARDIXFALAQSGVCAAFSRENNQRICXXNVSADEVIRSLFYNXXNDSLITVSVYASDSYSSLKCRSTRIXXXXXXXXXXIYSYSQRKXXKCP

SEQ ID NO: 8916 - protein, 245 aa, Malus x domestica
MAYESKSLSLDSPQRKLGRGKIEIKRIENTTNRQVTFCKRRNGLLKKAYELSVLCDAEVALIVFSNRGRLYEYANNSVKGTIERYKKASADSSNTGSVSEASTQYYQQEAAKLRARIVKLQNDNRNMMGDALNSMSVKDLKSLENKLEKAISRIRSKKNELLFAEIEYMQKRELDLHNNNQLLRAKIAENERASRTLNVMAGGGTSSYDILQSQPYDSRNYFQVNALQPNHQYNPRHDQISLQLV

SEQ ID NO: 8917 - protein, 287 aa, Triticum aestivum
MSEQGAGQGTKEQSVPATVGSREISLSGQGAGQGSKEERLAELEELELQTDHRGVLAILPSYAGKTVLELGAGIGRFTGELAKEAGHVIALDFIDSVIKKNEEINGDIYKNITFMCADVTSPELKIEDNSVDIVFSNWLLMYLNDEEVEKLIGRIVKWLKPGGHIFIRESCFHQSGDSKRKVNPTHYREPRFYTKVFKECHSYDQEGNSFELSLVTSKCIGAYVKSKKNQNQICWLWEKVKCTEDKGFQRFLDNVQYKSTGILRYERVFGEGYVSTGGFETTKEFVD

SEQ ID NO: 8918 - protein, 290 aa, Solanum tuberosum
LNSSYRVPFESFRVPFVDLQEATNNFDEKFHIGLGGFGKVYRGVLRDGTKVALKRCKRESSQGIEEFRTEIEILSFCSHPHLVSLIGYCDETNEMILVYDYIENGNLRSHLYGPDLPTMSWEQRLEICIGAARGLHYLHTSAVIHRDVKSINILLDENFVAKITDFGISKKGTELDQTHLSTLVQGTIGYLDPEYFIRGQLTEKSDVYSFGVVLFEVLCARPAIVQSLPREMVNLAEWAVDSHNKGHLEQIIDPDLAAKIRPESLRKFGETAVKCLALSSEDRPSMGDVL

SEQ ID NO: 8919 - protein, 406 aa, Zea mays
MFGGSLEAGRVAVSLTPRGPRPIGRTALWCTGVSRPSSLTPSPATPSSILPDGAPGSRNKMSNRATHWCYACRRPIRLRGQDIVCPNCNDGFIQEISEMGGILNTYGLIEPDFEERRARRFGMMDAMSSLMRQRMAEMGRDGLFDIRGRQGTGTEYGRRSTAIPTLVFGGIPSPAVGSSDVNVVIRGGRRAGAARPNFSSLVVGPSLEALFEQLLLQNNRQGPPPAPQSAIDSMPVVKINRRHLDEDPQCAVCKDKFEVGAEAREMPCKHLYHTDCIIPWLVQHNSCPVCRHPLPSQRSGSSTSSARVPSAYYNETACPPAVARADFDPVPSAYYNETATDPPAVTRADFDPAPGNYGSESQESHVPFSFLWPFGPSSSYQYEENVDEPAVYDPNQIAYSAWHYDH

SEQ ID NO: 8920 - protein, 397 aa, Bacillus cereus ATCC 14579
MAKHHGDAGMSSAFIYSDDFRGYSFSPDHPFNQLRVTLTYDLLQKGGFISPSQIISPRTATDEEIAYVHTEEYINAVKRAGEGKLEKSIAMSYGLGTEDTPMFPNMHEASALLVGGTLTAVDAVLSGKVKHALNLGGGLHHGFRGKASGFCIYNDSSIAMKYIQKKYGLRVLYIDTDAHHGDGVQWSFYDDPNVCTISLHETGRYLFPGTGAVNERGQGNGYSYSFNVPLDAFTEDESFLKSYRTVVKEVAAYFKPDIILTQNGADAHYYDPLTHLCATMNIYREIPKLAREIANEYCDGRWIAVGGGGYDHWRVVPRAWALIWLEMNNIQNISGYLPPEWIEAWKGQAETELPLTWEDPDNMYKPIPRKPEIEEKNALTVAKSLEIIRNNMTKSLY

SEQ ID NO: 8921 - protein, 440 aa, Chlamydophila pneumoniae J138
MLNCSNQKHTVTFEEACQVFPGGVNSPVRACRSVGVTPPIVSSAQGDIFLDTHGREFIDFCGGWGALIHGHSHPKIVKAIQKTALKGTSYGLTSEEEILFATMLLSSLKLKEHKIRFVSSGTEATMTAVRLARGITNRSIIIKFIGGYHGHADTLLGGISTTEETIDNLTSLIHTPSPHSLLISLPYNNSQILHHVMEALGPQVAGIIFEPICANMGIVLPKAEFLDDIIELCKRFGSLSIMDEVVTGFRVAFQGAKDIFNLSPDITIYGKILGGGLPAAALVGHRSILDHLMPEGTIFQAGTMSGNFLAMATGHAAIQLCQSEGFYDHLSQLEALFYSPIEEEIRSQGFPVSLVHQGTMFSLFFTESAPTNFDEAKNSDVEKFQTFYSEVFDNGVYLSPSPLEANFISSAHTEENLTYAQNIIIDSLIKIFDSSAQRFF

SEQ ID NO: 8922 - protein, 1230 aa, Candida albicans
MSILSENNPTPTSITDPNESSHLHNPELNSGTRVASGPGPGPEVESTPLAPPTEVMNTTSANTSSLSLGSPMHEKIKQFDQDEVDTGETNDRTIESGSSDIDDSQQSHNNNNNNNNNNNESNPESSEGDDEKTQGMPPRMPGTFNVKGLHQGDDSDNEKQYTELTKSINKRTSKDSYSPGTLESPGTLNALETNNVSPAVIEEEQHTSSLEDLSLSLQHQNENARLSAPRSAPPQVPTSKTSSFHDMSSVISSSTSVHKIPSNPTSTRGSHLSSYKSTLDPGKPAQAAAPPPPEIDIDNLLTKSELDSETDTLSSATNSPNLLRNDTLQGIPTRDDENIDDSPRQLSQNTSATSRNTSGTSTSTVVKNSRSGTSKSTSTSTAHNQTAAITPIIPSHNKFHQQVINTNATNSSSSLEPLGVGINSNSSPKSGKKRKSGSKVRGVFSSMFGKNKSTSSSSSSNSGSNSHSQEVNIKISTPFNAKHLAHVGIDDNGSYTGLPIEWERLLSASGITKKEQQQHPQAVMDIVAFYQDTSENPDDAAFKKFHFDNNKSSSSGWSNENTPPATPGGSNSGSGSGGGGAPSSPHRTPPSSIIEKNNVEQKVITPSQSMPTKTESKQSENQHPHEDNATQYTPRTPTSHVQEGQFIPSRPAPKPPSTPLSSMSVSHKTPSSQSLPRSDSQSDIRSSTPKSHQDVSPSKIKIRSISSKSLKSMRSRKSGDKFTHIAPAPPPPSLPSIPKSKSHSASLSSQLRPATNGSTTAPIPASAAFGGENNALPKQRINEFKAHRAPPPPPSAPPAPPVPPAPPANLLSEQTSEIPQQRTAPSQALADVTAPTNIYEIQQTKYQEAQQKLREKKARELEEIQRLREKNERQNRQQETGQNNADTASGGSNIAPPVPVPNKKPPSGSGGGRDAKQAALIAQKKREEKKRKNLQIIAKLKTICNPGDPNELYVDLVKIGQGASGGVFLAHDVRDKSNIVAIKQMNLEQQPKKELIINEILVMKGSSHPNIVNFIDSYLLKGDLWVIMEYMEGGSLTDIVTHSVMTEGQIGVVCRETLKGLKFLHSKGVIHRDIKSDNILLNMDGNIKITDFGFCAQINEINSKRITMVGTPYWMAPEIVSRKEYGPKVDVWSLGIMIIEMLEGEPPYLNETPLRALYLIATNGTPKLKDPESLSYDIRKFLAWCLQVDFNKRADADELLHDNFITECDDVSSLSPLVKIARLKKMSESD

SEQ ID NO: 8923 - protein, 99 aa, Oryza sativa
MLEGKARVEDTDMPARMQAAATSAASRALDLFDVADCRAIAGHIKAEFDKRYGVGWQCVVGANFGCFFTHTSGTFIYFSLERLSFLLFKAAAAAAIAAS

SEQ ID NO: 8924 - protein, 96 aa, Glycine max
  unsure (1)..(96): unsure at all Xaa locations
MKKQLQFEKHKKQMVDEESKKKERHIVTWTQEEDDILREQIGVHGTENWAIIASKFKDKTTRQCRRRWYTNWNSXFKKGGGAPRETSFFLRGKKIF

SEQ ID NO: 8925 - protein, 554 aa, Bifidobacterium longum DJO10A
MQRSYILGAGILFRAVTTTPMERTHGKERNMSQPDTDTAAQSPSSQQEPQIQTDGRRSHSEQMNQPAQTSQSESSHDGKDEHALHTNLKRGMESRHLQMISLGGVIGTGLFLSSGYTIQQAGPIGTILAYSIGALIVYLVMLTLGELSVAMPVTGSFHVYAEKFIGPGTGFVIAIQYWLTWTVALGSEFTAAGLLMQRWFPDSPTWVWSAACIILIFTLNALSVRLFAEAEFWFASIKVFAICAFIVIGSLAIFGVIPVAGYQHAPMFVNLIKDGVFPNGFMPVFATILTVNFAFSGTELIGVTAGETRDPQTAVPKAIHTTLWRLVLFFIGSITVMCALIPWRKAGVGESPFVLVFNGIGIPYAGDIMNFVVLTAVLSASNSGLYASTRMVWSMGNEGMIPRWFAKTNRRGVPMLALCAAMAGGLLALLSSVIAASTVYLVLVALSGLSAVVVWIAIAYCQIVFRRRWLAAGHSTSELKYRTPGYPYVSWAAFILCTASFVLVIFDVEQRFALVAELVFIVACYGAYFLQQWVRKRKKATEADDLDTLWVARD

SEQ ID NO: 8926 - protein, 78 aa, Triticum aestivum; identical to SEQ ID NO: 7127

SEQ ID NO: 8927 - protein, 169 aa, Leavenworthia stylosa
NTEIVGMIHDGESRFSINGKPINHFLGTSTFSEYTVVHSGQVAKINPEAPLDKVCIVSCGLSTGLGATLNVAKPKKGQSVAVFGLGAVGLGAAEGARIAGASRIIGVDLNSNRFEQAKKFGVTEFVNPKEHDKPVQQVIDEMTNGGVDRSVECTGSVQAMIQAFECVHD

SEQ ID NO: 8928 - protein, 260 aa, Triticum aestivum
  unsure (1)..(260): unsure at all Xaa locations
PRFASSVRRAVVSADVARPPPPDLHTAGESEPPAAPPESRGFDEELTLAGEDGDWVVRFEQSFNVFLTDTVIFILDILYRDRDYARFFVLETIXARVPYFAFISVLHLYETFGWLXERADNIKVHFAESMNEFHHLLIMEALGGNSVWLDRFLARFSAFFYYFVTVGMYMLSPRMAYHFSECVERHAYSTYDKFLKLNGEELKKLPAPEVAVNYYMNEDLYMFDEFQTSRAPNSRRPKVDNLYDVFVNVRDDEXRSIARQ

SEQ ID NO: 8929 - protein, 369 aa, Triticum aestivum
MFRNTPDPRRRRTVPPSPPRHGRPRRGETNQREHYKRKGRSQKLYHHHHHHYFPRQRTPRGRSFSQRRQQRLSGDSREAMAKDGAGGGPDWNGLLKWSLAHGSDGTNPPRALSEEDRKWFMEAMQANTVDVVGRMKEIAQVMKTPDDVLQSHGVTPENIEGTFSDMLDELQEHVESIDMANDLHSIGGLDPLLGYLKNSNAGIRAKAAEVVSTVVQNNPKSQQLVMESNGLEPLLTNFRSDPSTTARTKALGAISSLIRNNQSGLAAFRLGNGHAALKDALGSDDARLQRKALHLTQYLLNNKADRNVAAEIGLPNQLIHLASSDDSGVREAALGGLLELARDKTPAARNALPDQDKLKDVLKSRIEGI

SEQ ID NO: 8930 - protein, 114 aa, Glycine max
  unsure (1)..(114): unsure at all Xaa locations
TRGCGIEKNTDPPSSIQESXDRNTKRGHSADDRTNKLGAQLSTDRELLKTARPEADQXALKAAAMIVHMHKPMCESQRDMLINQTFNLDQVQFAADGIRYAQRTMTAMKSATRS

SEQ ID NO: 8931 - protein, 342 aa, Capsicum annuum
MSDFKSKFMEAYYVLKSELLNDPGFEFTDDSREWVDKMLEYNVPGGKLNRGLSVIDSYSLVDDGKELTRDEIFKASALGWCIEWLQAYFLVLDDIMDNSHTRRGQPCWYKVEKVGMIAVNDGILLRNHISRILKNHFRPKSYYVDLLDLFNEVEFQTASGQMIDLITTHVGEKDLSKYSLPIHCRIVQYKTAYYSFYLPVACALLMAGENLDNHVDVKNILIEMGIYFQVQDDYLDCFADPEVLGKIGTDIQDFKCSWLVVKALELCNEEQKKILYENYGKDDAACIAKIKTLYNDLKLEEVFLEYEKKTYEKLANSIAAHPSKAVQAVQLSFLGKIYKRQK

SEQ ID NO: 8932 - protein, 451 aa, Streptomyces avermitilis MA-4680
MTPQPNPQVGAAVKAADRAHVFHSWSAQELIDPLAVAGAEGSYFWDYDGRRYLDFTSGLVFTNIGYQHPKVVAAIQEQAASLTTFAPAFAVEARSEAARLIAERTPGDLDKIFFTNGGADAIEHAVRMARIHTGRPKVLSAYRSYHGGTQQAVNITGDPRRWASDSASAGVVHFWAPYLYRSRFYAETEQQECERALEHLETTIAFEGPGTIAAIVLETVPGTAGIMVPPPGYLAGVRELCDKYGIVFVLDEVMAGFGRTGEWFAADLFDVTPDLMTFAKGVNSGYVPLGGVAISGKIAETFGKRAYPGGLTYSGHPLACAAAVATINVMAEEGVVENAANLGARVIEPGLRELAERHPSVGEVRGVGMFWALELVKDRETREPLVPYNAAGEANAPMAAFGAAAKANGLWPFINMNRTHVVPPCNVTEAEAKEGLAALDAALSVADEYTV

SEQ ID NO: 8933 - protein, 315 aa, Clostridium thermocellum ATCC 27405
MKYRKMGRTGLYISEISLGSWLTYGNSTDKETAVKVIDTAYSLGINYFDTANVYANGRAEVIVGEALKKYPRESYILATKAFWPMGTGPNDKGLSRKHVFEQVHASLKRLNVDYIDIFYCHRYDPETPLEETLRTIDDLLRQGKILYVGVSEWTAAQMAQALHIADRYLLDRIVVNQPQYNMFHRYIEKEIIPFGEKNGISQIVFSPLAQGVLTGKYKPGGNIPRDSRAADPNSNMYIGQFLKEDKLLKVEKLKAVADEMGITLSQLAIAWVLRQPNVTSALIGASKPEQVEENVKASGINLSDEILNKIEAILQ

SEQ ID NO: 8934 - protein, 195 aa, Zea perennis
APLDKVCVLSCGISTGLGASINVAKPPKGSTVAVFGLGAVGLAAAEGARIAGASRIIGVDLNPSRFEEARKFGCTEFVNPKEHNKPVQEVLAEMTNGGVDRSVECTGNINAMIQAFECVHDGWGVAVLVGVPHKDAEFKTHPMNFLNERTLKGTFFGNYKPRTDLPNVVELYMKKELEVEKFITHSVPFAEINKA

SEQ ID NO: 8935 - protein, 497 aa, Staphylococcus aureus
MSKVQNESNNVVKRGLKDRHISMIAIGGCIGTGLFVTSGGAIHDAGALGALIGYAIIGIMVFFLMTSLGEMATYLPVSGSFSTYATRFVDPSLGFALGWNYWFNWVVTVAADITIAAQVIQYWTPLQGIPAWAWSALFLVIIFSLNSLSVRVYGESEYWLALIKVITVIVFIAIGLLTIVGIMGGHVVGFEIFNKGEGPILGGNLGGSLLSILGVFLIAGFSFQGTELIGITAGESENPERAVPKAIKQVFWRILLFYILAIFVIGMLIPYDSSALMGGSDNVATSPFTLVFKNAGFAFAASFMNAVILTSVLSAGNSGMYASTRMLYSMSKDKLAFEAFGKTNKNGVPYMSLLVTAIIVVIILVLQSLTKGAYEYIVAASGLTGFIAWVGIAVSHYRFRRAFDKQNYDKSKLKYTAKLFPFGPLFAGFLCIVVIIGQDVDFIKTGDFNFSRFLITYMGIPVFLAFFIYHKLRYKTKKIPLEQVDLRQDVSMDEIKG

SEQ ID NO: 8936 - protein, 557 aa, Zea mays
MKTSSPRAVPVGGSRLVRPMFRNKTSTKKKVKPEPAIVPASHKHCETKGPKSHASKQKESLQDEPRTPAPANKKAAVSSTVDGSDFGTKGCGAGVIHGSKVGELSRSKEKGECSQSSKSSIGDYSTSTSISEDSYGSFSANGSRPHMSKDVRWGAIRRMAIQQGSLGLKNFKLLKQLGCGDIGTVYLAELVGSDCMFALKVMDIEYLISRKKMLRAQTEREILQMLDHPFLPTLYSHFTTDNLSCLVMEFCPGGDLHVLRQKQPTKTFSEAAARFYVAEVLLALEYLHMLGVIYRDLKPENILVREDGHIMLSDFDLSLRCSVSPMLVRTSSVDRDEPSRPSGPCAQSCIDPLCIQPSWSNSSCFTPSLVSSTPSRTRRPRAEPLKKPSLPQLVVEPTEARSNSFVGTHEYLAPEIIRGDGHGSSVDWWTLGIFLYELLYGKTPFRGPDNDETLSNVISQGLKFPDSPALSFHARDLIRGLLVKEPEYRLGSSRGAAEIKRHPFFEGLNWALIRWTSPPETPKNIDTAATLAGTRKKKEGKCLEFRLNGDDIEFELF

SEQ ID NO: 8937 - protein, 58 aa, Glycine max
FSFCSFQDSSVIAQLGIPDMRLPLLYTLSWPERIYCSEVTWPRIDLSKYGSLTFYAPD

SEQ ID NO: 8938 - protein, 458 aa, Agrobacterium tumefaciens str. C58 (Cereon)
MAQNWTPGSWRQKPIQQVPEYPDAAALAATEATLATYPPLVFAGEARRLKKQLANVAEGNAFLLQGGDCAESFLEHGADNIRDFFRAFLQMAVVLTYGAQLPVVKVGRIAGQFAKPRSSNVEVLDGVTLPSYRGDIINGIEFNEASRIPSPERQLDAYRQSAATLNLLRAFAMGGYANLENVHQWMLGFIKDSPQADRYRKLADRISETMNFMQAIGISAENNPSLRETDFFTSHEALLLGYEEALTRIDSTSGDWYATSGHMIWIGDRTRQLDHAHVEYFRGIKNPIGLKCGPSLTPDNLIELIDALNPANEAGRLTLICRFGHDKVADSLPKLIRAVEKEGRKVVWSCDPMHGNTITLNHYKTRPFERILSEVESFFQIHRAEGTHPGGIHIEMTGKDVTECTGGARAVTADSLSDRYHTHCDPRLNADQALELAFLLSERMKSGRDEKRLAIANA

SEQ ID NO: 8939 - protein, 286 aa, Zea mays
MHIREEEATPSTVTGIMSTLTSAGQQKLKEPISPGGGSASVAGSAAERNNGGRGKGKTEIKRIENTTNRQVTFCKRRNGLLKKAYELSVLCDAEVALIVFSSRGRLYEYANNSVKGTIERYKKATSDNSSAAGTIAEVTIQHYKQESARLRQQIVNLQNSNRALIGDSITTMSHKELKHLETRLDKALGKIRAKKNDVLCSEVEYMQRREMELQNDNLYLRSRVDENERAQQTANMMGAPSTSEYQQHGFTPYDPIRSFLQSNIVQQPQFYSQQEDRKDFNDQGGR

SEQ ID NO: 8940 - protein, 367 aa, Agrobacterium tumefaciens str. C58 (Cereon)
MCFRWQKPRQASRLRIVTYERFVMTKFKLEYIWLDGYKPVANLRGKTQIKEFDEFPTLEQLPLWGFDGSSTQQAEGHSSDCVLKPVAIYPDPARTNGALVMCEVMMPDGVTPHASNSRATILEDEDAWFGFEQEYFFYQDGRPLGFPEQGYPAPQGPYYTGVGFKNVGSVAREIVEEHLDLCLEAGINHEGINAEVAKGQWEFQVFGKGSKRAADQIWIARYLLLRLCEQYGIDVEFHCKPLGDTDWNGSGMHCNFSTKFMREVGGKDYFEALMAAFAKNWQEHIDVYGPDNHLRLTGKHETAPWNKFSYGVADRGASIRVPHSFVNNGYRGYLEDRRPNSQGCPYQIASVVLKTIAEVPLAKSAAA

SEQ ID NO: 8941 - protein, 459 aa, Staphylococcus epidermidis ATCC 12228
MADKLQRELSNRHIQLIAIGGAIGTGLFLGAGQSIHLAGPSILLTYIIVGFVLFMFMRAMGELLLSNLGFKSFGDIAHHHIGSMAGFMVGWTYWLTWIISGMAEVTAVAKYVSFWYPTIPNWLTAAATILVLVALNLFSAKLFGELEFWLSIIKVLTILALIAVGVVMIVFGMKTSYGPATVTNIWKDGGFFPNGAQGFFMSFQMAIFSFIGIELIGITAGETKDPHKTIPQAINNVPFRILLFYIGSLAVIMSVVPWQQLNPADSPYVKMFGLVGIPFAAGIINFVVLTAAASSCNSGIFANSRTMFGLAGRKQGPAFLHRTNKHGVPHYAILVTCGLLSISVVLNAIFKDATKVFVQITTFSTVLNIMIWTIIMIAYLGYLRHEPKQHKESNYKMWGGKYMAYSILGFFAFIFIILLINSATRYAVLSAPVWFVIMLLMYQKYKKESRKAKIKNEEE

SEQ ID NO: 8942 - protein, 225 aa, Zea mays
MAGETKKGLVLLDFWVSPFGQRCRIALAEKGIAYEYSEQELLGGAKSDILLRSNPVHKKIPVLLHDGRPVCESLVILEYLEEAFPEASPRLLPDAAYARAQARFWAAYSDKVYEAGTRLWKLRGDARAQARAEIVQVVRNLDGELGDKAFFGGEAFGFVDVALVPFVPWLPSYERYGDFSVAEIAPRLAAWARRCAQRESVARTLHPPEKVDEFINLLKKTYGIE

SEQ ID NO: 8943 - protein, 286 aa, Saccharomyces cerevisiae
  unsure (1)..(286): unsure at all Xaa locations
XYTTRQIGAKNTLEYKVYIEKDGKPVSAFHDIPLYADKENNIFNMVVEIPRWTNAKLEITKEETLNPIIQDTKKGKLRFVRNCFPHHGYIHNYGAFPQTWEDPNVSHPETKAVGDNDPIDVLEIGETIAYTGQVKQVKALGIMALLDEGETDWKVIAIDINDPLAPKLNDIEDVEKYFPGLLRATNEWFRIYKIPDGKPENQFAFSGEAKNKKYALDIIKETHDSWKQLIAGKSSDSKGIDLTNVTLPDTPTYSKAASDAIPPASLKADAPIDKSIDKWFFISGSV

SEQ ID NO: 8944 - protein, 322 aa, Leavenworthia crassa
GQTPLFPRIFGHEAGGIVESVGEGVTDLQPGDHVLPIFTGECGDCPHCHSEESNMCDLLRINTDRVGMIHDGESRFSIKGKPIHHFLGTSTFSEYTVVHSGQVAKINPEAPLDKVCIVSCGLSTGLGATLNVAKPKKGQSVAVFGLGAVGLGAAEGARIAGASRIIGVDLNSNRFEQAKKFGVTEFVNPKEHDKPVQQVIAEMTNGGVDRSVECTGSVQAMIQAFECVHDGWGVAVLVGVPSKDDAFKTHPMNFLNERTLKGTFFGNYKPKTDIPGVVEKYMNKELELEKFITHTVPFSEINKAFDYMLNGEGIRCIITMGA

SEQ ID NO: 8945 - protein, 463 aa, Streptococcus pyogenes MGAS8232
MTIFRKKKKYSNKTEMQRHFKVIDLIFLGLGSMVGTGIFTVTGIGAAKYAGPALTISIIISAIAIGILALFYAEFASRMPSNGGAYSYVYATLGEFPAWLVGWYIIMEFLTAISSVAVGWGSYLKGLLANYNIVLPNALNGTFNLKNGTYIDILPVLVMFFVTGIVLMNSKLALRFNSFLVILKFSALALFIFVGIFFIDHNNWSHFAPYGVGQITGGKTGIFAGASVMFFAFLGFESISMAVDEVKEPQKTIPKGIILSLIIVTALYIVVTTILTGIVHYTKLNVPDAVAFALRNIRLYWAADYVSIVAILTLITVCISMTYALARTIYSISRDGLLPKSLYTLTKKNKVPQNATLVTGLLAMICAGIFPLSSLAEFVNICTLAYLIILSGAIIKLRRIEGEPKANEFKTPLVPFLPILAIIICLSFMSQYKAFTWIAFAIATIIGTLIYLAYGYTHSIENK

SEQ ID NO: 8946 - protein, 653 aa, Neurospora crassa
MDAKPQRPLWAPPVRYGDENIPPADPTHQSKRSDSKIKAMMAVNGTLNAPPKRAACFDKSNTSKPLADGGNKDMLKNRVKPMVTTSSTRDLRSDGRENNRSAAEEHYMRPTATSKAASHGHQKYSSTAPLSSHAASGAYGGIRSHNAIAKLSAPVKKTTNVYRDNKVKEESTSHAPTSSSVDDLVAMVDKHIKDPRHYKSQPQLKSDQQHTLHRNQSKYVPNYENLNDVDDPDDSNADYAESYEDAVEQLSRDLDIPANTDPAAIVHANHMSIAQASYDSMPQGAPLAPSKPVRALPLPPNVSDPEEYSEDDDDQDLYDDQGYTTAHSYRSHCDNTTGGPPTLVAPKFTADIQKELDIAKAWVLEHQTEEEVEEENWDVSMVAEYGDEIFEYLRELEERMLPNPHYMDIQTEIRWSMRSVLMDWLVQVHHRFSLLPETLFLTVNYIDRFLSVKVVSLGKLQLVGATAIFVAAKYEEINCPSIQELVYMVDQGYSVEEILKAEKFMLTMLNFELGWPGPMSFLRRISKADDYDLETRTLAKYLLEVTIMDERFVGCPASYLAAGAHCLSRFFLQRGPWTHAHVHFSGYTLAQLRPLIISILDCCQEPRKHHGAVYDKYSHQRFKSASTFVEGKIANGFVLPIRTNASISDSAQS

SEQ ID NO: 8947 - protein, 363 aa, Nostoc punctiforme
MAYSAGKPLTIETVQLSGPQAGEVLVEVKASGICHTDAFTLSGDDPEGLFPAILGHEGAGVVVEVGAGVTSLKPGDRVIPLYTPECRQCEYCLSFKTNLCQAIRLTQGRGVMPDGTSRFSIDGQMIHHYMGTSTFANYTVLPEIAVAKIREDAPFEKVCYIGCGVTTGIGAVINTAKVEPGANVVVFGLGGIGLNVIQAARMVGANMIVGVDINPSKRALAEKFGMTHFVNPQEVEGDLVPYLVDLTKGGADYSFECIGNVKIMRQALECCHKGWGVSVIIGVAGAGQEISTRPFQLVTGRVWKGSAFGGARGRTDVPKIVDWYMQGKINIDDLITHVMPIEQINDAFELMHKGESIRSVVTF

SEQ ID NO: 8948 - protein, 574 aa, Aspergillus fumigatus
MSDPVDAADLVAVAQAHAPKQSLEVVPVKEHETRVVATARRLDDQGREIPTEEEEHTLRRVAGKVHWTAYTIAFVELCERFSYYGTTAVCTCQLHSAASPRWFEHWSRVCLTLAIVNTFWCYLMPILGAYIADEFWGRLKTIQVSIAFAMVGHIILIISALPSVIAHPHGALGCFAVGLVIFGIGVGGFKSNIAPLIAEQHKETRSFIKVIPKTGERVIVDPAQTITRIFLYFYFMINVGALVGSIAMVYAEKYVGFWLAFLLPTIMFAFCPAVIFACRNKYEVTPATGSVSAKAFKLWAFALQGRWSWNPVRLVQNKPEWMTFDDQWVDEVRRAVKACAVFLWYPVYWLAYGQMTNNLTSQAATMQLNGVPNDLINNLDPLALIIFIPIMDQFIYPGIRRMGFNFTPLKRIYVGYFLASMSMIAAAVTQYYIYKMSPCGDHPSDCDKPAPINVWVQTLPYVLIAFSEIFTSITGYEYAFTKAPKNMKSLVQSIYLFMNAISSAIQQGLTALSTDPLLIWNYGFVAVLAFVAGNLFYLTHYSLDKEEDRLNNLEASAYLGTNPGARDEKIDPEP

SEQ ID NO: 8949 - protein, 152 aa, Zea mays; identical to SEQ ID NO: 3163

SEQ ID NO: 8950 - protein, 334 aa, Tropheryma whipplei str. Twist
MSTPSWNRDVDSRREADLTLVSALNLALDDELALDPKLLLMGEDLGALGGVFRVTDRLCKKYGKNRVIDTPLAESGIVGTAIGLAAKGFRLVLEIQFNGFIFPAFNQITTQLARQNFRNKIPMPVVIRVPHGGHIGAVEHHMEAPEAYFAHTPGLRVVNCSTPSDAYWMLRQAIRCPDPVIFFEPLSLYWNKGTVSFSSPDLDLHAASIVRKGNDVTLLGHGGITRTLIAAAEHTRDVSVEIIDLRSLSPVDYETILASVKKTGRLVIAQESPGFVSLGSEIAATVSEKAFYHLEAPVARVSGYDTPFPPAKLEKVYLPDVDRVLTAIKGVMSH

SEQ ID NO: 8951 - protein, 220 aa, Oryza sativa
  unsure (1)..(220): unsure at all Xaa locations
MGSVPDPGELTELAQPSFEEFQKQTSLMTSCTLLWQELSDHFTSLEQNLMKKSEALKQMIETLDNQTQTSLESLKRREVTIDHSVEIVAGKVGERARAALESLEKARDGCGDGSNDDSGDVDDEEGLLSALKSLCLKMDARGFWNFVTARKKELENLRSKIPAALVDCVDPAMLVLEAISEVFSGDTQRRXVXHDYGWAXCVVILXESLTPVIXVXPVIG

SEQ ID NO: 8952 - protein, 698 aa, Candida albicans
MTSLQQQQQQQRVKYGPPHHIKRRPYHPILESLEFQTNQHLIQEYSLDIVNTLSQLESLTLVNPAMIDLQPEIQWFMRPFLLDFLIELHSSFKLQPTTLFLCLNIIDRYCAKRIVFKRHYQLVGCTALWIASKYEDKKSRVPTLKELTIMCRNAYDEEMFVQMEMHILSTLDWSIGHPTLEDCLQLAIDSNNLSNNTTNDIENKSVRPNRKSSISSAVTAVARFLCELSLYDKYFLSVPPSLIAITANLLSCSMLQIPHASITLKNLIEQEIINPQQKKQKKAFSSNSSRTTTASYTHQNQSDVRHSSFDEDIDLDSGDEGDDDEDYIDEFYETNNYDDTNATTFDESINKSTTINDENQPPQIHTPFLSGLDEDSILSIKKICLMLIIQLSKVTEVLSKKYENLGVIQVINNFHSNYKFIIQSIYENQELLLNTINDSTNNNEIDYKLIQSSEILLQFPKFDEYLTEDEDENVSTDDEANSQPQGYDGSGSDGNNQLFTPKSPNAFSSNSSLTLNNHPQSMVPVTPPSATSQYSLFSNKNNRTHESTSGLNSTCNTPTHISISSFAPPQPPPGSILKPKLTSINSTNSLKIKKLTSNSNSSNINIHHGHHNTKQEKRYSHISIGSNSSSKYDGFSPIKSISTNGSLITNNGSFTNIVNNTNSSSPLMNQQQQYYHQQQHQQQVTQSSLYQHHHQYHQ

SEQ ID NO: 8953 - protein, 381 aa, Candida maltosa
MSESTVGKPITCKAAVAWEAAKPLSIEDVTVAPPKRHEVRIKLYDTGVCHTDAYTLSGVDPEGAFPVILGHEGAGIVESIGEGVTNVKVGDHVIALYTPECGECKFCKSGKTNLCGKIRATQGKGVMPDGTSRFTCKGKEILHFMGCSTFSQYTVVADISVVAINPKAEFDKACLLGCGITTGYGAATITANVQKGDNVAVFGGGIVGLSVIQGCAERGAAQIILVDISDKKEEWGQKLGATAFVNPTKLPEGTTIVDKLIEMTDGGCDFTFDCTGNVGVMRNALEACHKGWGTSVIIGVAAAGKEISTRPFQLVTGRTWKGAAFGGVKGRSQLPGIVNNYLDGKLKVEEFITHREPLAAINKAFEEMHAGDCIRAVVDLS

SEQ ID NO: 8954 - protein, 356 aa, Ralstonia solanacearum
MTKIAVLPGDGIGTEIVAEAVKVLKTLGETFEMETAPVGGAGYEAKGHPLPEDTLKLAKEADAILFGAVGDWKYDTLPRELRPEQAILGLRKHLQLFANFRPAICYPELAGASSMKPEIVAGLDILIVRELTGDIYFGQPRGVRAAPDGLFAGAREGFDTMRYSEPEIRRIAHVAFQAAAKRGKKLCSVDKANVLETFQFWKDIVTDVHKEYPEVELSHMYVDNAAMQLVKAPKNFDVVVTGNMFGDILSDEAAMLTGSIGMLPSASLDANNKGLYEPSHGSAPDIAGKGIANPLATILSAAMMLRYTLGKAEQADRIENAVKKVLAQGYRTGDILTPGCKQVGTVEMGDAVVAAL

SEQ ID NO: 8955 - protein, 370 aa, Bradyrhizobium japonicum USDA 110
MRDRTRRSLALTSPPRPHRSTSGQPRSISMEYRRLGRSGLMVPALSLGTGTFGGVGRLAAWGTTDASEARRLLDICLEAGVSMFDTADVYSLGESERVLGEAIKGRRDKVLISTKATFRFGDGPNDIGSSRQHLLAAIDGSLARLGTDYIDLFQLHGFDAFTPPEEVLATLDVLVRAGKIRYVGVSNFSGWHLMKSLSIADKHGFPRYVANQTYYSLIGRDYEWELMPLGLDQGIGAVVWSPLGWGRLTGKIRRGQPKPEVSRLPKTADFGPPVPDEHVYRVVDAIDEVARETGKSVSQIALNWLLQRPTVSTLIIGARNETQLRENLGAVGWSLTKDQIAKLDAASKVTLPYPYWHQRTTFTDRNPPAV

SEQ ID NO: 8956 - protein, 142 aa, Zea mays; identical to SEQ ID NO: 812

SEQ ID NO: 8957 - protein, 464 aa, Candida albicans
MFVLHSYSKLPNINEYAKAKSTPLDVFVWGTGSMCELGLGPSAKNKEVKRPRLNPYLTEEKLGGTKIVDFAVGGMHTLALDGKNRIWSWGGNDSEVLGRDTCQAKEVLKDIDGKNGNDDDDDDEDGDLNEAESTPALVENLPEGEIVQLAATDNLSAALLSNGDVYSWGCFRCNEGLLGFLRDEIKLQKTPLKIKELKKHCPIMRSVKIILLALDSKEWMPGVNGQQYQLGRRILERHRYRSLEPQQFGLYNIKYIASGDFHCFAIDHSHNVYAWGLNQYGQCALTGDNGELEDGSVLMKPTLIPELSHKGIKEIAAGEHHTLALTEDGQVYAWGRYDMKEIGIPKDKLPKSTFKINTGTHGSFSFLQNLFAVKIKTIGVGSHHSFAVTEDGVVYAWGFAETYGPGLGPSIDDVEKPTRIVNTATKNEDILLIGAGGQFSVSGGVKFEDEEKAEVRLDKYEDLE

SEQ ID NO: 8958 - protein, 507 aa, Lolium rigidum
MDELFLLSVLLAAAAVALLQVLKVALNPVSDRAPPGPWKLPVIGSMHHLVNVLPHRALKDLADVHGPLMMLQMGQTPLVVASSKETARLVLKTHDTNFATRPKLLAGEIVGYEWSDIVFSPSGDYWRKLRQLCVAEILSPKRVLSFCHIREEEVGIRVEQIRAAGLSTPVNLSVMFHSITNSIVARATFGKKRKNAAEFMAAIKSGVGLASGFNIPDLFPTLTTVLATITGMKRSLHGIHTTVDTILEEIINERNIARAEKIKAGATENVDENLTDVLIGLQGKGGFGFHLDNSKIKAIILDMFAGGTGTSASAMEWGMSELMRNPAVMEKLQGQIREAFKGKTVVTEANLQASELRYLKLVIKEALRLHPPAPLLVPRESIDMCELEGYTIPAKSRVVINAWAIGRDPRYWDDAEEFQPERFEDGTVDFTGSNYEFLPFGAGRRMCPGFNYGLASMELALVTLLYHFDWSLPEGVAEVDMEEAPGLGVRRRTPLMLLATPFVPVVA

SEQ ID NO: 8959 - protein, 372 aa, Pseudomonas sp.
MIKSRAAVAFAPNQPLQIVEVDVAPPKAGEVLVRVVATGVCHTDAYTLSGADSEGVFPCILGHEGGGIVEAVGEGVTSLAVGDHVIPLYTAECRECKFFKSGKTNLCQKVRATQGKGLMPDGTSRFSYNGQPIYHYMGCSTFSEYTVLPEISLAKIPKNAPLEKVCLLGCGVTTGIGAVLNTAKVEEGATVAIFGLGGIGLAAIIGAKMAKASRIIAIDINPSKFDVARELGATDFVNPNDHAKPIQDVIVEMTDGGVDYSFECIGNVRLMRAALECCHKGWGESVIIGVAPAGAEINTRPFHLVTGRVWRGSAFGGVKGRTELPSYVEKAQQGEIPLDTFITHTMGLDDINTAFDLMDEGKSIRSVVQLSR

SEQ ID NO: 8960 - protein, 180 aa, Desulfitobacterium hafniense
DAPVSDAFAALGLPWIAKTIAFSAVVGIASVLFAFMLGAARIWYSLSRDGLLPGWFAKIHPKYGTPHRPTIALGVFTALVAGFLPIGEVAKLVNIGVLSAFIIICASVWVLRVRKPNLERSFRTPLVPFIPIVGIAFSIWLLAELAAITWLIFLIWVSLGLLVYFAYGIRHSKLAQETQE

SEQ ID NO: 8961 - protein, 332 aa, Streptococcus thermophilus
MAILVLGGAGYIGSHMVDRLVEKGQEKVVVVDSLVTGHRAAVHPDAIFYQGDLSDQDFMRKVFKENPDVDAVIHFAAYSLVGESMEKPLKYFDNNTAGMVKLLEVMNECGVKYIVFSSTAATYGIPEEIPILETTPQNPINPYGESKLMMETIMKWSDQAYGIKYVPLRYFNVAGANLMVRLVRTRSETHLLPIILQVAQGVREKIMIFGDDYNTPDGTNVRDYVHPFDLADAHLLAVEYLRKGNESTAFNLGSSTGFSNLQILEAARKVTGKEIPAEKADRRPGDPDILIASSEKARTVLGWKPQFDNIEKIIASAWAWHSSHPKGYDDRG

SEQ ID NO: 8962 - protein, 222 aa, Saccharomyces cerevisiae
TTIVGVKFNNGVVIAADTRSTQGPIVADKNCAKLHRISPKIWCAGAGTAADTEAVTQLIGSNIELHSLYTSREPRVVSALQMLKQHLFKYQGHIGAYLIVAGVDPTGSHLFSIHAHGSTDVGYYLSLGSGSLAAMAVLESHWKQDLTKEEAIKLASDAIQAGIWNDLGSGSNVDVCVMEIGKDAEYLRNYLTPNVREEKQKSYKFPRGTTAVLKESIVNICD

SEQ ID NO: 8963 - protein, 401 aa, Pseudomonas fluorescens PfO-1
MDGGIVSRPQQITVLGATGSIGLSTLDVIARHPDRYQAFALSGFTRLSELFALCVRHLPEYAVVPEAGAARNLQDDLRAAGLSTQVLVGEEGLCQVAAAPEVDAVMAAIVGAAGLRPTLAAVEAGKKILLANKEALVMSGALFMQAVRKSGSVLLPIDSEHNAIFQCMPQDFARGLSNVGVRRILLTASGGPFRQTPMAELAHVSPDQACAHPNWSMGRKISVDSASMMNKGLELIEACWLFDAKPSQVEVVIHPQSVIHSLVDYVDGSVLAQLGNPDMRTPIANALAWPERIDSGVAPLDLFAVARLDFEAPDEERFPCLRLARQAAEAGNSAPAMLNAANEVAVAAFLDGRVRYLEIASIIEEVLNLEPVVALDNLDAVFAADATARTLAGQWLSRNGR

SEQ ID NO: 8964 - protein, 441 aa, Streptomyces netropsis
MSHSVTLPSTKDIIELERRHRLPGGQSMTDLAGIVVDRAVNAEVWDRDGKRYIDFFTGVGVSNIGHSHPAFLEELTTQLSRCAVGTFYTDVRSRYFALLAAQLPEQLGEIHMFSTGSEAVEAAVKLARAATGKHEIVSFWGGFHGKTQGALSLHGGPRKHRSGPFPPGSHQVPYADCHHCPLQLEHPECGQRCVDLAEQSIENGSVGDLAAVIVEPVQGTNGNIIPPEGYLRTLRQLADRHGALLILDEVITGFGRTGALFAFEHDPGIAPDVVVLGKAMASGVPASAIVSRSGLVEGTSFAVPSAAASTFGGNPLASAASLATLRVLLDERLPERSHELGKSVSDRLSAWREEFPFVGNADNIGLMIGVELVDPATRLPLPKGITRRLFQELMARGVLAMAYDSRIRLYPPLSIPTHHLEEGLAAFEGAFRAMAPAISRL

SEQ ID NO: 8965 - protein, 134 aa, Oryza sativa
  unsure (1)..(134): unsure at all Xaa locations
PAELRFGVNGVKGDLAPPHPLQASVHKDAKFWADKKRFGAEAIYGSAFNIRKDLDAQILSKXFTVLSPXFQRPPGALPSSMLGYEALTGSLDDFGFEDYLNLPQDSESFRAPDMHHGMEVRLGLSKGPVCPSFN

SEQ ID NO: 8966 - protein, 760 aa, Clostridium thermocellum ATCC 27405
MRRIEMAVDIKKIIKQMTLEEKAGLCSGLDFWHTKPVERLGIPSIMMTDGPHGLRKQREDAEIADINNSVPATCFPSAAGLACSWDRELVERVGAALGEECQAENVSILLGPGANIKRSPLCGRNFEYFSEDPYLSSELAASHIKGVQSQGVGACLKHFAANNQEHRRMTVDTIVDERTLREIYFASFENAVKKARPWVVMCAYNKLNGEYCSENRYLLTEVLKNEWMHDGFVVSDWGAVNDRVSGLDAGLDLEMPTSHGITDKKIVEAVKSGKLSENILNRAVERILKVIFMALENKKENAQYDKDAHHRLARQAAAESMVLLKNEDDVLPLKKSGTIALIGAFVKKPRYQGSGSSHITPTRLDDIYEEIKKAGGDKVNLVYSEGYRLENDGIDEELINEAKKAASSSDVAVVFAGLPDEYESEGFDRTHMSIPENQNRLIEAVAEVQSNIVVVLLNGSPVEMPWIDKVKSVLEAYLGGQALGGALADVLFGEVNPSGKLAETFPVKLSHNPSYLNFPGEDDRVEYKEGLFVGYRYYDTKGIEPLFPFGHGLSYTKFEYSDISVDKKDVSDNSIINVSVKVKNVGKMAGKEIVQLYVKDVKSSVRRPEKELKGFEKVFLNPGEEKTVTFTLDKRAFAYYNTQIKDWHVESGEFLILIGRSSRDIVLKESVRVNSTVKIRKRFTVNSAVEDVMSDSSAAAVLGPVLKEITDALQIDMDNAHDMMAANIKNMPLRSLVGYSQGRLSEEMLEELVDKINNVE

SEQ ID NO: 8967 - protein, 334 aa, Zea mays
PRARRLPCPPTPTGKGETLGRLASGVQGTLMTELWMEVLPPPYFAGQAAGGWFLPDRRAGPGAWTLEENKMFERALARVDWDAPDRWERVAAMLPGRTASDVAAHYDDLECDVGCIEAGFVPFPCYGSGGGGGASQSAGFTFDWDAGGLGFKRSCYVVGGGKRERGPDQERKKGVPWTEEEHKQFLMGLKKYGRGDWRNISRNFVTSRTPTQVASHAQKYFIRLNSGGKDKRRSSIHDITTVNLPDDDAGGTASASPPSVLTSASAPSSTGGGGPVVSEQFGVLVDSKPPAPHHHFVPHPYGNVKLEPVSSHHGGFLDDSVLMQMHCGQLQPLG

SEQ ID NO: 8968 - protein, 211 aa, Zea mays
  unsure (1)..(211): unsure at all Xaa locations
MTASVFPALLLAVAAVLLLPAAEAVWLELPPSGTKCVSEEIQPNVVVLADYAIMYESHPSSHPTVAVKVTSPYGNTVHHNENATTGQFAFTTSEAGNYLACFWIDSVEKGSGTSLNLDWKIGIAAKDWDTIAKKEKIEGVELELRKLEAAVESIHHNLLYLKAREADMRTVSERTNSRVAWFSILSLGVCVAVSVLQLWXLQGFFRKKKLI

SEQ ID NO: 8969 - protein, 375 aa, Sinorhizobium meliloti
MRTRAALAVQAGKPLVVTEVELEGPRAGEVLVEVKATGICHTDDFTLSGADPEGLFPAILGHEGAGIVVDVGPGVTSVKKGDHVIPLYTPECRSCPSCLSRKTNLCTAIRATQGQGLMPDGSSRFSINGDKIHHYMGCSTFSNFTVLPEIALAKVNPDAPFDKICYIGCGVTTGIGAVINTAKVEIGATAIVFGLGGIGLNVIQGLRLAGADMIIGVDLNNDKKPWGEKFGMTHFVNPKEVGDDIVPYLVNLTKRGADQIGGADYTFDCTGNTKVMRQALEASHRGWGKSVIIGVAGAGQEISTRPFQLVTGRTWMGTAFGGARGRTDVPKIVDWYMEGKIEIDPMITHTMPLEDINKGFELMHSGESIRSVVLY

SEQ ID NO: 8970 - protein, 214 aa, Triticum aestivum
MNHFTSQHFSSWSSAAQHPSFFFGKMNRKPGDWDCRSCQHLNFSRRAICQRCGETHPVLVTGGAAAALLRRDDANLAGRRALHGFPAWYLHWCRPLTSARGTGTCTCGGHSWCRSLQLLDSVLRRRVGASVFGTGLGARSDVDPGAWYCSFGAHNAASRSSCFKCAAFKEEAAVNGGAGGFDGDMSRSRGFGFGAVGGMEAAGVLQVQRTEGLR

SEQ ID NO: 8971 - protein, 356 aa, Chloroflexus aurantiacus
MIGLPNSGKTTVFNALTRGHAETAAYSSGQLEPNLATVKVPDPRLEVLAQMFKPRKITYADVQYVDIGGLSGSGRAGGGLPPVLLNYIASADALLHVVRAFDDPAVPHPNGSVDPQRDIAAVDLELAFSDLGIIERRLNRLNAEIPKLPAKEKELRTAERDLLQRLREALEAETPIRALELTEDEARLIRGYQFLTAKPMLIAPNIGEADIANPPQITYPHRQSAVEPLCGKIEAELAQLDDAEAQVFMDDLGITAPARDRVIAASYRLLGLISFLTAGPDEVRAWPIPKGTPAVEAAGTIHSDIQRGFIRAEIVAYHDLINAGSMHEAKKAGLVRMEGKQYIVQDGDICHFLFNV

SEQ ID NO: 8972 - protein, 248 aa, Lactobacillus plantarum WCFS1
MQFDEYRGQTVLVTGAASGIGLAQVQSFLAQGADVIAIDRQPQPSALVTTSALRYEIADVTDTNALVAAIKSGVNVLGKPTVVCNTAGKLDGYQPTLATDLKTWQDILATDLTSQFIVTNAVLPAMLAAQHGVFVNMASIAGLVGGGGGAAYTAAKHAIIGYTKQLDLDYAAQGIRANCIAPGAIDTPMNAADFAGDGKMAKWVASETPAKRWAQPQEVADLTLFLASQHADYIHGTVVPIDGGWLAK

SEQ ID NO: 8973 - protein, 340 aa, Bacillus anthracis str. Ames
MKILILGGTRFLGRAFVEEALQRGHEVTLFNRGTNQEIFLEVEQLIGDRNGDVSSLENRKWDVVINTCGFSPHHIRNVGEVLKDNIEHYIFISSLSVYKDWIPHHIKEDYILQPEPTKEQIKAVENGEISPYEYYGALKVLCEKEAEEYWPRRVLHVRAGLLSGMFDYTDRLPYWIQRVAKGGKVLVPGRKDRPVQIVDIKDVANWGLNMAENKNAGIFNVTGPNYDLTMEELLNTCKKVTHSDAEFVWVDESFMSEHNVQPWTEMPLWIPETFPLDGETKPWKGGFSISIDNAVKAGLTFRRIEETVTDVYEWMKSTDEWELKAGISGEREKELLERWY

SEQ ID NO: 8974 - protein, 251 aa, Zea mays; identical to SEQ ID NO: 5893

SEQ ID NO: 8975 - protein, 198 aa, Zea mays
MSHARASPLWRCPLPGTHPHKASASPIRREPPTARPQGACACSRCSFLMATACHLAAPLGLAPLPRGCASAGVVAVVRCARSSGSKIPRGVAVRATSGGEGATEEVPEIVKAAQDAWDKVEDKYAVATIGVAAIVALWTVVGAIKAIDKLPLLPGVLEIVGIGYTGWFTYRNLVFQPDREALIGKIKSTYKEITGSSN

SEQ ID NO: 8976 - protein, 178 aa, Mycoplasma capricolum
MGLQVGIVGLPNVGKSTLFNAITNSKVEAANYPFATIEPNVGIVEVPDYRLDELYKIFNSKKRVATTIEFVDIAGLIAGASQGEGLGNAFLANIRQTDAICQVVRCFDDKEIMHVENSINPIRDIEIINLELMLADQTTVRKRLDKVLPKFKSGDKLAKIEYDLLNYLLDTLNKGILL

SEQ ID NO: 8977 - protein, 309 aa, Listeria monocytogenes EGD-e
MSITNLLNIKYPIIQGAMAQIAKAPLVAAVSNAGGLGIIASGGMTADMLREEIQKTKALTDKAFGVNLMLMMTNIAELTEVIIEEKVGIVTTGAGTPKTFMPIWKEAGIIVIPVVPSVMIAKRMEKMGADAVIAEGTEAGGHVGETTTMALLPQIVDAVTIPVIGAGGIADGRGIVAALALGAKGVQIGTRFLATDECPVHPDFKAAVIKASDRDTMVTGRKAGAPVRSIKNKMIKEYIRLEEENADRDTLEELTLGSLRKAVQEGDTDNGSVMAGQIAGLITEIKPCKDVIEEMMTDAKKVIAGLELK

SEQ ID NO: 8978 - protein, 473 aa, Sinorhizobium meliloti
MAQKLSLFALTGMVVGSMVGAGIFSLPRTFGVATGPFGAIIAWCIAGGGMYMLARVFQSLAERKPDLDAGVFAYAKEGFGDYPGFLSAFGYWIGSCIGNVSYWVLIKSTLGNFFPVFGDGNTVVAILFASVGIWLFHFMILRGIQQAAFVNTVVTVAKVIPIIAFIIILFFFFKLDLFRLNFWGGEGMPEATLLQQIQATMLATVFVFIGIEGASNYSRYAQARSDIGTATIMGFIGVSALMVLVTLLPYAALTRPEIAAMSQPSMAGVLAAVVGPWGAVFISIGVIVSVLGAYLAWSLVCAEVLYVAARTDDMPRLFGTENQNKVPAAALWLTNIVVQLFVISTYWSQDAFALMLNLTSSMSLIPYMFVAAFGFMLAQRAETYEVRPRERTRDLIIASIAAVYTFFMIVAGGIKFVLLSALLYAPGTILYFWARRERGKRVFNTSIDWLIFATAVIGCFAAIIGLSTGYLTI

SEQ ID NO: 8979 - protein, 357 aa, Nicotiana tabacum
MGGLEVEKTTIGWAARDPSGVLSPYTYTLRNTGPEDVEVKVLYCGLCHTDLHQVKNDLGMSNYPLVPGHEVVGEVVEVGPDVSKFKVGDTVGVGLLVGSCRNCGPCKRDIEQYCNKKIWNCNDVYTDGKPTQGGFAKSMVVDQKFVVKIPEGMAPEQAAPLLCAGITVYSPLNHFGFKQSGLRGGILGLGGVGHMGVKIAKAMGHHVTVISSSNKKRQEALEHLGADDYLVSSDTDKMQEASDSLDYIIDTVPVGHPLEPYLSLLKIDGKLILMGVINTPLQFISPMVMLGRKSITGSFIGSMKETEEMLDFCKEKGVTSQIEIVKMDYINTAMERLEKNDVRYRFVVDVIGSKLDQ

SEQ ID NO: 8980 - protein, 195 aa, Pseudomonas putida KT2440
MGEMTAKKILMLVGDYVEDYEAMVPFQALSMVGHTVHAVCPEKLAGQTVRTAIHDFEGEQTYSEKPGHNFALNYDFVRVRPESYDALLIPGGRAPEYLRLNEKVLDLVRAFDQAGKPIAAVCHGAQLLAAAGVLEGRECSAYPACAPEVRLAGGTFIDIAVDQAHVDGNLVTAPAWPAHPAWLAAFLKVLGTRIV

SEQ ID NO: 8981 - protein, 358 aa, Lactuca sativa
MALLSDLVNLDLSSITDKIIAEYIWIGGSGMDLRSKARTLSGPVSDPSELPKWNYDGSSTGQAPGEDSEVIIYPQAIFKDPFRRGNHILVMCDAYTPAGEPIPTNKRAAAAKIFSNPEVEKEVTWYGIEQEYTLLQKDTNWPLGWPLGGFPGPQGPYYCGIGADKAFGRDIVDAHYKACLYAGVNISGINGEVMPGQWEFQVGPSVGIAAADQIWVARYILERITEIYGVVVSFDPKPIPGDWNGAGAHTNYSTKTMREEGGYEVIKKAIEKLGLRHKEHIAAYGEGNERRLTGRHETADINTFLWGVANRGASIRVGRDTEKEGKGYFEDRRPASNMDPYVVTSMIAETTILWDNKS

SEQ ID NO: 8982 - protein, 184 aa, Zea mays
MNRKPGDWDCRACQHLNFSRRDICQRCSEPRGVADRGGGGGGGDYASFGGRGGSSFGGGFGAAGSDVRPGDWYCSCGAHNFASRSSCFKCSAYKEEAAVNSGAGGFDGDMSRSRGYGFGSGAAGAGAGAGAARTTNRPGWKSGDWICTRSGCNEHNFASRMECFRCNAPRDSGSAAMTYENYLH

SEQ ID NO: 8983 - protein, 179 aa, Medicago truncatula
MGYSNSYLFLGLNLFVFLSSQALADIHVLPMLTVEPNLPSMTDQLNDKQISKIKAYFRLLDKDQDFSIDNDELQTLIRSLGLNPTFFGLMVAMNKFDADGNGTIDFTEEDFIISFPKPDKDHNGFVSASELHYYLTNHGTKVTKEEVDEYVREADVDGDGQINFEEFVKAVTMGGSIVV

SEQ ID NO: 8984 - protein, 182 aa, Shewanella oneidensis MR-1
MAGPLRTYQGIHPQLGDNVYVDAASVLVGDIALDTDASIWPMVAARGDVNHIRIGKRSNVQDGSILHVTRKSASRPEGHPLIIGDDVTIGHKAMLHGCKVGNRVLVGMGAIILDGAILEDDVILGAGSLVPPGKVLESGYLYVGSPAKQARPLTEAELKFLPESADNYVRLKNEYLAEPQPN

SEQ ID NO: 8985 - protein, 261 aa, Hordeum vulgare subsp. vulgare
MLCEGGGGGSTSGSGLRLFGVQVHVAAGRSARAGASMRKSYSMDCLQLAAAPSSIVSPSSSSSSSVLLSIDEGLERASNGYLSDGPHGRLVQERKKGVPWSEEEHRLFLVGLEKLGKGDWRGISRSYVTTRTPTQVASHAQKFFLRQSSMGKKKRRSSLFDMVPICENGIRVSEPLTNNSENASTSLPRYNSPNMASIDLNSTQEDNLAGFPLWSASGASPRAPFPAVLMEQPPHGHGHGHHCSPLDVELSMSLSPPSIGT

SEQ ID NO: 8986 - protein, 344 aa, Sinorhizobium meliloti
MEYRRLGSSGLKVPVLSFGAGTFGGKGPLFGAWGSTDAAEARRLVDICLEAGVNLFDTADVYSDGASEEVLGAAIKGRRDDVMLSTKLSLPVGEGPNAAGSSRSRLISGVEKALKRLGTDYIDLLQLHAFDAGTPVEEVLSTLDTLVRSGKLRYVGVSNFSGWQLMKSLAAADRQGYPRYVANQVYYSLVGRDYEWELMPLGLDQGVGALVWSPLGWGRLTGKIRRGEPWPEGSRLHDTAAFGPPVDEEKLYDVVEVLDAIAQETGKTVPQIAINWLLRRPTVSSVIIGARNEEQLRQNLGAAGWSLTPEEVARLDAASATTAPYPYFPYYRQEGFARINPPVV

SEQ ID NO: 8987 - protein, 374 aa, Reissantia sp. Chase 2095
ALSIAGAVQSQKLAVRAISQLQSLPGGDIKLLCDTAVESVRNLTGYDRVMVYKFHEDEHGEVVAESRRPDLEPYIGLHYPATDIPQASRFLFKQNRVRIIVDCHASPVSVIQDDGLMQPLCLVGSTLRAPHGCHAQYMENMGSIASLAMAVIINGNDEDGMGGRNPTRLWGLVVCHHTSARCIPFPLRYACEFLMQAFGLQLNMELQLAAQLLEKHVLKTQTLLCDMLLRESPTGIVTQSPSIMDLVKCDGAALYYQANYYPVGVTPTEAQIKDIVEWLLAFHGDSTGLSTDSLADAGYPGATSLGDAACGMAVAYITNRDFLFWFRSHTAKEIKWGGAKHHPEDKDDGQRMHPRSSFKAFLEVVKSRSLPWEN

SEQ ID NO: 8988 - protein, 153 aa, Triticum aestivum
  unsure (1)..(153): unsure at all Xaa locations
FAEKXXISPRHICPDERDALXGMLTDSIRASLRARLRPPSSAARKKGTPCDRVLAAGWADTVQGILGWLAPVAHNTVRWRSERSFEQRNVGSGTSVLLLQTLHFADRDKTEDTIIELLVGLNYLWRYGTQLSAKPKLESVGGDVYHDRADYIG

SEQ ID NO: 8989 - protein, 184 aa, Triticum aestivum
MAGVSRSMVAPLLVLNLVMYIVVIGLASWNLNHFINGTTNYAGVAGNGATFYFLLFAILAGVVGAASKLAGVHHVRTWRGDSLATSASSALVAWAITALAFGLACKEIHVGGHRGWRVRVLEAFIIILAFTQLLYVMALHAGLFGNQFGDGLRRGSTSYGDPPFTRGMGPPAAPPPAKGLEQPL

SEQ ID NO: 8990 - protein, 99 aa, Saccharomyces cerevisiae
MSQDFVTLVSKDDKEYEISRSAAMISPTLKAMIEGPFRESKGRIELKQFDSHILEKAVEYLNYYLKYSGVSEDDDEIPEFEIPTEMSLELLLAADYLSI

SEQ ID NO: 8991 - protein, 211 aa, Zea mays; identical to SEQ ID NO: 2877

SEQ ID NO: 8992 - protein, 303 aa, Enterococcus faecalis V583
MKQLQFGTSDETVSSVILGCMRLNGAENPQQVIETAYDHGITFFDHADIYGGGDCETIFGKALKESTIRREDIFIQTKCGIRQGFFDFSKAHILEAVEGSLQRLGVDSVDALLLHRPDTLVEPEEVAEAFHLLEKQGKVRYFGVSNQTPGQIELLKTAVKQPLLANQLQFGIKHTGMVDQGLQTNMEISGSIDYDHGILDYSRLKQMTIQAWSPYQYGYFEGVFIGNEKFPELNQKLSELAEKYQTTPTGLASSWILRHPANMQVIAGSMNLGRIEEIAKAADIVISREDWYDIYRAAGNVLP

SEQ ID NO: 8993 - protein, 154 aa, Zea mays
MVKAVAVLGSSDGVKGTIFFTQVGDGPTTVTGSVSGLKPGLHGFHVHALGDTTNGCMSTGPHYNPASKEHGAPEDENRHAGDLGNVTAGADGNGVANINVTDSQIPLTGPNSIIGRAVVVHADPDDLGKGGHELSKSTGNAGGRVACGIIGLQG

SEQ ID NO: 8994 - protein, 151 aa, Photobacterium leiognathi
QDLTVKMTDLQTGKPVGTIELSQNKYGVGFIPELADLTPGMHGFHIHQNGSCASSEKDGKVVLGGAAGGHYDPEHTNKHGFPWTDDNHKGDLPALFVSANGLATNPVLAPRLTLKELKGHAIMIHAGGDNHSDMPKALGGGGARVACGVIQ

SEQ ID NO: 8995 - protein, 519 aa, Debaryomyces hansenii
MFDVDTVHNFFTSWYGILLAVLIGYHVFDYIRIQIVMKKLGCVSPPVELDGFFGFKLLYTSLKHKKEGTLVNFIKERFETVGKDTFSFRIAGTPVISTKNPENIKALLATQFSDFALGTRHAQFKPLLGDGIFTLDGSGWKHSRAMLRPQFAREQVAHVKSLEPHIQMLAKHVRRAKGGAFDVQSLFFRLTVDSATEFLFGESVESLQDESIGMAKDAVDFDGKAGFAEAFNTAQVYLSIRSLAQKAYFLVNNKEFRSSNEKVHKFADYYVQKALNSSPEELEKHSQDGYIFLYELVKQTRDPHVLRDQLLNILLAGRDTTAGLLSFTFYELARNPQVWLKLKEEIYEKFGKGDDARLEDITFESLKKCEYLKALLNEVLRLYPSVPQNFRVAQKDTSLPRGGGPNRDQPIFIAKGQTVTYTVYAMHRDEQFYGKDSEVFRPERWFEPETRKLGWAFLPFNGGPRICLGQQFALTEASYVIARLAQLFPNLASHDDEYPPRKASHLTMCHQSEVKISLA

SEQ ID NO: 8996 - protein, 305 aa, Glycine max
  unsure (1)..(305): unsure at all Xaa locations
MVQDMKQQDNGESKKKERHIVTWTQEEDDILREQIGIHGTENWAIIASKFKDKTTRQCRRRWYTYLNSDFKKGGWSAEEDMLLCEAQKVFGNRWTEIAKVVSGRTDNAVKNRFSTLCKKRAKYEALANENNTSYINSNNKRIFLQHGCDTDVASESASGKMRRSHISDATEKINFGDRSHKQNGILLNQQSRAPFAVLAQNSHNVNLPDQHRVCNLKFSDYAQNNKIQGTFLKKDDPRINTLMXXXELLSSLALKVGAENMDQSLENAWKVLQEFLXRTKELDIPGCKIPDLQLVDLKDLLAGLK

SEQ ID NO: 8997 - protein, 114 aa, Zea mays
MPAAAEEQAAPAATVKVLFFARARDLTGVADSAVEVPPGSTAGECLARVLAQFPKLEEIRGSVVLALNEEYAADSAPVADGDELAVIPPIRGGVPLLTTADLCGGDKRYEDIDR

SEQ ID NO: 8998 - protein, 135 aa, Triticum aestivum
  unsure (1)..(135): unsure at all Xaa locations
MALKVSFPGELAGAAILESPRSGAFRHLRQAVDFTFRKRDKRAAFLRMTCCSMQQGPLPAWPGRAVAEPERRSWDSPKPISIIGSTGSVGTQTLAIVAENPDKFRVVALAAGSNVTLLADQVQXFKPNLVAIGNE

SEQ ID NO: 8999 - protein, 257 aa, Streptomyces sp. JP95
MKTGLTDKAVLVTGASRGIGRATALAYAAEGARVAITYHSDEAGAKETAERVAAAGGTPHVVRYDLGDEDSVRSAVASVGAEWGGVDVLVAGAVEWGEAIPRPGRKMPAFEEVPPAQWQRVLRTSVDGVFHTVQAVLPLMRDREWGRIVVLGAGLAETGLPGASAYGAAKAALHGLVRSLAWEVGPAGILVNEVVPGQTLTENVLAHASPAFLENKAASLPSGRMNTPEDVARAIVFLGSAANGNIHGEALRVTGGL

SEQ ID NO: 9000 - protein, 181 aa, Glycine max; identical to SEQ ID NO: 940

SEQ ID NO: 9001 - protein, 200 aa, Neurospora crassa
MQFLTAAKLLLSASLFGAAAAHNIVLPAHGRECFHENLHRDDKMTVTFQVGDREFGSAGNLDIDFWITNPLNQYETFEKSISNGDFSFEAKHDGKYVYCFGNEHWGANTKEVSFNVHGIVYISEADAPQDPLEVEVRKLSEMLEMVKDEQSYIVVRERTHRNTAESTNARVKWWNLFIVGVVVGESLFQVWWLKRFFEVC

SEQ ID NO: 9002 - protein, 429 aa, Raphanus sativus
DNSCTLSFLLVFFVLILFRSAFSINTLWSTESLTISNSRTLVSPGNVFELGFFRTTSSSRWYLGIWYKKVSERTYVWVANRDSPLSDSNGTLKITGNNLVILGHSNKSVWSTNLTRINERSPVVAELLANGNFVMRYFNKIGASGFLWQSFDFPTDTLLPEMKLGYDLKKGLNRFLTSWKNSDDPSSGEISYKLDTQRGMPEFYILKDGLRSHRSGPWNGIRFSGIPEDQKSSYMVYSFTENSEEVAYTFRMTNSSIYSRLKISSEGFLERWTTTLESIPWNLFWSAPVDLKCDVYKTCGPYSYCDLNTSPLCNCIQGFMPSNVQQRDLRDPSGGCIRRARLSCSGDGFTRMRNMKLPETTMAIVDRSIGVKECEKRCLSDCNCTAFANADIRNGGTGCVIWTGELEDIRTYLADGQDLYVRLAAADLV

SEQ ID NO: 9003 - protein, 398 aa, Salmonella typhimurium LT2
MKQLTILGSTGSIGCSTLDVVRHNPDSFRVIALVAGKNVARMAEQCLEFSPRYAVMDDTSSAEQLKIMLQQHGSRTEVLSGQQAACEMAALDEVGHVMAAIVGAAGLLPTLAAIRAGKTILLANKESLVTCGRLFMDEVKRSNARLLPVDSEHNAIFQSLPQSIQHNLGYADLEQNGVTSILLTGSGGPFRETPMCDLAAMTPDQACRHPNWSMGRKISVDSATMMNKGLEYIEARWLFNASARQMEVLIHPQSVIHSMVRYQDGSVLAQLGEPDMRTPIAHTMAWPNRVTSGAQPLDFCKLSALTFSAPDYQRYPCLKLAMEAFEQGQAATTALNAANEITVAAFLAQQIRFTDIAGLNLAVLERMDLQEPASVEDVLQVDAIAREVARKQVIRLSR

SEQ ID NO: 9004 - protein, 394 aa, Zea mays subsp. mays
LGAERRARLPPGEMGWPLVGGMWAFLRAFKSGKPDAFIASFVRRFGRTGVYRSFMFSSPTVLVTTAEGCKQVLMDDDAFVTGWPKATVALVGPRSFVAMPHDEHRRIRKLTAAPINGFDALTGYLPFIDSTVTSSLRAWADHGGSVEFLTELRRMTFKIIVQIFLGGADQATTRALERSYTELNYGMRAMAINLPGFAYRGALRARRRLVAVLQGVLDERRAARAKGISGGGVDMMDRLIEAQDERGRRLDDDEIIDVLVMYLNAGHESSGHITMWATVFLQENPDMFARAKAEQEAIMRSIPSSQRGLTLRDFRKMEYLSQVIDETLRLVNISFVSFRQATRDVFVNGYLIPKGWKVQLWYRSVHMDPQVYPDPTKFDPSRWEGHSPRAGTFL

SEQ ID NO: 9005 - protein, 3488 aa, Planktothrix agardhii
MVQNTDYKKLIATTLTKMEVMQARITELETGQREPIAVVGMGCRFPGGITSPEEYWNYCQAGLDAITEVPKSRWDSSKFYAKEPTPGKINTAYCGFIQQDITEFDARFFSISSREATSMDPQQRLLLEVTWEALENANLPPNNLANNTVGVFVGITSVDNAITVYNSSYDQIDSFFGTGNALSAAAGRLSYFFNLRGPCLSIDAACASSLVAVHQAIRSLRNRECEVALVAGVNLILNPAITINLSQSGMLSPDGRCKTFDASANGYGRGEGCGVLVLKTLSEAQKKGDRILAILRGSAVNHNGAAAGLTVPSGPAQQELLRQAIADARITPEDVGYIEAHGTGTSLGDPIEMNAIASVYGKRSQPLYVGSVKTNIGHLEAAAGMAGIIKTILVLQKGEIPAHLHFQTPNPLINWQDNSIKIPTQTIPWPNSNKIPMAGVSSFGFSGTNAHVIVEKAPDIKITEIKQPLPSHLLTISAHNKTALQELARRFSTRLESDPEIGDICYSVAVGRAKLSERLAIVANTLPELQQRLVAFADQNPLDNLTFYQRFTEEKQPKVVFLFTGQGACYPGMGDQLYQTEPTFRQYIDQCAEILARYLEYPLPEILFGKHTDLLNQTAYAQPAIFALEYAVAMLWKSWGITPSLLIGHSVGEYVAACIAGVFSLEAGLALIVKRGQLMQTTKIGKMASIFADEATVISLIQNYSNTVAIAAINHPQQIVISGESASIEEIIINCKQQKIAAQYLSVTQAFHSPLMESILNEFEQEAPGQISYHRPQILLLSGIDGKILENAPDASYWRQQCRQPVQFLASLNTALNKGYNLFLEVGSRPILAEQGRRYQDGAIWLSSLNRGLDIWQTILSALGQLYLNGVYFNPEKFNQNYGYKQVRLPNYPFQRKRFQFQPNIVEETTQITEIYPEPETNKITELKVQNMQKHQLEIRQQLKSILALLLKENQNDIRDDETLLNLGADSIILTDFSRKVEEKFKVKVKIDQLFTDLQTIADIAEYIYNSIEPKNLEPSSEKTKLNQAEIVNFDPEINNYIEVISQLQPIATAYIIKALETLGKKLNPGETWTTESIKQTLPIAPKYQVLVTRYLQDLEQANIIQNQGNIWTVKNLPASFSLPEAIENLQKTCPSAKPELEMLQRCGENLAEVLKGNIDPLTLIFPEGSVTHAESIYGNSPVSRLMNQRVAEAINLTLNNFSPSINPYKIIEIGGGTGATSETILNNLNLNRVSYSFSELSPFLLNQARQKFQSKYNLNFHQLDIEKSPISQGISSHSYHIVVAANVLHATQNITETLTNIRELLLPGGYLILLETVENNSWLNLTFGLTPGWWRFQDKELRSDTPLLSGESWCSVLKRCGFATANSFSKQNNISIYNGQELIIACAAAEILPIPQTPKATQFQAVTSGKEALMMAQLQSLKDLKDLHEKTIIKQLEILQSVGITPNIITEKPIIQTEIIPSQNYQIETVSPAQREQTKLPQKPSSPSLNPLALKLNESKSLTEKQQDFINNLQTIYNQKTAKSKAYSQNSRQTMVDVKPTIDFRMTLKEFQYPIVSESAQGACFRDIDGNDYIDLAMGFGVNFFGHSPDFVIAAVQEQMQQGIGLGMQSNLAAETAALISEMAGVERVAFSNTGTEAIMAAVRIARSRTKRPKIVIFSGSYHGTFDGILARVGEDSTSIPVSLGTPSGMVEDVIVLSYGVEESLEIIAAHSDDLAAVLVEPVQSRKPDLQPQEFLQKLRKLTQEKGIALIFDEIITGFRIAPGGAQQWFNIEADIVIYGKAIGGGLPISMICGKADFSDTVDGGFWKYGDDSHPQTELTAFGGTFCRHPLALAACRAVLLYLKEQSPTIQERVNQLTQRLATEVNQFFQEIGIPIRIVNFGSLFRFEPFGAYSLFLQPIELPLFYYLLNLKGIYTWEKRVCFLSTCHTNEDIDKVIATVKSAIIELQQGGFFENAKLLKVNKQDKNVEREDEDGRENLNPINQQFPTSEAQRQLWLLAELDRNASASYNVTASLELRGSLDISALQEAINQVINRHESLRTQILEQGEVQEVINSVKIQLTLINLNDEQNPQAMALGLRSQFSKKPFDLSIAPLFDVILIRLNSDHYLLSLKTHHIVVDGWSLGLILNEIGQLYSTQIGATTDPLEFPMQFRQYLALREQEAQSPQMLEHRDFWLKTYQGEIPAFELPTDFPRPAIKTYTGGQESKIVTPELWQNLQTVGRQNQATLFMTMFAAYTAFLSRISGHNDLVIGIPISGRQIEGSDQLVGFCSQFLPIRIKVDITHSFVEHLQRTKQTLIAAFRHQSYTLEDLLAALQLQRDFSRSPLISVSFNIDPSLTLPDFEGLKVSLPPEPIGYTPFDVGFNFIEVNNNLIIYCNYNTELFKQETIKQFLESFEILLDGVINNANSWLHQLPLLTKLQRENLLAELIGETRELPENATIIDDFVSQVNSTPNAPALVCGETTLTYQELNQKVNRLTHYLQHQYQLGAGKIMGLMMGRNQNLIISILAIFKTGATYVPIDAEYPNNRIDFIIKDSGCHVCLTESNLISRIPQEIETICLDKIDNILAKYGNQEPNIPPDSSQIAYIFYTSGSTGNPKGVMGRHLSILNVIQSLRLTFNLDKYPEWRYIFTAAVTHDPSIRNIFLPLTIGAPLYIYEVKYIGHLVSFLQENQINALHTTPSIYREILALLEPGETISSLKYISVGGEKLDRETALALRQLFPGEIVSNVYGSTETCVGVSQYKINENLDTDVPLGQVFHNNRLFLLDEFNNPVPLHIVGEICVEGAALASGYHNLPQITKEKFKPGFFDQKTTMFRTGDLGKQTAPGVIEFMGRKDNQVKVNGYRIDPEEIEYQLNRYPQIERAIILPISVNNQTQLSAYCQTDKQIEISEIREFLANFLPVYMIPSYFIFLKQFPLTKHGKLDLNSMIALNETGKSTQVNYVAPRNNLESNLVRIWEKILTKHPIGIFDNFFEIGGHSLMLSRIVTHVHKELNVSVKLADFFKVPTIAGLAVLVSKTEYDYQEPIPTIPLQKSYPMSHGQRRLWALEFLDQNHNAYGMPSVYQFNGNLNIAAFENAFQQLIQRHEILRTTFSLIDNQPRQVVHNQMNFGIKQIDLTNYLETEQAKLIAEAISHNAKTTFDLEVGPLLRVNLLKLSQENYIVLFNMHHIISDGWSAGVLIKDFLGHYHTYRQQNSELLPPLKIHYKDYTDWQENQLKTSKLQAQRDYWLTKLTPAPQHLNLPFDYPRPAVQSFQGNTVIWKPNSELIEHFQILIKDKEASLFMGLLTLVKSFLFRYTEQNEITVGSPIAGRNHPDLESQIGFYVNTLVLRDQIRADDSFLNVLTTVKTTTLEAYENQEYPFDKIVSDLNLPRDPSRNTLFDVAVALQNNQNVDLALEGITVNSIDPEMTTAKFDLEFIFVEEGELYLKLIYNTDIFINERILLMINLLENLMEQVIKYPDKPLIKLSLESSNFGQEYSDLFAEDFNF

SEQ ID NO: 9006 - protein, 181 aa, Xanthomonas axonopodis pv. citri str. 306
MTPIRSFLDHTPQLGARVYVDPACTIIGKVSLGDDVSIWPGTVIRGDVNHVQIGARTNVQDGTIIHVSHHSPFNKAGYPTVIGEDVTVGHGTILHACTIEDLCLIGMGACVLDGATVRRYGFVGAGAVVGPGKVVGEAELWLGNPARLARTLSDKEIESLHYSAQHYVRLKDQYLGASPAS

SEQ ID NO: 9007 - protein, 310 aa, Triticum aestivum
MAPPRTVICVGDVHGYISKLESLWANLQSALPADAFAAALVIFLGDYNDRGPDTRRVLDFLLALPARHPAQRHVFLCGNHDLAFAAFVGALPPPPDGSPFAATWDQYIDNEAHEGWFRGPGHEDMHVQGRRWGGVIKERWNPKKGLPYKGSIYDAQPTFESYGVAHGSPDLMKAVPEEHKKFLHDLVWVHEEEDVRIDTDGGQILCKLIAVHAGLEKSLDLNEQLRVLRTRDTRVPKVQMLSGRQDVWNIPQDLAGKQTIVVSGHHGKLHVDGLRFIIDEGGGYADKPIAAVVFPSKEVIRSTEGTASQN

SEQ ID NO: 9008 - protein, 129 aa, Zea mays
MAATASLTTTAPSPPALLKASAPLLISFRPVSRHCKNLCIKTKATENDQSAKKHQKVKSILCQDCEGNGAIVCTKCEGNGVNSVDYFEGRFKAGSLCWLCRGKREILCGNCNGAGFLGGFLSTFDETAQ

SEQ ID NO: 9009 - protein, 206 aa, Cytophaga hutchinsonii
AMYTKKNKQFVLMGLTYSLMMFVSSCLGINSDVKNRPSATDSMATVDKTQSIYSIKVTTLDGQPFDLSTLKGKKILIVNTASKCGYTPQYEELQQLHALHGDSVAVLGFPCNDFGGQESGSESEIGAFCTKNYGVTFQMFEKVHIKGNEQHPLYKWLTDPALNGWNKDAPTWNFCKYLINEKGELVNFFGSGVKPMSKTVLDAIRK

SEQ ID NO: 9010 - protein, 392 aa, Aquilegia sp. SM-1999
DLEPVNPADVPVTAAGAMKSYKLAAKAISKLQSLPSGNIPFLCEVLVQEISDLTGYDRVMVYKFHEDDHGEVIAEWKISDLEPYLGLHYPATDIPQASRFLFMKNKVRMIWDCTAAPVKVIQDTNLPQPLSLGGSTLRAPHGCHAQYMANMGSVASLVMSVTINDDDDDEVVNGQQKGRKLWGLVVCHHTCPRFVPFPLRYACEFLIQVFSMQINKEVELARQLREKHILQTKTVLCDMLLRDAPIGIFTQSPNVMDLVKCNGAALYYHQKFWLLGVTPTEAQIRDIVEWLVEYHNASTGLSTDSLVEAGYPGASILGNAVCGMAAAKITSKDFLFWFRSHTANEIKWGGAKHDPTEKDDGWKMHPRSSFKAFLDVVKHRSVPWEDIEMDAI

SEQ ID NO: 9011 - protein, 876 aa, Pinus sylvestris
DDHGEVISEMRRYDLEPYLGLHYPATDIPQASRFLFMRNRVRMICDCYAQPVAVIQDERLPRDLSFCGSTLRAPHGCHAQYMANMGSIASLVMAVVINEKELDGDSEGQMQQKGRRLWGLVVCHHTSPRYVPFPLRYACEFLMQVFGIQLNKEVELAAQIREKQILRTQTLLCDMLLRDTPLGIVTQKPNIMDLVRCDGAALYYERNFWLLGVTPTEAQIQDIVAWLSEHHMDSTGLSTDSLVYAGYPGAESLGNAVCGIAAVRINSKDFLFWFRSHTAKEIKWGGAKHDLQERDDGKKMHPRSSFNAFLEVVKMRSLSWEDVEMDAIHSLQLILRGSRKETDGSGRNISINRQLNDLKLQEMDELNAVTNEMVRLIETATAPILAVDAYGVVNGWNRKAAELTGLSVEEVLGEPLINLVEETSAENVKRMLHLALQGVEEQNVQIELKRHGSEEDKGPVVLLVNACSSRDLKENVVGVCFVAQDVTGQKIVMDKFTRIQGDYRAIVQNPSPLIPPIFGTDECGCVPENSAMEKLSGWKREEIIDKMLLGEVFGTRTACCRLKGQNALTQLRIILNSSMTGQETEKFPFGFFDRHGKYVETLLSANKKLDEEGKITGVFCFLHIASPELQQALYVQHMLEQAAMKRLQALTYLRLEIKNPLYGIMFTQKMMERTDFLREDQRQLVETSALCQKQILKILDDMDLESIEDRYLDLDTVEFTLGALLDAVISQGMIQSEEKGLEIGYDLPREITTTGLYGDQSRLQQILANFLVTVIQFTPAEKWVRIKVSPTKRHLGGGVYVIGIEFRITHPGPGLPEKLVQQMFNFDPDMSQEGFGLLICRKLVRLMNGDVQYLRGGGTSSFVIVVELATSQNEEC

SEQ ID NO: 9012 - protein, 458 aa, Halobacterium sp. NRC-1
MDRETAEPDVRSMPGEKAAEWVNFHHNHAAPSTYVYDFVWDITEDAIGPFCTDVDGNVLMDFTSHVAAAPFGYNNPKIMDRLESFDLVDPLKMAGQDFYAGGGTDPESPEIPTATQLLDRLTDITAHYDLDTVFLSNTGAEAVENAIKICYNNGGHRALTFDGAFHGRTLGALSLNRSKAIHRKGFPEIGGVVSVPYCTCEGECSCGWKTNGPGGNVAADKLHHDRGVIDPEEVAYLIMEPQQGEGGYRVPNDDFIADIADIQRTHDIPVISDEIQAGLGRTGELWGIDHTEIEPDVITSAKGLRVGATVANEDLFPSETGRLSSTWGAGDIVAAAQGVATIDAITSDGLLDHVVARGEQTTDRLHDADPDFVTDVRGRGLMLAVEFDTKKRREAVVNACVKRGLLVLGCGHKTVRLLPPLDVTEREIDIAVDILLEALDDPDVRHAGTSKVEGEPTA

SEQ ID NO: 9013 - protein, 266 aa, Streptomyces avermitilis MA-4680
MNAPLVLPGPHATSLDLGGRTALVTGAAGGIGRACALRLAAAGAKVRAVDRDPEGLDTLAEAARGLAGTVEPQVLDLTDLDAAELSAAGTDVLVNNAGLQLVRPIEEFPPEAFHTVLTVMLEAPFRLIRGALPHMYGQGWGRIVNVSSVHGLRASAFKSAYVAAKHGLEGLSKTAALEGAPHGVTSNCVNPAYVRTPLVEKQLVDQAAAHGIPEERVLSEVLLRDSAVKRLIEPAEVAEAVAYLCSPQASFITGTSLALDGGWTAH

SEQ ID NO: 9014 - protein, 172 aa, Glycine max
MSRLMEPLVVGRVIGEVVDIFSPSVKMNVTYSTKQVANGHELMPSTIMAKPRVEIGGDDMRTAYTLIMTDPDAPSPSDPCLREHLHWMVTDIPGTTDVSFGKEIVGYESPKPVIGIHRYVFILFKQRGRQTVRPPSSRDHFNTRRFSEENGLGLPVAAVYFNAQRETAARRR

SEQ ID NO: 9015 - protein, 433 aa, Glycine max
  unsure (1)..(433): unsure at all Xaa locations
HNSRETSLLALPLLQSPPPAWPGXAIPEPSDFKTWDGQKPISVLGSTGSIGTQTLSIVAEFPERFKVVSLAAGXSNITLLADQIKTFKPEVVGLRNESLIDELKEALADVDXNPEIIPGEQGVIEAARHPDATTVVTGIVGCAGLKPTVAAIEAGKDIALAXKETMIAGXPFVLPLAHKHNIKILPADSEHSAIFQSIQGLPKGALRKILLTGSGGAFREWPAEKMKDIKLADALKHPIWSLGRKITIDSATLFNKGXLEVIEAHYLFGASYDDIEIVIHPQSIIHSLVETQDSSVIAQLGIPDMRLPXLYTLSWPERIYCSEVTWPRLDLSKYGSLTFYAPDDKKFPSVNLCYAAGRXAGGTMTGVLSAANEKAVEMFVEEKISYLDIFKVVELTCQEHQKELVASPSLEEIIHYDQWARQYAASLQKASSV

SEQ ID NO: 9016 - protein, 406 aa, Escherichia coli
MAIEQTAITRATFDEVILPIYAPAEFIPVKGQGSRIWDQQGKEYVDFAGGIAVTALGHCHPALVNALKTQGETLWHISNVFTNEPALRLGRKLIEATFAERVVFMNSGTEANETAFKLARHYACVRHSPFKTKIIAFHNAFHGRSLFTVSVGGQPKYSDGFGPKPADIIHVPFNDLHAVKAVMDDHTCAVVVEPIQGEGGVTAATPEFLQGLRELCDQHQALLVFDEVQCGMGRTGDLFAYMHYALAPDILTSAKALGGGFPISAMLTTAEIASAFHPGSHGSTYGGNPLACAVAGAAFDIINTPEVLEGIQAKRQRFVDHLQKIDQQYDVFSDIRGMGLLIGAELKPQYKGRARDFLYAGAEAGVMVLNAGPDVMRFAPSLVVEDADIDEGMQRFAHAVAKVVGA

SEQ ID NO: 9017 - protein, 159 aa, Phaseolus acutifolius
MLVGAYPFEDQDDPRNFRKTIQRIMAVQYKIPDYVHISQDCRHLLSRIFVANPLRRISLKEIKNHPWFLKNLPRELTESAQALYYQRGNPSFSVQSVEEIMKIVGEARDPPPVSRPVKGFGWDGEEDEGEEDVEEEEDEEDEYDKRVKEVHASGEFQIS

SEQ ID NO: 9018 - protein, 394 aa, Deinococcus radiodurans
MKLLVVGGAGYIGSHTVRQLRAAGHEVAVFDNLSSGHAEALPGEVELIRGDLLDAASIRAALEAQKPDAIIHFAALIEVGESMRAPGRYYRNNVVGTLNLLQSIVETRKVPLVFSSTAAVYGTTDAVPIPEDAAMQPESVYGETKRMSEQMIHAFHVAHGLPYTVLRYFNVCGAAPGGDIGEAHPNKTHLIELACLTALGQREKMMIFGDDYPTPDGTCIRDYVHVQDLADAHVLAVEALHAGKTDAATYNVGLGHGFSVREVLDAVDAVVGTPLQRELAPRRAGDPPRLVADASRIVDQLGFAPKFTDLRDIVQTAWDWHRTHPQGLGSNNKDPSPLPLAGPLLRSFTSLPLVEGQTAQHKQRTEISPPFLLPLLYSSSSTTALPRVASRRAA

SEQ ID NO: 9019 - protein, 247 aa, Xanthomonas axonopodis pv. citri str. 306
MSKPLQGEIALVTGASRGIGAAIADTLAAHGATVIGTATSASGAAAIGERLAAHGGHGRELNVTDAAAVDGVIDAIGKEFGAISILVNNAGITRDNLLMRMKDDDWQAIIDTNLTSVFRTSKAVMRGMIKARKGRIINIASVVGVTGNPGQTNYAAAKAGIIAFSKSLAKEIGSRGVTVNVVAPGFIDTDMTKALPDEARTALLQQIALGHLGEPEDIANAVAFLAGPTARYITGETLHVNGGMYMP

SEQ ID NO: 9020 - protein, 175 aa, Zea mays
MDMAEEEAAAGAGGSSSSSGKPVMVVGIDDSDHSYYALNWTLQHFFVAGQPQQYQLVVLTAKPPASSVIGIAGVGSAELLPKVETDLKRSVARVMDKAKKLCTETEVTDVGYEAIEGDARSVICDAVERHHAEILVVGCHAYSKWKRAVLGSVSDYCAHHAHCTVMIVKRPKHKH

SEQ ID NO: 9021 - protein, 462 aa, Xanthomonas axonopodis pv. citri str. 306
MPLPTDSVAETAAPAAPALRHALKPRQLMMMGLGTAIGAGLFLGSGVGIHAAGPAVLISYLIAGALVIIVMNALGEMAAAKPASGAFSVYAADAMGPTAGATVGWLWWFQIVVVIAAEAVGAAGLLATVWPALPVPLLSLLFMATFTAINLLGVRNFGEFEFWFAILKVLAIVVFLLIGVALLAGWLPGVASPGLSNFTQNGGFAPKGLAGIGSALLVVVFAFGGTEIVAVAAAETADPGRSLARTIRTVAWRILVFYIGSISVIVAVVPWTSAALSSPFAAVLEVARIPGAATAITLVAVVALLSALNANLYGASRMIFSLAQRGEAPRLLARTSGEQVPLVAVIASVLFGFAAAALELLYPNKVLPMLLNIVGATCLLVWTISLVSQLILRARADRAGLALPFRMRGYPFLTVLALVILAVIFVLLASSADTRAQFLSMVALTAVIAAVSEIARRVRARM

SEQ ID NO: 9022 - protein, 346 aa, Rhodococcus ruber
MKALQYTEIGSEPVVVDVPTPAPGPGEILLKVTAAGLCHSDIFVMDMPAEQYIYGLPLTLGHEGVGTVAELGAGVTGFETGDAVAVYGPWGCGACHACARGRENYCTRAAELGITPPGLGSPGSMAEYMIVDSARHLVPIGDLDPVAAVPLTDAGLTPYHAISRVLPLLGPGSTAVVIGVGGLGHVGIQILRAVSAARVIAVDLDDDRLALAREVGADAAVKSGAGAADAIRELTGGEGATAVFDFVGAQSTIDTAQQVVAIDGHISVVGIHAGAHAKVGFFMIPFGASVVTPYWGTRSELMDVVDLARAGRLDIHTETFTLDEGPTAYRRLREGSIRGRGVVVPG

SEQ ID NO: 9023 - protein, 687 aa, Raphanus sativus
MLARVCGFKCSSSPAESAARLFCTRSIRDTLAKASGESCEAGFGGESLKLQSGFHEIKGLEDAIDLFSDMLRSRPLPSVVDFCKLMGVVVRMERPDLVISLYQKMERKQIRCDIYSFTILIKCFCSCSKLPFALSTFGKITKLGLHPDVVTFNTLLHGLCVEDRVSEALNLFHQMFETTCRPNVVTFTTLMNGLCREGRIVEAVALLDRMMEDGLQPTQITYGTIVDGMCKKGDTVSALNLLRKMEEVSHIIPNVVIYSAIIDSLCKDGRHSDAQNLFTEMQEKGIFPDLFTYNSMIVGFCSSGRWSDAEQLLQEMLERKISPDVVTYNALINAFVKEGKFFEAEELYDEMLPRGIIPNTITYSSMIDGFCKQNRLDAAEHMFYLMATKGCSPNLITFNTLIDGYCGAKRIDDGMELLHEMTETGLVADTTTYNTLIHGFYLVGDLNAALDLLQEMISSGLCPDIVTCDTLLDGLCDNGKLKDALEMFKVMQKSKKDLDASHPFNGVEPDVQTYNILISGLINEGKFLEAEELYEEMPHRGIVPDTITYSSMIDGLCKQSRLDEATQMFDSMGSKSFSPNVVTFTTLINGYCKAGRVDDGLELFCEMGRRGIVANAITYITLICGFRKVGNINGALDIFQEMISSGVYPDTITIRNMLTGLWSKEELKRAVAMLEKLQMSMDLSFGG

SEQ ID NO: 9024 - protein, 228 aa, Gossypium rotundifolium
FTSLCHTDVYFWEAKGQTPLFPRIFGHEAGGIVESVGEGVTHLKPGDHVLPVFTGECGNCRHCKSKESNMCDLLRINTDRGVMLSDGKTRFSINGKPIYHFVGTSTFSEYTVAHVGSVAKINPAAPLDKVCILSCGISTGLGATLNVAKPPKGSTVAIFGLGAVGLAAAEGARIAGASRIIGVDLNPNRFEEAKKFGCTEFVNPKDHNKPVQEVLAEMTNGGVDRSVE

SEQ ID NO: 9025 - protein, 355 aa, Selenomonas ruminantium
MAYKITVIPGDGIGQEITDSAVEVLKAADKKFNLGLEFDYHDAGGTAYDKFGTPLPQETIDACKAADGVLFGAVGGDKWDKVDPAKRPEKAILGLRKALGLYANLRPVKVADALVEYSPLKPELVKGVDLVIVRELIGGIYFGEKCESEQHNGAERAWDLENYSVPEVERIANLAFETAKLRRGKVTSVDKSNVLATSRLWRRTVAKVAENYPEVECNNLYVDNCAMQIAVNPTQFDVIVTGNLFGDILSDEAAVVGGSIGMLPSASIGECTSLYEPIHGSAPDIAGQGIANPIGTILSAAMLLRYSLHEEAAADAIEAAVDKALGEGYRTPDLWKEGFTKVNTSEITKIISERV

SEQ ID NO: 9026 - protein, 375 aa, Triticum aestivum
MMKSGEEVSQGQQMNDFSEEKAAGESGDGRKIETSPSINLNSLPAIAPATTEIGVLHGALESEANDASTHNGDESSGTDLLILLPVAVPVEAEVPPRAARKTASALPRHCASHAGEKDALVTVAENEGCADGGDNHKGVHVLSIVKKDESEEIVDSINPVTVAEYREEKGTAGSTSAITAVRAPGSRSSCFHGVTRHRWSGKYEAHLWDSTCRVEGRRRKGKQVYLGSYDTEQKAARAYDVAALKFFGLNTKLNFSISEYEKELADIQDMSPEECVTYLRRRSSCFSRGASIYRGVTRRQKDGRWQARIGLIAGTRDIYLGTFKTEEEAAEAYDIAAIEIRGKNAVTNFDRSNYMDRGMHCIEGAGLKLLATKPE

SEQ ID NO: 9027 - protein, 324 aa, Fusobacterium nucleatum subsp. nucleatum ATCC 25586
MQTILVTGGAGYIGSHAVVELLDNNYNVVVIDTLENGFKEFVDKRAKFYQGNVQDYELMSRIFQENKIEAVMHFAGYIRVPESVDDPNKYYLNNTYTTMCLIQSMVKHNIKNIIFSSTAAVYGEITEDNPIDEKHSTIPINPYGASKLMSERIIRDCAKAYGLNYSIFRYFNVAGAHEKYPIGQKGAGVTSLITLTLQAAKDSNRILEVFGDDFPTKDGTGIRDYIHVVDLVKAHVLSLKLLFKNESNIFNLGNGNGFSVLETVEAARKVTNKEIICKIAARRKGDPACVIASSEKAKKILGWKAQYTNVEKIIETGWHFVEKQ

SEQ ID NO: 9028 - protein, 167 aa, Triticum aestivum
  unsure (1)..(167): unsure at all Xaa locations
EVGWLLLPHRFVFRFWFVGEREEMAASDVEYRCFVGGLAWATDDHSLNNAFSTYGEVLESKIILDRETQRSRGFGFVTFSTEDAMRSAIEGMNGKELDGRNITVNEAQSRGGRGGGGGGYGGGRRDGGGYGGGGGGYGGGRGXYGGRGGYVVQTRGGGXNNDGNWRN

SEQ ID NO: 9029 - protein, 292 aa, Zea mays
MSQEQPRRPSGHEETSGGGEQGAVRYGDVFPAVSGGLAEKPVAPQDAATMQSAENLVFGQTLKGGPAAAMQSAATANERMGAVGHDQATDATAVQGVTVSETRVPGGGRIVTEFVAGQAVGQYLARDDDGGGGIAGPGAGAGVAGKDITKVTIGEALEATALAAGDAPVERSDAARIQAAEARATGLDANVPGGLARQAQSAAAANSWAWGDEDKATLGDVLANATAMLVADKPVESADAFGVAGAKNRNRNDGTARPGGVAASMARCLCTGSPPLRGGGLPAPFSPRANPW

SEQ ID NO: 9030 - protein, 345 aa, Arabidopsis thaliana
MTATNKQVVLKNYVSGFPKESDFDFKTTTVEFKLPGGSNSVLVKNLYLSCDPYMRIRMGKPDPSTAALAQAYAPGKPIFGYGVSRVIESGHPDYKKGDLLWGIVGWEEYSVITPMTHMHFKIQHTDIPLSYYTGLLGMPGMTAYAGFYEVCSPKEGETVYVSAASGAVGQLVGQFAKMMGCYVVGSAGSTEKVDLLKTKFGFDDAFNYKEEPDLSAALKRCFPTGIDIYFENVGGKMLDAVLLNMNPHGRIAVCGMISQYNLENQEGVHNLSNIIYKRIRIQGFAVFDFYEKYSKFLDFVLPHIKEGKITYVEDVADGLEKGPEALVGLFHGKNVGKQVVVIARE

SEQ ID NO: 9031 - protein, 323 aa, Trichodesmium erythraeum IMS101
MAYEREKQIAIESALAAAKLCEQVRINIPPAMEKGDKSPVTVADYGAQALICKALAEAFPNDPVVGEEDATELQTPEMAENLTKVTNYVQEQITNATPEQVVQWINQGNGKVGPRYWTLDPIDGTKGFLRQDQYAVALALVEEGEVKVGVLACPAMPVENNQPGMLYVAVRGEGAAMMPIAGGELTPIQVVQADDTAHLRFVESVESSHGDQDRQNAVAKAVGITAASVRVDSQAKYGIVASGQAALYLRLPSPKSPNYRENIWDHAAGAIVVEEAGGRVSDIHGKPLNFADGAKMLENRGIVVSNKIIHDQVLSILKQLSVK

SEQ ID NO: 9032 - protein, 331 aa, Zea mays
EKSKLIRRWGISKPTYLVLIFLDVYISSNAFECNQRKFEGSAILIKGLAFFKYLGIKPWFSIVCWLWKKVNSSEDGGFQSFLDNVQYKATGILRYERIFGDGYVSTGGAETTKEFVEKLNLKPGQKVLDVGCGIGGGDFYMAEKYGTHVVGIDLSINMIMFALERSIGCKCLVEFEVADCTTKTYPDHMFDVIYSRDTILHIQDKPSLFKSFFKWLKPGGKVLISDYCKSPGKPSEEFATYIKQRGYDLHDVEAYGQMLKNAGFSHVIAEDRTDQFLSVLQKELDKFEKNKDDFLSEFAQEDYDDIVNGWKAKLQRSSAGEQRWGLFVATK

SEQ ID NO: 9033 - protein, 180 aa, Glycine max
  unsure (1)..(180): unsure at all Xaa locations
MADLKSTFLNVYSVLKSEXLHDPAFEFSDDARNWVDRMLDYNVPGGKLNRGLSVIDSYRLLKEGQALNDDEIFHASALGWCIEWLQAYFLVLDDIMDNSHTRRGQPCWFRVPKVGMIAANDGVLLRNHIPRILKKHFRGKPYYVDLLDLFNEVVEFQTASGQMIDLITTXEGEKDLSEYY

SEQ ID NO: 9034 - protein, 106 aa, Glycine max
MAMAKLVCVLLLAFLGISMITTQVMATDSAYHLDGRSYGPGSLKTSQCPSECTRRCSQTQYHKPCMFFCQKCCKACLCVPPGYYGNKSVCPCYNNWKNKRGGPKCP

SEQ ID NO: 9035 - protein, 278 aa, Geobacter metallireducens
MGSAIRRHHRRHPCDNRGNRSGHEIPEPPTRLCTRGDPAMSAEMQQVWVYLSTSPLLWLTLTLIAYQIGTWVFRRLDCPPLLNPVLTAIILLVVLLKVSGIDYQTYFRGAQFIHFLLGPATVALAIPLYREMEVIRKSFIPILITLAVGSVAAIISAVGIVWALGGETIILLSVAPKSVTTPIAMGISEQIGGLPSLTAVVVVLTGITGAVGGDFILNLLRIKDDNARGMALGVASHGIGTAHAIQKSRMAGAFSALAMALNGLFTALLLPVLVHLMQ

SEQ ID NO: 9036 - protein, 265 aa, Glycine max
MRVGKLSIGDDKPAASGFDICPPKQAGSVVLKPPLFLKNREKRQSSNSRSNVVVSLRPGMVFLKGYLSLSDQEMIVKRCRELGVGSGGFYQPGYGEDTKMHLKMMCLGKNWDPQSGQYGDRRPFDGAKPPQIPPEFHSHVHSALKDSNALLPSISPDICIVNFYSQTGRLGLHQDKDESPDSLRLGLPVISFSIGDSADFLYADHRDLDQPQKLLLQSGDVLIFGGPSRNTFHGVASIHPNTAPNLLLQHTNLRPGRLNLTFRRY

SEQ ID NO: 9037 - protein, 286 aa, Zea mays; identical to SEQ ID NO: 2885

SEQ ID NO: 9038 - protein, 480 aa, Triticum aestivum
  unsure (1)..(480): unsure at all Xaa locations
MALKASFPGELAALLDSGNTRSRRGAAFRPRQHQRKVDFTFQRRDKRAAYLRTCCSMQQGPPPAWPGRAVVEPERRSWEGPKPISIVGSTGSIGTQTLDIVAENPDKFRVVALAAGSNVTLLADQVRTFKPKLVAVRNESLLNELKEALAGCEEMPEIIPGEQGVIEVARHPDAVTVVTGIVGCAGLKPTVAAIEAGKDIALANKETLIAGGPFVLPLAHKHNVKILPADSEHSAIFQCIQGLSEGSLRRVILTASGGAFRDWPVEKLKDVKVADALKHPNWSMGKKITVDSATLFNKGLEVIEAHYLFGAEYDDIEIVIHPQSIIHSMIETQDSSVLAQLGWPDMRLXPILYTLSWPDRVYCSEVTWPRLDLCKLGSLTFKAPDNVKYPSVDLAYAAGRAGGTMTGVLSAANEKAVELFIDEKISYLDIFKVVEMTCDAHRNELVTRPSLEEIIHYDQWARKFAANLEPSSSGRSPVLA

SEQ ID NO: 9039 - protein, 552 aa, Pisum sativum
MVAAPISTVKLTDANLHTRFHSSSSSTPSTLSLPLSLHFHFSSHSKRFSSIRCQSVNGEKRKQSSRNVFDNASNLLTSLLSGANLGSMPIAEGAVTDLFDRPLFFSLYDWFLEHGSVYKLAFGPKAFVVVSDPIVARHILRENAFSYDKGVLADILEPIMGKGLIPADLETWKQRRRVIAPGFHTSYLEAMVQLFTSCSERTVLKVNELLEGEGRDGQKSVELDLEAEFSNLALEIIGLGVFNYDFGSVTNESPVIKAVYGTLFEAEHRSTFYIPYWKFPLARWIVPRQRKFQDDLKVINTCLDGLIRNAKESRQETDVEKLQQRDYSNLKDASLLRFLVDMRGVDVDDRQLRDDLMTMLIAGHETTAAVLTWAVFLLAQNPDKMKKAQAEVDLVLGMGKPTFELLKKLEYIRLIVVETLRLYPQPPLLIRRSLKPDVLPGGHKGDKDGYTIPAGTDVFISVYNLHRSPYFWDRPNDFEPERFLVQNNNEEVEGWAGFDPSRSPGALYPNEIISDFAFLPFGGGPRKCVGDQFALMESTVALVCCYRISMWN

SEQ ID NO: 9040 - protein, 594 aa, Schizosaccharomyces pombe
MTSFTESKKLDEIESPVPEIIVPSTTNGNGTIESYKEKSVGTSFLDFFRSYKLRPDNEFAEVHNSEDFLKPRHLQMIAIGSCIGTGLFVSTGKSLKNAGPGSLMINFIILSAMILALILSLGEMCCFLPNQSSITMYTGRLLNNNIGFAQSWLYFWIWLTVLPSEISAACEVVDFWTTQHLNPAIWVTIFLAYVVLVNAFGARSYGECEFVSSFLKVVIVIIFFFVAIIINCGAAPKGGYIGAHYWHHPGSFRNGFKGFCSVFISSAYSLSGTENIGTAAGNTSNPQRAIPSAVKKVFYRMGFFYIITIFLITLVVPYDNPDLGNVSPFIIAIKNGGIHVLPHITNAVILVSVLSVGNAAVFAASRNAMALVKQGWAPRFLGRVDQKGRPVISYLCSLAMACIAYVNAAPDGSVVFDWLMSVSGGGAFVIWGLSFIDHIRLRYAMKAQKIPDTVLPYKFPGSVYLSYYGVLINFLALCALVYISIFPVTHEKPSAYGFFVSFLGPSVFIAYLLISPIFVKPTFQSLKDVDLTTGRYDLVNSQMYVAESSTSELSEKDLTKPNLQSNDNKNSEDLESNTPPQKKSALQKVADFLC

SEQ ID NO: 9041 - protein, 459 aa, Thermoanaerobacter tengcongensis
MNLFRKKSVDQLLEAAEKTGLNKKLTAIDLAALAIGSVVGTGIFVSTGEGALRAGPGVIISYIIGGITAALAAFIFAELVTMFPVAGSTYTYSYVAFGELIAWIIGWDLLLEYLVSASAVASGWSGTFVGLLKSFGITLPEAITKPPISGGIMDLPAILITAFVAWILYIGVRESATTNNIIVLVKIGVILLFLFLGFSHVKLSNLTPFAPYGWKGIMSAAAIIFFAYIGFDAVSTAAEETKNPTRDVPLGLVMAMVVILALYISVAVVLVGMVPYKTIIPDNALPGALMSIGINWGSALVATGAAVGMISTLLITLYGQIRIFMVMARDGLLPEVFSHIHPKYRTPHINTVITSLVAAIIAGFLPLDIIIELCNIGTLSVFVIVSIGILVLRVKMPNVERKFRVPAVWLVAPLTAAFSLYLMASLPWVTWLRFGIWMLVGLIIYFAYGRYHSVLNVQK

SEQ ID NO: 9042 - protein, 473 aa, Clostridium tetani E88
MSADTSTKGGGMKKTLSLWNFFTIGFGAIIGTGWVLLVGDWMIIGGGPIAAMIAFLIGSLFLLPIGAVFGELTSAIPISGGIVEYVSRTFGNKPSYFTGWFLALGNGILCPWEAIAISSLVGEFIPALKVIPLYEVMGATVYLPPLLISLAFAIYVIRLNFKGASEAAKLQGFLTKLLLAGMVIAMIISLFRGGPKNLQPIYQPKASNARSIWAGILPVLVMTPFFYAGFDTIPQQAEEASEDLDWNKFGKVISMVLIASGIFYVICIYSFGTIVPWQKFVTYTIPALTILSVIGLKIFSKVMMLIAIMGPLGPMNSFFGATARILLAMGRKGQLPEKFKELDKNNGTPKTANILMATLTIIGPFLGKNMLVPLTNVSSLAFIFACFMVSLACLRMRRTEPNIKRPYKVPGGKVGIILACMSSLIIIGLLVIPGSPASLNFVEWMVVLTWFLIGFALMLIRGKKVETKDSGAN

SEQ ID NO: 9043 - protein, 244 aa, Triticum aestivum
MDHHHHHKAGVRGRLRVTAARRRAWQQQSACCKRPARRDPVDTVRKFMRREIGGGHRRPPRPAAPSTSAFSCPEKFRNFQLQEEYDTYDDPFVQLPLAWNRRRIIEIVAARDFIFALAECGLCGAFNRTTNKRICHLNISPDDVIRSLFYNKNNDSLITVSVYESDRYSSLKCRTTPIEYIRRGQLHDGFPLFETESLKYPGFVEFDDVNGKVLTFSAHDSTYKVFDLKNYNFLYSICDKDIQE

SEQ ID NO: 9044 - protein, 394 aa, Glycine max
  unsure (1)..(394): unsure at all Xaa locations
MPPKSAKSKEAPAERPILGRFSSHLKIGIVGLPNVGKSTLFNTLTKLAIPAENFPFCTIEPNEARVNVPDERFEWLCQLFKPKSEVSAFLEIHDIAGLVRGAHQGQGLGNSFLSHIRAVDGIFHVLRAFEDPDIIHVDDTVDPVRDLEVITEELRLKDIEFMERKIEDIEKSMKRSNDKQLKIELECCQRVKHXLEEGKDIRLGDWKAADIEILNSFQLLTAKPVVYLVNMTEKDYQRKKNKFLPKIHAWVQEHGGETIIPFSCALERNLADMPPDEAAKYCEENKTQSALTKIIKTGFSAINLIYFFTAGPDEVKCWQIRRQTKAPQAAGAIHTDFERGFICAEVMKFEDLKELGSESAVKAAGKYKQEGKTYVVQDGDIIFFKFNVSGGGKK

SEQ ID NO: 9045 - protein, 149 aa, Paxillus involutus
MADQLSEEQISEFKEAFSLFDKDGDGTITTKELGTVMRSLGQNPTEGELQDMINEVDADGNGTIDFPEFLTMMARKMRDTDSEEEIKEAFKVFDKDGNGYISAAELRHVMTNLGEKLTDTEVDEMIREADVDGDGQINYDEFVKMMLSK

SEQ ID NO: 9046 - protein, 536 aa, Phanerochaete chrysosporium
MGLTQAQRLVLGQLARLVAPALAVCVLLAAARRTQLVRAPVWADALIALIAIPLFHVGRAHWRVDVLQLVDEAYRRGFLSDYFYEKFGELGHTYNFYVLWDMDYCTEDAAVIKAVLATDFNNWVKGERFDSYMHSVLGTGVFNADGELWKFHRSMTRPFFARERITDFETFNRHAEEAILKMKERLREGFAVDFADLISRFTLDAATEFLFGACTTSPRRSARRRTQSRIARASRTDTPMRTVDRYLTPIIERALAMSRAAKQAPQGEKEEVADGETLLDHLARYTTDPTILHDEILNIMIAGRDTTGGTLTFVIYFLTQHPDVLQRLRQEILDVVGPSNLPTYDDIKQMKYLRAVLNETQRLYPPVPWNMRYAVEDSIVPNSEPEGKPWFIPAGASVSYSVHCMHRRKDYWGPDAEEFDPDRFLDERLHKYLTPNPFIFLPFNAGPRICLGQQFAYNEMSFFLVKLLQTFEDISFERDAFEPNALPPAEWAKFPGRKGKEKFWPRAHLTLYSEVRMTAGGMWVKMREAQAMGQVA

SEQ ID NO: 9047 - protein, 227 aa, Paulownia kawakamii
MAREKIQIKKIDNATARQVTFSKRRRGIFKKAEELSVLCDADVGLIIFSSTGKLFEYASSSMKEILGRHNLHSKNLDKLEQPSLELQLVEDSNYSRLSKEVAERSHQLRRMRGEELQGLSIEKLQHLKKSLESGLSRVIEKKGEKIMKGDQSTSRKGKQLMEENERLRQQVADISNDCKNNAASDSENIVYDEGQSSESVNACNSVGPPQDYDSSDTSLKLGLPYSG

SEQ ID NO: 9048 - protein, 481 aa, Brassica napus
MEKKSMFIEQSFTDHKSGDMNKNFDDDGRQKRTGTWMTGSAHIITAVIGSGVLSLAWAIAQLGWVAGPAVLMAFSFITYFTSTMLADCYRSPDPVTGKRNYTYMEVVRSYLGGRKVMLCGLAQYGNLIGITIGYTITASISMVAVKRSNCFHKNGHNVKCSTSNTPFMIIFACIQIVLSQIPNFHNLSWLSILAAVMSFSYASIGIGLSIAKVAGGGVHARTALTGVTVGVDVTGSEKVWRTFQAVGDIAFAYAYSTVLIEIQDTLKASPPSENKAMKRASLVGVSTTTFFYMLCGCVGYAAFGNNAPGNFLTGFGFYEPFWLIDFANVCIAVHLVGAYQVFCQPIFQFVESQSAKRWPDNKFITGEYKMNVPCGGDFGISLFRLVWRTSYVVVTAVVAMIFPFFNDFLGLIGAASFWPLTVYFPIEMHIAQKNMKKFSFTWTWLKILSWACFLVSLVAAAGSVQGLIQSLKDFKPFQAPE

SEQ ID NO: 9049 - protein, 276 aa, Sinorhizobium medicae
WGFDGSSTLQAEGRSSDCVLKPVAVYPDPVRTNGALVMCEVMMPDGKTPHASNTRATVLDDEGAWFGFEQEYFFYKNGRPLGFPEQGYPAPQGPYYTGVGYKNVGDVARQIVEEHLDICLAAGINHEGINAEVAKGQWEFQIFGKGSKKAADEVWLARYLLLRLTEKYGIDVEFHCKPLGDTDWNGSGMHANFSTAYLREVGGQDYFEALMAAFEKNLHDHINVYGPDNHLRLTGKHETAPWDKFSYGVADRGASIRVPHSFINNGYQGYLEDRRP

SEQ ID NO: 9050 - protein, 426 aa, Hordeum vulgare subsp. vulgare
MAAADTSRVFLILIIALVMVIVVLLGICWRFLGPGIMRRLLRPRRCPSEVPEYFSGNMSGNLRTITYFDYVTLKKATKDFHQKNQLGRGGFGPVYLGKLDDGRKVAVKQLSVGKSGQGESEFFMEVNMITSIQHKNLVRLVGCCSEGTERLLVYEYMKNKSLDKILFAAADAPAPASAPPFLNWRTRHQIIIGIGRGLQYLHEESNLRIVHRDIKASNILLDDKFQPKISDFGLARFFPEDQTYLSTAFAGTLGYTAPEYAIRGELTVKADTYSFGVLVLEIISSRKNTDLNLPNEMQYLPEHAWRLYEQSKILELVDGRVQGGEGFEEKEVMLVCQIALLCVQPYPNSRPAMSEVVRMLTMKTDQSIPAPAKPAFLDRKNLNGDRDAASSDTATMEMMRSPAGYWMMTPSPMLEVDRPYDMSFGK

SEQ ID NO: 9051 - protein, 149 aa, Vitis vinifera
MADQLTDDQISEFKEAFSLFDKDGDGCIATKELGTVMRSLGQNPTEAELQDMINEVDADGNGTIDFPESLNLMARKMKDTDSEEELKKSFRVFDKDQNGFISAAELRHVMTNLGEKLTDEEVDEMIREADVDGDGQINYEEFVKVMMAK

SEQ ID NO: 9052 - protein, 200 aa, Hordeum vulgare
MASKSKGLVVLALLLAAAILVASADEHPQAKKEENEAGVENFFHGGGGHHGHGRGGHGGGGYGGGGGYGGGGGGYPGGGGGYGGGGGGYPGHGGEGGGGYGGGGGYPGHGGEGGGGYGGGGGYHGHGGEGGGGYGGGGGYHGHGGEGGGGYGGGGGGYPGHGGGGGHGGGRCKWGCCGHGFLHHGCRCCARADEVPEVRN

SEQ ID NO: 9053 - protein, 216 aa, Glycine max
  unsure (1)..(216): unsure at all Xaa locations
MEKRETDAMRLLEDEPKLRTVMEXLEQYMHFSTRYENDVWNNMRDKDPLXPNHLMSDYWWLTIDRLSAFDAWNKIFLEVQNYIREWXNMTDEQILPYEQMAXKNRDQYTLXMDAYKQKKDEEVAHFMKEEEEHMKLQKQEALHLLKKYEKTDLVIKKTNQNRQRKKHSKDDKSSDPNRPKKPAYSCILFITEARXTLQEERPGISTLTLNALASLK

SEQ ID NO: 9054 - protein, 96 aa, Zea diploperennis
MGRRACCEKEGVKRGAWTTKEDDALAAYVKAHGEGKWREVPQKAGLRRCGKSCRLRWLNYLRPNIRRGNISCDEEDLIIRLHKLLGNRWSLIAGRL

SEQ ID NO: 9055 - protein, 362 aa, Hordeum vulgare
MAHARVLLLALAVLATAAVAVASSSSFADSNPIRPVTDRAASTLESAVLGALGRTRHALRFARFAVRYGKSYESAAEVRRRFRIFSESLEEVRSTNRKGLPYRLGINRFSDMSWEEFQATRLGAAQTCSATLAGNHLMRDAAALPETKDWREDGIVSPVKNQAHCGSCWTFSTTGALEAAYTQATGKNISLSEQQLVDCAGGFNNFGCNGGLPSQAFEYIKYNGGIDTEESYPYKGVNGVCHYKAENAAVQVLDSVNITLNAEDELKNAVGLVRPVSVAFQVIDGFRQYKSGVYTSDHCGTTPDDVNHAVLAVGYGVENGVPYWLIKNSWGADWGDNGYFKMEMGKNMCAIATCASYPVVAA

SEQ ID NO: 9056 - protein, 398 aa, Oryza sativa
  unsure (1)..(398): unsure at all Xaa locations
SGGEEVRVVLRWAAVNADEILVRSLGLIWLPIQNSPVKSWQWWLMVGVNMFFLIAGQTASTLLGRFYYNQGGNSKWMSTFVQTAGFPILFIALFLFPSTQTVTSSPAPTISIPKITLIYVVLGLIIAADDLMYSYGLLYLPVSTYSLICASQLAFNAVFSYFLNAQKFTPLIFNSVVLLTFSASLLGVDEDSQGTTSISHGKYILGFLLTLGASATYSLILSLMQVTFEKVIKRETFSVVLNMQIYTALVATLASLVGLFASGEWMTLQGEMHAFQSGKLSYVMTLLWTAISWQVASVGVVGLIFVVSSLFSNVISTLALPIIPVFAVIFFHDKMDGVKIIAMLMAIWGFMSYGHQLYVDGKKGRKTTVSVEETSXSSQCCLECRSYQFKLLVLSKVL

SEQ ID NO: 9057 - protein, 265 aa, Agrobacterium tumefaciens
MHFLRCGETVIHYRAKGLDSGKPVIAFINSLGTDFRIWDAVIEALGDDYAYVLHDKRGHGLSDVGRAPYSIDDHAGDLIALLDHLEIKSAVIWGLSVGGLIAQGLYARRPDLVRALLLSNTAHRIGTTEMWNARIDKIAADGLASLVDPVMERWFTPAFRQRENTAYAGARNMLSQQPEAGYSGTCAAIRDADFTEQAGRIAVPALCIAGDQDGSTPPELVQSLAGLIPKSRFVTIAGCGHIPCLEQPLVYAQAASIFLKTLPEH

SEQ ID NO: 9058 - protein, 113 aa, Oryza sativa
YPNYSRNSRSEQRRKGNMASFASTHYEVLGVGAGASRGEIKAAYRRLAREVHPDAGATGDEDFIRLHAAYATLADPDERARYDRAMAGPAASAFRRAPASSFRRRTWETDQCW

SEQ ID NO: 9059 - protein, 93 aa, Glycine max
MLEGKAMVKETDMSPKMQIHAMASASQALDLYDVYDCISIAAHIKKEFDSVYGNGWQCVVGSNFGCYFTHSSGTFIYFALETLNFLIFKGTSS

SEQ ID NO: 9060 - protein, 184 aa, Zea mays
DHAGPSVPPLIASAFTQPRVRMGGVDRTGRPIIVGLLAKHYSANRDMAEFKSFVVYFFDKICARIPRGQEKFLAIMDLKGWGYANCDVRAYIAAIEIMQNYYPERLGKALMINVPYIFLKVWKTMIYPFIDANTRDKFVFVDDKSLRETLRREIDESQLPEFLGGKMPLVSLKDYAQQPQPVCE

SEQ ID NO: 9061 - protein, 245 aa, Sulfurisphaera ohwakuensis
MRIVYDDVRDLKAIVQALLKLVDEALFDIKPEGIQLVAIDKAHISLIKIELPKEMFKEYDVPEEFKFGFNTQYMSKLLKAAKRKEEIIIEADSPEVVKLTLSGALNRVFNVNNIEVLPPEVPEVNLEFDIKATINASGFKNAIGEIAEVADTLLISANEEKVIVKGEGENKVEVEFSKDTGSLADIEFNKESSSAYDVEYLNDIISLTKLSDYVKVAFAEQKPMQLEFNMEGGGKVTYLLAPKLS

SEQ ID NO: 9062 - protein, 114 aa, Zea mays; identical to SEQ ID NO: 4579

SEQ ID NO: 9063 - protein, 489 aa, Clostridium perfringens str. 13
MSQEQNTNLKRGLKSRHLSMIAMGGAIGTGIFLAMGDTLHQAGVGGAFVAYGIIGVMVYFLCTSLGEMATYMPETGSFGAYATKFVDPALGFALGWNYWYNWAITIAAEMVAGSLLMKFWFPNIPAIVWSALFLVIILTLNLLSAKAYGESEFWFAAVKVATVIIFLIVGVLMIFGILGGDNVGFKNFYENGGPFIGGAKSIFMIFLIAGFSFQGTELVGVAAGESEDPEKNVPKAVNTIFWRILLFYLGTILVIGALVPNAQAGVETSAFTIVFEKLGLAGAASIMNAIILTSVLSAGNSGMYASSRMLYAMAKNGMAPKIFEKTNSRGVPVNAIIITTIIASLCFLTGIYAENTVYVWLVAASGLSGFIAWLGIAICHYRFRKAYVAQGKDMSRLVYKAKLFPLGPIIALILCGIIVLGQGYAYLDVRNGVDWGGLISSYIGLPLFFGLFAYYKIKYKTKIIDLKDVDLSVEHIDTDESIEDEVFSY

SEQ ID NO: 9064 - protein, 340 aa, Nostoc punctiforme
MSDLMNKQIILKSRPVGEPKESDFALVETPTPEPGEGEILSRTIYLSLDPYMRGRLSASESYAASVELNSAIVGGTVSQVVKSNHPQFQVGDFILSNNGWQTYAVSKAETLRKLDPTQAPLSYSLGVLGMPGLTAYAALLDIGQPKEGETVVVSAASGAVGAVAGQIAKIKGARVVGIVGSDDKRDYIVKELGFDVGINRKTQELDSALKEAAPNGIDVYYDNTAGVILETVLQQINLGARIPLVGLISEYNATSTPSGPNLMPLLVKRALIKGFLVTDYQHRFNDFLRDVSGWLQSGQLKYKEDVVMGLENAPHAFIGLLRGDNFGKLIVKVNDDPTAK

SEQ ID NO: 9065 - protein, 373 aa, Oryza sativa (japonica cultivar-group)
MEAEKKPPAVSDVGAWAMNVVSSVGIIMANKQLMSSSGYAFSFGTLRAFARSSSSPFPSPQIWIRRFGFVPATTLTGFHFTVTALVGWISNATGYSVSKHVPLWELVWFSLVANTSITGMNLSLMLNSVGFYQISKLSMIPVVCLMEWVLNSKHYTTKVISAVVVVAAGVGICTVTDVEVNAKGFICACVAVFCTSLQQITIGSFQKKYNIGSFELLSKTAPIQAVSLIILGPFADYYLNGRWLLNYNFSTGATFFILLSCSLAVFCNMSQYLCIGRFSATSFQVLGHMKTVCVLILGWILFDSALTVKNILGMLLAVMGMVVYSWAVETEKKASAPIPRNKSDMLDDSEDVPLKARVSGLPSSDLEEGEMKS

SEQ ID NO: 9066 - protein, 274 aa, Mycoplasma penetrans
MENEKKINWFIGHMKRTVDILESKKKNIDFVIEVVDARLPYGSSNLELLSVFENKPIIKIALKSDLVKKDHYQNGFFYASIKNPADRKKIINYIDSCLKEKKDRLIKKGLRNPTFIGIVVGLPNIGKSSLINYLSNKKSLNVENRPGVTRKTENIKISDSLFLIDTPGVFLKNVTDYQMGLSLALINCVKREVVDKKDLVLFLISKFIENNNLNSFNETLNTNINSNNPSEVLSELLKVLKIDEDNNQKISVFYDFVFKKTIDNPKISLFLEKI

SEQ ID NO: 9067 - protein, 246 aa, Thermoplasma volcanium
MIRMNISVRNLKEITDLLSTIVSEAKFKVDENGMSVTAVDPAHVAMIRLEVPKEVFSEFRSDGTEEIALDIDRLKSVIRLANSSENVGITKDKEKLKFDLGNISKSVSLLDPSTIVTPKIPNIASEYYAIIKRSDFERGLRAAEDISDSIRFVLSSEGFRATSHSESEESEMVLPKDMLSDLSCSDTIKSSYPLEYLLKFIKAVSSADSLKISFRDDYPLSIEFYLDQNPSAKIKGLFLLAPRMEQ

SEQ ID NO: 9068 - protein, 3487 aa, Microcystis aeruginosa
MVESIDYKKLMATTLSKMEVMQARINELETRQSESIAVVGMACRFPGGINSPEKYWSFCQAGLDAIVEVPKSRWDISKLYSQEPTLGKMNTAYGGFLQENITEFDARFFSISAKEAASMDPQQRLLLEVAWEALENANLPLKNLADNKVGVFVGITSIDHALKVYGTNYDQIDSFFGSGNALSAAAGRLSYFLNLHGPCLSIDAACASSLAAVHQGIRSLRNRECELALVGGVNLILEPAITISLSQSGMMSPDGRCKTFDASANGYVRGEGCGVLILKTLSEAQKNGDHILALLRGSAVNHNGAAAGLTVPSGPAQQELLRQALVDARIVPEDVSYIEAHGTGTSLGDPIELNAIASVYGKRSDPLYVASVKTNIGHLEAAAGMAGIIKTILILQQGEIPSHLHFQTPNPLINWEDHPIKIPTQNIPWPNNNKVPIAGVSSFGFSGTNAHVIVQQAPVSKISEIQQQLPSHLLTLSAHNKTALKELAKRFHTLLESRPEIGDICYSAAVGRIDLPERLAIVGDTCPELQQRLAAFAEEKPLDDLTFYQRFTSEKSPKIVFLFTGQGACYPGMGHQLYQTQPTFRQYIDQCAEILSKYLDHPLTEILFGEQTDLLNQTAYAQPAIFALEYSLTMLWKSWGITPSLLIGHSVGEYVAACIAGVFSLEAGLALVVKRGQLMQTTTSGKMASIFADEETVSSLIKNYTQTVSIAAINHPQQIVIAGESASIEEVISTCKKQKIPAQYLPVTQAFHSPLMEPILKEFEKEARQIYYQRPQILLLSGLDGELLENAPDAAYWSKQCREPVRFLSSLITAFNKGYNLFLEVGPRPILAEQGRRYKDEVIWLSSLNRGLDNWHTILSALAQLYLNGAPFNPEQFNRNYGYKKVRLPNYPFQRKPFQFQPNPRTENQSIDKIFLDAQTSNLTDTETTVFNMQKHQQEIRNQLKSILALLLKEDENDLPEDETLLNLGADSIILTDFSRKVEEKFQVKVKIDQLFTDLQTLADIAEYLCQFVNEKPLENASEITTKVINDETELSNYLQVIEQLQPIATAYIIRALESLGKKLNQGEQWTIETLRQTLPVARKYHILLNRYLQDLEQANVLHNQGNIWTVKNLPESFSLPQALQKLEKTCPSAKPELEMLQRCGENLAEVLKGNIDPLTLIFPEGSVAHAESIYGNSPVSRLMNQRVAQAINQILTNFSNSDRPYQILEIGGGTGATSEAILHHLNLDHVTYSFSEVSPFLLHQARQKFQKKYNLNFHQLDIEKSPISQGIPARNYHIVVAANVLHATRNITETLTHIRELLRPGGYLVLLETVENNSWLNLTFGLTPGWWRFQDQQLRSDTPLLRGENWCSVLKSCGFATANSFSKQNNIPINNGQELILACVPDEPLSIPAIPKFTVSGESSGKEALMMAQLQSLKDLKDLHEKTIIKQLEVLQTAPVFPSIAPEILTNQTQIIPTQSSKTETYLPVSQEKPKSPEKPSSPNLNPLALKLTENKSLTEQQQAFIQNLQSIYNQKTAKSKAYSQNSRKTMVDVKPTIDFRMALKEFQYPIVSESAQGAYFKDIDGNNYIDLAMGFGVNFFGHSPDFVIKAVQEQMNRGIGLGMQSNLAAETAALISEMGRVERVAFSNTGTEAIMAAVRIARSRTKRQKIVMFAGSYHGTFDGILARVGEDKTTAQPLSLGTPLGMVEDIIVLSYGVEESLDIIATHADDLAAVLVEPVQSRKPDLQPQEFLQKLRQITHKKGITLIFDEIITGFRIAPGGAQEWFNVEADIVIYGKAIGGGLPISMICGKADFLDTVDGGFWQYGDDSHPQTELTAFGGTFCRHPLALAACRAVLLHLRENSPTIQEKVNQLTHRLATEVNQFFQEIGIPIRVVNFGSLFRFEPFGAYSIFLQPIELPLFYYLLNLKGIYTWEKRVCFLSTCHTNKDIDKVIVAVKEAITELQQAGFFANAKRPQVKKEEKKPLSEDEDGRGHLPSLNQSFPTSEAQRQLWLLAELDRNASASYNVTTSLELLGSLDVYILEKTINQVINRHEALRTKIIEQGELQEVVNEVNIKLNLIDFKDEDNPEATALALRSQFSQKPFDLSIAPLFAVILMRLKPDHYLLSLKTHHIVADGWSLGLILQEIGQLYSSQNNTTKEVLTPPMQFRQYLTLRAQETQSPQMLEHRDFWLKTYQEDLPTFELPTDFPRPAVKTYTGGQESQVIPSEVGQNLQKVGRKNKATLFMTMFAAYTAFLRRISGHRDLVIGIPISGRQIEGSDNLVGFCSQFLPLRIQVDATTSFIEHLQHTKQTLIDAFRHQSYTLEDLLAALQLPRDFSRSPLISVSFNMDPSLTLPEFKDLKVSLPPSPIGYTPFDLGFNLIELNDNLIIYCNYNTELFKKETIKQFIESFEILLRGIIDDANHLLYQLPLLTPVQQEKLLRQLTGKTRKLPEKATIIDDFVAQVKLTPNAPALIAGKINLSYQELNEKVNRLTHYLQQEYQLGVGKVIGVMLQRDHNLIIGILATFKTGATYVPIDSQYPHSRIEFILKDSGCHVCLTESNFISKLPEKMQKICLDKIDPIVEKYDKDEPKIFRNSSQTAYIFYTSGSTGNPKGVMGCHISILNVIQSLRLTFDLDKHPEWRYIFTAAVTHDPSIRNIFLPLTIGASLYMYEIKYIGHLVSFLQENQINALHTTPSIYREILGLLEPGETISSLKYISVGGEKLDRETALALRKRFPAEIVSNVYGSTETCVGVSQYEIKENLDSEIPLGQVFHNNRLGVLDEFNNPVPLHVIGEICVEGAALASGYHNQPEMTQEKFKPSFLDETKTLFRTGDLGKQTAPGIIEFMGRKDNQVKVNGYRIDPGEIEYQLTRYAPIERAIVLPVQVNNQTQLSAYCQTDKTLEIAEIRELLAKFLPVYMIPSYFIFLKQFPLTRHGKLDLHSLRELRETGKSLVNSNYVAPRNHLESNLVSIWEKILSKHPIGIFDNFFEIGGHSLLLSRVVTRVHKELNVSVKLADFFKVPTIAGLATLISQTQYNYQEPISAIPPQKSYPMSHGQRRLWALEFLDQNHNAYGMPSAYQFKGNLNIDAFENAFQQLIQRHEILRTTFTLINNQPRQVVHNQMNFVIKQIDLTAYVSTEQENLIEESISHNAKTTFDLEVGPLLKVNLLKLSQENYIVLFNMHHIIFDGWSAGVLIKDFLTHYHAYGQENSQLMPPLRIHYKDYTSWQESQLETLKLQGQRDYWLAKLTPVPVRLNLPVDYPRPPVKSFQGNTITWQPEPELIDTFEKLVKAQEASLFMGLVSLVKSFLFRYTEQNEITIGSAIAGRNHPDLEDQIGFYVNTLVLRDQITDHDSFTDVLSKVKTTTLEAYDHQDYPFDQIVSDLNLQRDPSRNALFDVAIVLQNNQNVDLALDGITVNSIDPKMITAKFDLEFIFVEEEELYLKLIYNTDIFIHERILLIIDLFKNWLEQVLKFAHEPLINLSLASSENLTQEGQELFTEDFNF

SEQ ID NO: 9069 - protein, 319 aa, Vibrio vulnificus CMCP6
MSKPQPSGQMVQAVVIDPNLVKQQANQIRQQRESAAKKEQERLDKLRREAEQLEKNRKAEEDQLRKLKEQQARDAKAAREAEEARKQKEQEKKVAEEKARKEKERVAKLEAERKTKEEAIKKAEQERLAKEAAIAKAEQERIAKEKAAKEAEEKARREKEAAAKAEQERIAKEKAAKEAAEKARKEKERLERLERERKEQEAALNDIFAGLETESSQNSAARSQHVLDEKNRYGAIYTQLIQQRLLKDEYLLGKSCKVNIKLIPTGVDAIVNSVSILEGDTRVCNAAKSAILQVGSFPMPADDAVRQELRNINLTVDFE

SEQ ID NO: 9070 - protein, 1164 aa, Arabidopsis thaliana
MVSGGGSKTSGGEAASSGHRRSRHTSAAEQAQSSANKALRSQNQQPQNHGGGTESTNKAIQQYTVDARLHAVFEQSGESGKSFDYSQSLKTAPYDSSVPEQQITAYLSRIQRGGYTQPFGCLIAVEESTFTIIGYSENAREMLGLMSQSVPSIEDKSEVLTIGTDLRSLFKSSSYLLLERAFVAREITLLNPIWIHSNNTGKPFYAILHRVDVGILIDLEPARTEDPALSIAGAVQSQKLAVRAISHLQSLPSGDIKLLCDTVVESVRDLTGYDRVMVYKFHEDEHGEVVAESKRNDLEPYIGLHYPATDIPQASRFLFKQNRVRMIVDCYASPVRVVQDDRLTQFICLVGSTLRAPHGCHAQYMTNMGSIASLAMAVIINGNEEDGNGVNTGGRNSMRLWGLVVCHHTSARCIPFPLRYACEFFMQAFGLQLNMELQLALQVSEKRVLRMQTLLCDMLLRDSPAGIVTQRPSIMDLVKCNGAAFLYQGKYYPLGVTPTDSQINDIVEWLVANHSDSTGLSTDSLGDAGYPRAAALGDAVCGMAVACITKRDFLFWFRSHTEKEIKWGGAKHHPEDKDDGQRMNPRSSFQTFLEVVKSRCQPWETAEMDAIHSLQLILRDSFKESEAMDSKAAAAGAVQPHGDDMVQQGMQEIGAVAREMVRLIETATVPIFAVDIDGCINGWNAKIAELTGLSVEDAMGKSLVRELIYKEYKETVDRLLSCALKGDEGKNVEVKLKTFGSELQGKAMFVVVNACSSKDYLNNIVGVCFVGQDVTGHKIVMDKFINIQGDYKAIIHSPNPLIPPIFAADENTCCLEWNTAMEKLTGWPRSEVIGKLLVREVFGSYCRLKGPDALTKFMIVLHNAIGGQDTDKFPFPFFDRKGEFIQALLTLNKRVSIDGKIIGAFCFLQIPSPELQQALEVQRRQESEYFSRRKELAYIFQVIKNPLSGLRFTNSLLEDMDLNEDQKQLLETSVSCEKQISKIVGDMDVKSIDDGSFLLERTEFFIGNVTNAVVSQVMLVVRERNLQLIRNIPTEVKSMAVYGDQIRLQQVLAEFLLSIVRYAPMEGSVELHLCPTLNQMADGFSAVRLEFRMACAGEGVPPEKVQDMFHSSRWTSPEGLGLSVCRKILKLMNGGVQYIREFERSYFLIVIELPVPLMMMMPSS

SEQ ID NO: 9071 - protein, 170 aa, Zinnia elegans
KIWFQNRRARWKTKQLEKDYDVLKRQYESVKADNDALKTLNKKLHAELMAVKSGETNGIRPINLNKETEGSWSNGSENSCDLNTVTGTMTPSEESPIFYTQISTNINYPNMSSMGPNSSLTQLLQSPSTTDLLGQRLNQTVGNEGFLNMFNGIEDQPAYWSWPEQHTQHL

SEQ ID NO: 9072 - protein, 349 aa, Canella winterana
DFEPVKPYEAPMTAAGALQSYKLAAKAIARLQSLPSGSMKRLVDTVVQEVFDLTGYDRVMAYKFHEDDHGEVISEITKPDLEPYLGLHYPSTDIPQAARFLFMKNKVRMICDCHALPVKVYQDDKLTFDLTLCGSTLRAAHSCHSQYMANMGSIASLVMAVVVNEREEEDENSESSEQQQQQKKKRLWGLVVCHNTTPRFVPFPLRYACEFLMQVFAIHVNKELELENQIQEKNILRTQTLLCDMLMRSAPLAIVTQNPNIMDLVKCDGASLLYQSKIWRLGVAPTESQIRDIARWLSDCHMDSTGLSTDSLHDAGYPGALLLGDVVCGMAAVKINSKDMPFWFRSHTA

SEQ ID NO: 9073 - protein, 760 aa, Rhodopseudomonas palustris
MMDEADSGGIVTARNVDLSSCDRELVQYPEAIQPHGAMLTVDEQSDRVLHASANCAAFIGKPPEAVIGAPIAAVLGAGWHELLGSLHRMPLDSGPVNIARESFLGSDQGWHLFAHRCGGLIILEFEKAEPEAAGTTSNLYSEVRADLAALQATEGVQAFFDLAVERIRAFTGYDRVMAYRFAEDGSGQVIAEARRDDLEPYLGLHYPATDIPAPARRLFALSWVRHLPDVGYTPVPLLAAKSPLVTGPVDMSFASLRSVSVMYTGYLKNMGVQSTLVMPLVKEGRLWGLISAMHHAAPRHISHQMRMAAEFLAHTLSLLMSAKEDAEQFERSSARKAAAEALTRLLDSEADIGAALHAAGALDLLSALIDAGGVVVQTGDEVATRGEAPAAAPLHELTSWLRERARPVFATDRLPNLDPAAQAVASQASGVLALRPLPDQPMLIAWLRPEQIEDVQWAGDPRKPVEISDADGMQRLRPRNSFALWKESVQGRAVPWRDDEKDAATRLAAAIAEIAAARKGRIERINRALDASHSELSRYTDVASAELKEHLRGIHHLTTSLRRRQGEVLDEEGRQQVATILKLTQRMDALVDALLDRSRGGSEAASETVDLEAVVDDALAPFARRIAEDRIEVRRPMRLGTAQGHREWIGEVFTNLIGNAIRYNDKPERWIEIGVEAGSPPRYYVRDNGIGIADTDQQLVFQMFHRVDQSEQKAEGAGVGLAMTRRIVAHHGGRIWVQSRLGEGATFYFTLAPDEERHDA

SEQ ID NO: 9074 - protein, 272 aa, Triticum aestivum
MAGSMELPTKGGFSFDLCRRNAMLEKNGLKMPGFRKTGTTIVGLVFADGVVLGADTRATEGPIVADKNCEKIHFMAPNIYCCGAGTAADTEAVTDMVSSQLQLHRYATSRESRVVTALTLLKTHLFNYQGHVSAALVLGGVDVTGPHLHTVYPHGSTDTLPFATMGSGSLAAMSVFESKYREGLTREEGIALVAEAIRAGIFNDLGSGSNVDVCVITKGNTEYLRNHELPNPRTFVSSKGYSFNKGHTEVLSTKITQLKLKPEVADGDAMEE

SEQ ID NO: 9075 - protein, 324 aa, Streptococcus pneumoniae R6
MKTRITELLKIDYPIFQGGMAWVADGDLAGAVSKAGGLGIIGGGNAPKEVVKANIDKIKSLTDKPFGVNIMLLSPFVEDIVDLVIEEGVKVVTTGAGNPSKYMERFHEAGIIVIPVVPSVALAKRMEKIGADAVIAEGMEAGGHIGKLTTMTLVRQVATAVSIPVIAAGGIADGEGAAAGFMLGAEAVQVGTRFVVAKESNAHPNYKEKILKARDIDTTISAQHFGHAVRAIKNQLTRDFELAEKDAFKQEDPDLEIFEQMGAGALAKAVVHGDVEGGSVMAGQIAGLVSKEETAEEILKDLYYGAAKKIQEEASRWTGVVRND

SEQ ID NO: 9076 - protein, 102 aa, Glycine max
MEGDIKLLDGDDTHKKKESSLVKIKVLFFARARDLTGLSELPLEVSSGSTTHDCLKKLFVKFPSLEEIRGCMVLALNEEYTTESTIVKDTDELAIIPPISGG

SEQ ID NO: 9077 - protein, 363 aa, Loeseneriella africana
QSQKLAVRAISQLQSLPGGDIKLLCDTAVENVRNLTGYDRVMVYKFHEDEHGEVVAESRRPDLEPYIGLHYPATDIPQASRFLFKQNRVRIIVDCHASPVIVIQDDGLMQPLCLVGSTLRAPHGCHAQYMENMGSIASLAMAVIINGNDEDGMGGRNPTRLWGLVVCHHTSARCIPFPLRYACEFLMQAFGLQLNMELQLAAQLLEKHVLKTQTLLCDMLLRESPTGIVTQSPSIMDLVKCDGAALYYQANYYPLGVTPTEAQIKDIVEWLLAFHGDSTGLSTDSLADAGYPGATSLGDAVCGMAVAYITNKDFLFWFRSHTAKEIKWGGAKHHPEDKDDGQRMHPRSSFKAFLEVVKSRSLP

SEQ ID NO: 9078 - protein, 361 aa, Ralstonia solanacearum
MTRKTYRIAVIPGDGIGREVMPEGLRVLDAAARRFGIDLEYQHIEWASCDYYLQHGRMMPDDWKAQLQGADAILFGAVGWPATVPDHISLWGSLLKFRREFDQYINLRPVRLFEGVPCPLANRKPGDIDYYVVRENTEGEYTSLGGIMYEGTDREVVIQESVYSRKGAERLLKFAFDLARSRARKHVTLATKSNGIAISMPWWDARADEVATHYPEVTLDKQHIDILTARFVLQPGRFDVVAATNLFGDILSDLGPATTGTIGLAPSANLNPDRTFPSLFEPVHGSAPDIYGKNIANPIAMIWSAALMLDFLTEGQGAGRAAHDAIVAAIEAVLKGGPRTPDLGGSANTTQVGEAIASHLA

SEQ ID NO: 9079 - protein, 199 aa, Leavenworthia stylosa
SVGEGVTDLQPGDHVLPIFTGECGHCPHCHSEESNMCELLRINTERGGMILDGESRFSINGKLIHHFLGTSTFSEYTVVHSGQVVKINPKAPLDKVCIVSCGLTTGLGATLNVAKPKKGQSVAVFGLGAVGLGAAEGARIAGASRIIGVDLNSKRFEEAKKFGVTEFVNPKEHNKPVQQVIAEMTNGGVDRSVECTGSV

SEQ ID NO: 9080 - protein, 209 aa, Zea mays
  unsure (1)..(209): unsure at all Xaa locations
MAGTSSWSSSSSCASSFGSPDHDVVCVTEPDSVGAVADAEGSVKFLCSYGGRILPRRTDGTLRYVGGDNRVLSVDRPIXLQRKLRELCGGWEAHLRCQLPTEDLDALISVTCDDDLAKLLEEYDEASKDRLQSLKIRAFLFPTRTPAPSILQRRSPPSIAHLHWQNTSPPPAAAGVSLTCAPRWWAAPQASRQAQAPQAQNYDRHSLGE

SEQ ID NO: 9081 - protein, 336 aa, Bifidobacterium longum DJO10A
MFEPTAIYAPNPHRYDTMTYNRAGTSGLKLPAVSLGFWHNFGDITPFDQMKSLVFTAFDNGITHFDLANNYGPEPGQAEKNCGLLLAKYFKHHRDELVISTKAGYEMWTGPYGDLGSRKYLLASLDQSLERLGLDYVDIFYHHHPDPETPLEETMGALAQAVNSGKALYVGLSNYDGPTMEKAAAILAELHVPFIINQNKYNILDRTVEKNGLKETAFKLGKGLITFCPLAQGLLTNRYLNGIPADSRMAHDPRFLNDSALTEKLHKQVVDLNNLAAERGQTLAEMSLAWLLHDGKVTSVLTGASKPQQILDNIGALKNTHFSDEELKLIDEISAR

SEQ ID NO: 9082 - protein, 503 aa, Zea mays
  unsure (1)..(503): unsure at all Xaa locations
MDTVSVPVVAVANGIGEVERKVQKSYWEEHSKCLTVESMMLDSRAADLDKEERPEILSLLPSYKGKSVLELGAGIGRFTGDLAKEAGHVLALDFIESVIKKNQSINGHHKNITFRCADVTSNDLKIEDNSVDLIFSNWLLMYLSDEEVQKLVGKMVKWLKVGGHIFFRESCFHQSGDSKRKVNPTHYREPRFYTKVFKEGHSFDQDGGSFELSLVTCKCIGAYVKNKKNQNQICWLWEKVKSTEDRDFQRFLDNVQYKTXGFGILRYERVFGEGFVSTGGIETTKEFVGMLDLKPGQKVLDVGCGIGGGDFYMAANYDVHVLGIDLSVNMVSFAIERAIGRKCSVEFEVADCTTKDYPENSFDVIYSRDTILHIQDKPALFRSFFKWLKPGGKVLISDYCKNPGKPSEEFAAYIKQRGYDLHDVKAYGQMLKDAGFHNVIAEDRTEQFLNVLQRELGEVEKNKDAFLADFTQEDYDDIVNGWNAKLKRSSAGEQRWGLFIATK

SEQ ID NO: 9083 - protein, 735 aa, Geobacillus stearothermophilus
MENQNRQNAAQCPFHGSVTNQSSNRTTNKDWWPNQLNLSILHQHDRKTNPHDEEFNYAEEFQKLDYWALKEDLRKLMTESQDWWPADYGHYGPLFIRMAWHSAGTYRIGDGRGGASTGTQRFAPLNSWPDNANLDKARRLLWPIKKKYGNKISWADLFILAGNVAIESMGGKTIGFGGGRVDVWHPEEDVYWGSEKEWLASERYSGDRELENPLAAVQMGLIYVNPEGPDGKPDPKAAARDIRETFRRMGMNDEETVALIAGGHTFGKAHGAGPATHVGPEPEAAPIEAQGLGWISSYGKGKGSDTITSGIEGAWTPTPTQWDTSYFDMLFGYDWWLTKSPAGAWQWMAVDPDEKDLAPDAEDPSKKVPTMMMTTDLALRFDPEYEKIARRFHQNPEEFAEAFARAWFKLTHRDMGPKTRYLGPEVPKEDFIWQDPIPEVDYELTEAEIEEIKAKILNSGLTVSELVKTAWASASTFRNSDKRGGANGARIRLAPQKDWEVNEPERLAKVLSVYEDIQRELPKKVSIADLIVLGGSAAVEKAARDAGFDVKVPFFPGRGDATQEQTDVESFAVLEPFADGFRNYQKQEYSVPPEELLVDKAQLLGLTAPEMTVLVGGLRVLGANYRDLPHGVFTDRIGVLTNDFFVNLLDMNYEWVPTDSGIYEIRDRKTGEVRWTATRVDLIFGSNSILRSYAEFYAQDDNQEKFVRDFINAWVKVMNADRFDLVKKARESVTA

SEQ ID NO: 9084 - protein, 62 aa, Glycine max
QNIVVPLPPALDSGVAFMTVMLYFSLGLENKSLNWWGNDGEHCPLAACPTAKGIIVDGCPAN

SEQ ID NO: 9085 - protein, 508 aa, Nicotiana plumbaginifolia
MAAATIIAATVGILVAIFCGKFLYTIWWWPKMIEKKLKKEGIYGYPYKLLFGNLKEIMKMSKEAKKQPLLTHDIIPWVNPFLQHVANTYKKIFVLWYGPTPRVTVTDPKLIRELLNRYTEFHKPEANAFIHLFVTGLASYDGEKWDTHRKLLNPAFHVEKLKRMFPAFAMCCDEMLNRWEESVGKTGSCELDVLNEFLNLGGDVISRAAFGSNIAEGRSIFLLQKEQCELILASPFTLFFPSLRFLPTASNRKAKYIHKKVISLIRGIIEKREDAVRRGISDNDDILGLLLKARNADNKSRAGGLTTEDVIEECKEFYFAGQDTTTALLSWTMVVLSMHPEWQDKARNEVFQVIGKNKPKFDDLNQLKLMNMIFQEVLRLYPAIFLIRSTSKSTKLGDMTIPAGVQVCVPTHLVHRDPEVWGDDALLFNPERFSEGVSKAAKEQMYFPFGWGPRMCIGMNFGMLEAKLILSQILQRFWFELSPSYTHAPLLTLIMRPQYGAQIIVHKL

SEQ ID NO: 9086 - protein, 396 aa, Bacillus cereus ATCC 14579
MIQTKDIIELTDTYGANNYHPLPIVISKAEGVWVEDPEGNRYMDLLSAYSAVNQGHRHPKIINALIDQANRVTLTSRAFHSDQLGPWYEKVAKLTNKEMVLPMNTGAEAVETAIKTVRRWAYDVKKVEANRAEIIVCEDNFHGRTMGSVSMSSNEEYKRGFGPMLPGIVVIPYGDLEALKAAITPNTAAFILEPIQGEAGINIPPAGYLKEAFEVCKKENVLFVADEIQTGLSRTGKVFACDWDNVTPDMYILGKALGGGVFPISCVAANRDILGVFEPGSHGSTFGGNPLACAVSIAALEVLEEEKLTERSLQLGEKLVGQLKEIDNPMITEVRGKGLFIGIELNEPARPYCEQLKAAGLLCKETHENVIRIAPPLVISEEDLEWAFQKIKAVLS

SEQ ID NO: 9087 - protein, 186 aa, Glycine max
MEQAGQGAQPAKKPAMEVTLRRFSLDDVDAMMAWASDPQVAAPCRWEPYESTEPLLAFIRDAVLPHPWFRAVCLAGDGDRPVGAISVSPTDDACRAELGYVLARAHWGKGVATAAVRRAVAAVFGEVEGLQRVEALVDVANVASQRVLEKAGFRREAVLRRYCLLKGAVKDMLIFSFISTDTVLLD

SEQ ID NO: 9088 - protein, 430 aa, Catharanthus roseus
KLGGFNTIVASSPRMAKEVLKTHDLSFLNRPIIQATKILCYDNSALVFSQYGDSWRQMRKIFVLELLSTKRVRSFQPIRQDEGSRLVSLIKESVGKSIDLSEKIKLYTTSMVARAAFGKVNDAGVTFLKLVTEAAEVAEGFDPADMFPSYKFLNVFFNSRSNLLKIHGKTDMILEEMIDEHIKSHQMGKKANGENGEEDVIDILLSIKDSGDLGISHWMNNVKALIFDMFSAGTETSSATVEWAMTELMKNPSVMRKAQDEVRQAFKGKKTIDESDLEELKYLKLVVKEVLRLHPFAPLLVPRECREACQIDGYDIPVKTRVFVNVWAIGRDEKYWKDPESFIPERFEDNSLDFTGNNFEYLPFGCGRRICPGMTFGLANVHLVLALLLYHFNWKLPPGVNDIDMAERPGLGASKKHGLVLVPSFYQPSF

SEQ ID NO: 9089 - protein, 132 aa, Triticum aestivum
LYPETVKSTLNTTHSEYGGHDTFRYGTRSIKNEVLPKHPLESRLNQWEETQWELKLNLARQAYGMHAPVKLMMERSIVEKRQRTPIMPTSNLHLDILMGRDETIDYEDFLNDPSLSTDSMDLHTSMEHKLKL

SEQ ID NO: 9090 - protein, 362 aa, Triticum aestivum
  unsure (1)..(362): unsure at all Xaa locations
MSCFVCCGDEDTQRAPDNRNQYXKAIQQGNDAYRTADPTPKGPQPVKVQPIAVPTIPMDEIREKNCTGGDEALIGEGSFGRVYFGTLRNGRGAAIKKLDSSKQPDQELLAQVSMVSRLKHENVVELLGYCLDGNTRVLAYEFATMGSLHDMLHGRKGVKGAQPGPVLSWIQRVKIAVGAAKGLEYLHEKAQPHVIHRDIKSSNVLLFDDDVAKIADFDLSNQAPDMAARLHSTRVLGTFGYHAPEYAMTGQLSSKSDVYSFGVVLLELLTGRKPVDHTLPRGQQSLVTWATPRLSEDKVRQCVDSRLGGDYPPKAVAKFAAVAALCVQYEADFRPNMSIVVKALQPLLNARAAHPGAEHAGR

SEQ ID NO: 9091 - protein, 252 aa, Zea mays
  unsure (1)..(252): unsure at all Xaa locations
TARVRRLPQLHISLDVPSCAFRHHNPPAAASTSASRASGEFRLSDFDRLAVLGRGNGGTVYKVAHRRTSALYALKVLHRGDPGAASEVDALRRADSSPHVVRCHSVLPAAAPGEVALLLELVDGGSLDAVAARRGAFAEAALAEVAAQVLAGLAHLHARRVVHRDVKPANLLVSAAGEVKIADFGIAKVLSRAGDHCAAYEGTAAYMSPERFDTERHSHADPCAADVWSLGVTVLELLXGRYPLLPAGQKPR

SEQ ID NO: 9092 - protein, 139 aa, Glycine max; identical to SEQ ID NO: 1310

SEQ ID NO: 9093 - protein, 354 aa, Hebeloma cylindrosporum
MAYRYHNDLLAPYLALPQGDKIQAEYVWVDGDGGLRSKTTTVSKKVTDIGSLRIWDFDGSSTNQAPGHDSDVYLRPAAIFKDPFRGGDNILVLAETYNSDGTPNRTNFRHHAAKVMEQAKEDVPWFGLEQEYTLFDADGSPYGWPKGGFPGPQGPYYCGAGTGKVFARDLIEAHYRACLYSGINISGINAEVMPSQWEFQVGPCEGISMGDHLWMARYLLVRIAEQWAVKVSFHPKPLQGDWNGAGCHTNYSTKAMREPGGMKVIEEAIEKLSKRHDEHIAVYGEDNDLRLTGRHETGHIGAFSSGVANRGASIRVPRHVAAQGYGYLEDRRPASNIDPYRVTSIIVETTLLNA

SEQ ID NO: 9094 - protein, 305 aa, Miscanthus sinensis var. sinensis
IESVGEGVTDVAPGDHVLPVFTGECKECAHCRSAESNMCDLLRINTDRGVMIGDGKSRFSINGKPIYHFVGTSTFSEYTVMHVGCVAKINPQAPLDKVCVLSCGISTGLGASINVAKPPKGSTVAIFGLGAVGLAAAEGARIAGASRIIGVDLNPSRFEEARKFGCTEFLNPKDHKKPVQEVLAEMTNGGVDRSVECTGNINAMIQAFECVHDGWGVAVLVGVPHKDAEFKTHPMNFLNERTLKGTFFGNFKPRADLPNVVELYMKKELEVEKFITHSIPFAEINKAFDLMAKGEGIRCIIRMEN

SEQ ID NO: 9095 - protein, 266 aa, Fusobacterium nucleatum subsp. vincentii ATCC 49256
MSRIFQENKIEAVMHFAGYIRVPESVDDPNKYYFNNTYTTMCLIQSMVKHNVKNIIFSSTAAVYGEIIEDQPIDEKHSTVPINPYGASKLMSERIILDCAKAYGLNYSIFRYFNVAGAHEKYPIGQKGEGVTSLITLTLQAAKDSNRVLEVFGDDFPTKDGTGIRDYIHVVDLVKAHVLSLKLLFKNESNIFNLGNGNGFSVLETVEAARKVTCKKISYKITGRRKGDPACVIASSKKAQKLLGWKTQYTNVEKIIETGWHFVENL

SEQ ID NO: 9096 - protein, 728 aa, Pseudomonas aeruginosa UCBPP-PA14
MTSITPVTLANCEDEPIHVPGAIQPHGALIALRADGMVLAASENIQALLGFVASPGSYLTPEQVGPEVLRMLEEGLTGNGPWSNSVETRIGEHLFDVIGHSYKEVFYLEFEIRTADTLSITSFTLNAQRIIAQVQLHNDTASLLSNVTDELRRMTGYDRVMAYRFRHDDSGEVVAESRREDLESYLGQRYPASDIPAQARRLYIQNPIRLIADVAYTPMRVFPALNPETNESFDLSYSVLRSVSPIHCEYLTNMGVRASMSISIVVGGKLWGLFSCHHMSPKLIPYPVRMSFQIFSQVCSAIVERLEQGRIAELLRVSTERRLALARRARDADDLFGALAHPDDGIAALIPCDGALVMLGGRTLSIRGDFERQAGNVLQRLQRDPERDIYHTDNWPQPSEDSPDGGDCCGVLAIRFHRQESGWIFWFRHEEVHRIRWGGKPEKLLTIGPSGPRLTPRGSFEAWEEVVRGHSTPWSETDLAIAEKLRLDLMELCLNHAAEVDRMRQRLIAVLGHDLRNPLQSISMAAALLSSSDTRTTELRQHISASSSRMERLVSQILDMSRLQSGIGLTVNPVDTDVSQLVQQIVCETDVAYPGLVIEIAIDPQVRAVVDPDRYAQVAANLLSNARHHGLPGRPVLVTLTRQGDEVCLSVLNETSGLSEAQLANLFEPFKRESADNQRNRNGLGIGLYISQAIAQAHQGRIDVDCRDDVITFCLRLPVRQAETGSSS

SEQ ID NO: 9097 - protein, 491 aa, Pseudomonas fluorescens PfO-1
MTMGGQCRPREPGDAGMSQPTQKLRLGALIALVVGSMIGGGIFSLPQNMAARADAGAILIGWGITAIGMLTLAFVFQTLANRKPELDSGVYAYAKAGFGDYMGFSSAWGYWISAWLGNVGYFVLLFSTLGYFFPVFGQGNTPIAIGCASVLLWAVHFLVMRGIKEAALINQLTTVAKIIPLIMFVVIAAVAFKADVFTRDIWGRSNPNFGGVMDQVRNMMLVTVFVFIGIEGASVYSARAEKRTDVGRATVIGFLGVLALLVLVNVLSLGIMSQPELATLQNPSLAAVLEHIVGPWGALLISVGLAISLLGALLSWALLCAEILFATAKDNTMPAFLKKENANHVPVNALWLTNVMIQIFLLITLFSAGTYTSLIYLASSMILVPYLWSAAYAVLLSGRGETYEHASAERTKDLLIGGIALCYAVWLLYAGGVKYLLLSALLYAPGVILFAKAKHEQGEPLFTTLEKGIFTCVIAGAGLAAYGLYSGVLSL

SEQ ID NO: 9098 - protein, 288 aa, Zea mays
MATAATASATAATRFTLLAGAGLRSRITRLPTAVRFQRQRGLTTTALLKTADLQPKEQGKPETLDYRVFLVDGGGRKVSPWHDVPLRAGDGVFHFVVEIPKESSAKMEVATDEAFTPIKQDTKKGNLRYYPYNINWNYGLLPQTWEDPTSANSEVEGAFGDNDPVDVVEIGERRANVGDVLKVKPLAALAMIDEGELDWKIVAISLDDPKASLVNDVDDVEKHFPGTLTAIRDWFRDYKIPDGKPANRFGLGNKPASKEYALKVIEETNESWEKLVKRNIPAGELSLA

SEQ ID NO: 9099 - protein, 326 aa, Arabidopsis thaliana
MAAKALKDLKNLPVSERNIDYKTKLLVGKMNGTAEDKPPQNSVPFDHNHPKGDEIEKPEAERVIVEIEYIESKDLNNVTQVDAVLKSLVTELDSKDWVLVCDALNTIRRLSIFHKEEMLHMLEKVILFIVKSLKNPRSAVSKTACMTSADIFSSYNDHTIDQLDLLLTQLLLKSSQDKRFVCEAAEKALVAMTAHVSPALLLPKLQPFLKNRNPRIRAKASTCFSRCVPRLGIEGIREYGIEKLVQAASSQLSDKLPESREAARAVLLELQTVYKKTTNVEPKEEHPEPVTWQIFCQSNLSPLSAQAVIRVTNVAGVAREGLVAGS

SEQ ID NO: 9100 - protein, 246 aa, Cathaya argyrophylla
YTYTLRNTEPEDVIIRVIYCGICHSDLVQMHNEVGMSRYPMVPGHEVVGMVTEIGSEVKKFKVGEHVGVGCIVGSCRSCPNCKESMEQYCNKRIWTYNDVNPDGTATQGGFASSMVVNQMFVVRIPENLPLEQAALLLCAGVTVYSPMKHFGMTEPGKRCGILGLGGVGHMGVKIAKAFGLHVTVISSSDKKKEEALEVLHADAYLVSKDTEKMREAAESLDYILDTIPVGHPLEPYLALLKTNGK

SEQ ID NO: 9101 - protein, 302 aa, Malus xiaojinensis
MSSGTCSTVEPAGAGEIMLFGVRLVVDSMRKSVSLNNLSQYEHPQEAASNNGNNGTAAGKDDAAPGYASENDVVHNSGGNRERERKRGVPWTEEEHKLFLLGLQKAGKGDWRGISRNFVKTRTPTQVASHAQKYYLRRSNLNRRRRRSSLFDITTDTVAPTPMDEEQVQHQDNISQSQLHPLPPPPPSEPRDAGGFSMVPNFARTVGPAVLPVHIENPMENLALRQANPENSTSAKLVHPVALHSAPHATAISDLNLNSTTDASTLTLNLSLSMDSREPSSRHSAFETMQGFSNGDSMISVA

SEQ ID NO: 9102 - protein, 316 aa, Azotobacter vinelandii
MNRPLPRSAAMSLPLVYHDEYSPSFPDGHRFPMEKFRLLRDHLVDSGLTSDAELRRPEPCPTDILALAHDPAYIERYCSGALSREELRRLGLPWTPALARRTVLAVGGSLLAAELALEHGLACHLAGGTHHAHHDHPSGFCIFNDLAVVSRYLLASGRVGRVLIFDCDVHQGDGTARILEDTPEAITVSLHCEQNFPARKARSDWDIGLPRGMGDADYLKVVDDALNYLLPLYQPDLVLYDAGVDVHQDDALGYLALSDAGLAARDGAVLRHCLARGIAVLGVIGGGYDRDRAALARRHGILHHGAARLWRELGLG

SEQ ID NO: 9103 - protein, 444 aa, Triticum aestivum
  unsure (1)..(444): unsure at all Xaa locations
MDPSKLGELRSIPHAPTSSRTQTLAAMDPSKLSELRSFVEACKKDPALLADPALAFFRDYLTSLGATLPASAAAAGKPAPKARSMDDIDDDDDEEDEGEGEDDQDMRAPTPEPDELDEETVESDLELDNDGVVHPDHDDAPQKMGDSSVEVTEESRDASQEAKGQAMEAMSEGKLEEAVEHLTKAILLNPTSAIMYGTRASVFIKMKKPAAAIRDAXEAARDLHAASNIDYDDEINAVLKKEEPNAHKIVEHRRKYDRLRKERAEKKAERDRLRRRAEAQAAYEKAKRKEQSSSRSSGGMPGGMPGGFPFPGGMGGMPGGFPGGMGGGFPGGMGGGMPAGMGGGMPAGMGGGMPAGMGGGMPXGMGGGMPGMGGGMPGAGGAPGNVDMGDILNDPDLMAAFGDPEVMAALQDVMSNPANLAKHQANPKVGPIIAKMMAKMNGNR

SEQ ID NO: 9104 - protein, 490 aa, Lotus japonicus
VALMILRKNLKKPDSIPNIPPGPWKLPIIGSIPHLVGSPPHRKLRDLAKKYGPLMHLQLGEVIFIIVSSAEYAKEVMKTHDVTFASRPRSLFTDIVFYGSTDIGFSPYGDYWRQVRKICNVELLSMKRVQSLWPIREEEVKNLIQRIASEEGSVVNLSQAIDSLIFTITSRSAFGKRYMEQEEFISCVREVMKLAGGFNIADLFPSAKWLENLTRMRSKFEYLHQKMDRILETIIDDHKANSRTKEGQVEGGEEDLIDVLLKYENSSTDQDFHLTIRNIKAILFDIFIAGSETSATTINWTMAEMMKDPILLKKAQDEVREIFQRRGKVDETCIYELKYLKAFINEVLRLHPPGPLVFRECRQACEINGYHIPAKSTVLVNTFAIGTDSKYWAEPERFCPERFIDSSIDYKGTNFEHLPFGAGRRICPGINYGMANVELVLALLLYHFDWTLPKGIKNEDLDLTEEFGVTVSKKEDLCLIPSISHPLPST

SEQ ID NO: 9105 - protein, 163 aa, Triticum aestivum
  unsure (1)..(163): unsure at all Xaa locations
RRSKVTPSIHPTPVRGLGRRGNAVHPCPRPPRRSAARRVDAWWPLLAAXAVPAIVAGQAIRVKRRRDEEQRLKAARGREKSSDEVFVCERVCTSKRMLKKVGAFSKDPIPDTCVTVCGVSELDACADACGRTVCVNQHQVPNWNDVCLKRCQSECLKLSSTVM

SEQ ID NO: 9106 - protein, 336 aa, Zea mays
  unsure (1)..(336): unsure at all Xaa locations
QAGRDQVLCPXWAWCIDISEAAXXEANNSKLALFALEFLARWIVRGENVKPPVQLSVNEGLVISALSAAGRTFSTDLLNAAWSLLRKSLRQKRAPTPETYLAKIYAHSSIGQLQRAFGTLHEFENAYGNSKDVDLELFSPFTSLHPLVVACCKDGFSTLDLVYVQLENLSHADPPYKSLAALNCVVLGCANIWDINRAYETFVAIKEKFELSPDIHSYNALLCAFGKLKQTGEACNVFQHVLTLGVKPNATTYSLLVDAHLANKDPKAALAIIDEMVDAGFTPSKDTLRKVRRRCSRESDFDSDEKVQSLAKQFNYRMGGENRREMLYSMEYNPVY

SEQ ID NO: 9107 - protein, 176 aa, Perilla frutescens var. crispa
MAADEEPNTSLNKGAWTADEDGILAQYVAQHGPKRWKSLAIDAGLNRCGKSCRLRWLNYLRPDIKRGNFSDAEDDLILRFHRLLGNRWSLIAKRIPGRTDNEIKNYWNTHLRKKARLMEKLPAISVTAAMELNIWHDESSSSGTEIRDDDESFDFTAQGTSGLDWVKTFLELEEDA

SEQ ID NO: 9108 - protein, 500 aa, Trifolium repens
FLHLRPTPTAKSKALRHLPNPPSPKPRLPFIGHLHLLKDKLLHYALIDLSKKHGPLFSLYFGSMPTVVASTPELFKLFLQTHEATSFNTRFQTSAIRRLTYDNSVAMVPFGPYWKFVRKLIMNDLLNATTVNKLRPLRTQQIRKFLRVMAQSAEAQKPLDVTEELLKWTNSTISMMMLGEAEEIRDIAREVLKIFGEYSLTDFIWPLKYLKVGKYEKRIDDILNKFDPVVERVIKKRREIVRRRKNGEVVEGEASGVFLDTLLEFAEDETMEIKITKEQIKGLVVDFFSAGTDSTAVATEWALAELINNPKVLQKAREEAYSVVGKDRLVDEVDTQNLPYIRAIVKETFRMHPPLPVVKRKCTEECGINGYVIPEGALVLFNVWQVGRDPKYWDRPSEFRPERFLETGAEGEAGPLDLRGQHFQLLPFGSGRRMCPGVNLATSGMATLLASLIQCFDLQVLGPQGQILKGDDAKVSMEERAGLTVPRAHSLVCVPLARIG

SEQ ID NO: 9109 - protein, 339 aa, Mesorhizobium loti
MSTETNIRIVLAARPQGRPKPSDFRIESVGIAEPGEGELLLQILYLSLDPYMRGRMNATKSYAKPVEIDGVMEGGTVARVVKSRHAGFAEGDIVLSHSGWQGFALSDGVGLRKLDPAAAPVTTALGVLGMPGFTAYAGLLTIGQPKAGETVVVAAASGAVGSAVGQIARIKGARAVGIAGGADKCAFVRRELGFDAVVDHRADNFAEQLKAACPDGIDVYFENVGGPVWDAVFPLLNEFARVPVCGLIAQYNTVAASADDRLPTLMQQVLHRSLTIRGFIQREFVDQRPAFYRDMAGWIASGQVRYREDIVDGLENAPQAFMGLLEGKNFGKLIVRVAQ

SEQ ID NO: 9110 - protein, 383 aa, Azotobacter vinelandii
MMHRFLCWGSIGLIEFLHWIDAIADFSLVPPRKGIPMSYSAAPNRYERIPYRRVGRSGLVLPALSLGLWHNFGDSTPLDTQRALLRTAFDLGINHFDLANNYGPPYGSAETNFGRLLREDFRAYRDELILSTKAGWDMWPGPYGQGGGSRKYVLASLDQSLRRMGVDYVDIFYSHRFDPHTPLEETAGALADTVRQGKALYVGISAYSEAKTREMAALLHEHRVPLLIHQPAYNLFNRWIEKDLLATTEDLGAGVIAFTPLAQGLLTDKYLDGIPANARINRPGGASLRPEHLSEANIRRARALAEIARRRGQSLAQLALAWLLRDARVTSALIGASRPEQLVENVAALDNLAFSPEELAEIDRHAAASGVNLWDRPYTDWPA

SEQ ID NO: 9111 - protein, 471 aa, Pseudomonas aeruginosa UCBPP-PA14
MSSVGEQKVQDGSLKRELGERHIRLMALGACIGVGLFLGSAKAIQMAGPAIMISYILGGLAILVIMRALGEMAVHNPVAGSFSQYAKDYLGPLAGFITGWNYWFLWLVTCVAEITAVAVYMGIWFPDVPRWIWALAALASMGTINLIAVRAFGEFEFWFALIKIVTILAMVVVGIGMIAFGFGNDGIATGISNLWAHGGFMPNGIQGVLMSLQMVMFAYLGVEMIGLTAGEARNPTKTIPSAINSVFWRILLFYVGSLFVIMSLYPWNEIGTQGSPFVMTFERMGIKTAAGIINFVVITAALSSCNGGIFSTGRMLYSLAQHRQAPAFFGKASRSGVPRRALILSILALLLGVLLNYLVPEKVFVWVTSIATFGAIWTWAMILLAQLRFRKTLSPAECDKLQYRMWLYPLSSYLALAFLVMVVVLMAFFEDTRIALYIGPPFILLLTVLYYAFNLAPKEPAGTGSVSRAAS

SEQ ID NO: 9112 - protein, 1244 aa, Magnetococcus sp. MC-1
MGNVAGISHRILNWLRYCCFVGLFQRQLRTEPENIVIVTCENCDARFDVDPQLLGSKGRKLKCSQCHHIFFQAPPEPKSAQPPASEQPGLEDESTAQDNDTESRDYAEFAFEESPLEEVDLDEIEKLTAQATLDMALEATRDKRQEPSFDEDTQVDEDAVIEPSLEEVDVDQMIQAATALPTEPEAASEAEEELEAEEELEAEEEPEAEEEPEAEEEPEAEEEPEAEEELEAEEEPEAEEEPEAEEESEAEEESEAEEEPEAEEESEVEEAPEVEEELELEEEAEEEPEAEEEAAPEAEEEAAPEVEEEPEVEEELELEEEAEEESEAEEESEAEEEAAPEAEEEAAPEAEEEAAPEAEEEAAPEAEEEAAPEVEEEPEVEEELELEEEAEEAPEAEEAPEIEEELEAEEELEAEEELEAEEELEAEEELEAEEELEAEEELEAEEELEAEEELEAEEELEAEEELEAEEELEAEEELEAEEELEAEEELEAEEEPEAEEAPEIEEELEAEEESEAEEVPEIEEELEAEEEPEVEEEPEVEEEPEVEEEPEVEEEPEVEEEPEVEEEPEVEEEPEVEEEPEVEEELELEEEAEEAPEVEEELELEEEAEEEAAPEVEEEPEAEEESEAEEEAAPEVEEELELEEEAEEEPEAEEELEAEEEPEAEEEPEAEEEPEAEEEPEAEEEPEAEEEPEAEEEPEAEEEPEAEEEPEAEDAFALDVDEQVPAADFADDGDFLSESALQEEQDKLLDVDDFNAATMVEPASLVEEDELDLAEVMENAERTADEAFNPSAMAEPDLLESELQLEDVEAEVVEEGGAELTLEGEEQAAFADLLTEEDDLSALADDALDLDDDDDVTVLADPPAMDLEGLVDAVESDHEVAFEDESVEAFAPLGDDLPNDLDDLTELVNEPGGELMLDDDLAALAPSPVMQERLVPADGMDELSALASDDQDEINLDLPESNDLSLGDLGEAESWSPDDELLEPEDETILAVPDSDETIEELDFPEPDIPQPKEEIIELDYGQQEEEPFDLSSSPDDEDEDLEWANTATPAKEKGGLGGLLGWGVAAMMLLAVIGAWFGKDYLSRGGATNRVDDFTLDGVEVKWRESDHGVLLIVEGSMTNQMNRRSARRPMMARVTLLDENNRNLNSVSVIPERIIPERAMNLNPNNMARIITKQGDIETRFNKMNPKQPVKFQAIFMDPPMEAVRYRIDFDATPEAEWEKQKKARSQAIKNREGTTTFMGNF

SEQ ID NO: 9113 - protein, 343 aa, Arabidopsis thaliana
MISKDPRSSLPPGFRFHPTDEELILHYLRKKVSSSPVPLSIIADVDIYKSDPWDLPAKAPFGEKEWYFFSPRDRKYPNGARPNRAAASGYWKATGTDKLIAVPNGEGFHENIGIKKALVFYRGKPPKGVKTNWIMHEYRLADSLSPKRINSSRSGGSELDDWVLCRIYKKSHASLSSPDVALVTSNQEHEENDNEPFVDRGTFLPNLQNDQPLKRQKSSCSFSNLLDATDLTFLANFLNETPENRSESDFSFMIGNFSNPDIYGNHYLDQKLPQLSSPTSETSGIGSKRERVDFAEETINASKKMMNTYSYNNSIDQMDHSMMQQPSFLNQELMMSSHLQYQG

SEQ ID NO: 9114 - protein, 238 aa, Oryza sativa (japonica cultivar-group)
MTRLAAAALRRATAASGIPSSSSRSSVLAPFAPRLFSTEASGETPAAGAAAQGSQDEPFFKPSDEGVAYGRFYSVIPGGSRLPKSMLKTDIIHHLDKSELSLDDVKIDYNRGYYPVGALLRFSSVPLFNTAVRQTREGRQYRLEMISREEFDLKQSYDGKAILLQGVPRNAVPEDIERFLCGTNVEPPPFESFLRPGVPDPIRVVLVKFRSRTDAANAFITKNRGFCLNNPVSMRVLQ

SEQ ID NO: 9115 - protein, 293 aa, Glycine max
  unsure (1)..(293): unsure at all Xaa locations
MMGDSEMAKFGLKVGKNVKNGFPRGLDPAISKFFVQLQIVVKSQLSRLAKQDGMSLMRSVQRKGDRSFSYSEAELNEQLQAWRENPSWVDKPPLIKVTVPKGSLCNLDVEVDVGLPPDAVYNIVIDPDNRRVFKNIKEVVSRKVLVDQGHRQVVDLDQAAIXKFLWWSGTISINVLVDQXRQVHSMKFKQTNDVFXKKIESYWRTENXFVDEAMCHPYKKVTKGDYNACRRSKGRNGSKVSLQQILQPSTIXPHPLSWYSMGIITRRIYIFCYNVLPETARISAAVAFYFSDA

SEQ ID NO: 9116 - protein, 407 aa, Oryza sativa (japonica cultivar-group)
MATDSSSSAAADKNTVFRKLRAKSDNKMCFDCNAKNPTWASVTYGVFLCIDCSAVHRSLGVHVSFVRSTNLDSWTPEQLKMMVYGGNNRAQAFFKQHGWTDGGKIEAKYTSRAADLYRQLLAKDVAKNSTEDGNNSWPSSPVAASQPTNQADAIPDLKLAEASKEVANEKTEPEVIRSPRAPTHSFKKPIVAKKPGNKTGGLGARKLTSKPNESLYEQKPEELAPALPPVTENSTAKSKSHTSRFEYVENTPSAGSNSEENQVIGHVAPPKSSNFFGEFGMDSGYHKKSAPGPSKVQIEESSEARQKFSNAKSISSSQFFGDQASFEKEAQVSLQKFSGSSAISSADLFGHPTNSSNVDLSASDLINRLSFQASQDLSSIKNMAGETGKKLTSLASNIMSDLQDRIL

SEQ ID NO: 9117 - protein, 392 aa, Thermobifida fusca
MACSLRIAWNDGLTSYNFGPQHPLAPVRVELTMELCRRLGVFDAPGVSFAPVEPADDALLELVHSRDYIAAVKQAGKTLEPNMKYALGTSDNPVFPDMHEASALVAGASVAAARAVWQGEAEHGANIAGGLHHAMPNKAWGFCVYNDAAVAIAWLLEQGAKRVAYVDVDVHHGDGVQEMFYNDPRVLTISLHESPLTLFPGTGYPEEIGGPDAEGYAVNVALPAGTNDAMWLRAFHAIVPPLLREFQPEVLVTQQGCDTHTLDPLANLTLSIDGQRRTYEALHELAKETAAGRWVLLGGGGYELVQVVPRAWTHLLAEAAGTPIDPETRTPDEWHEFVKERTGEVPPLHMTDGRKADYVPFEAGFDPADAVDRAIRATRAAVFPCHGIDPMM

SEQ ID NO: 9118 - protein, 457 aa, Escherichia coli
MMEGQQHGEQLKRGLKNRHIQLIALGGAIGTGLFLGSASVIQSAGPGIILGYAIAGFIAFLIMRQLGEMVVEEPVAGSFSHFAYKYWGSFAGFASGWNYWVLYVLVAMAELTAVGKYIQFWYPEIPTWVSAAVFFVVINAINLTNVKVFGEMEFWFAIIKVIAVVAMIIFGGWLLFSGNGGPQATVSNLWDQGGFLPHAFTGLVMMMAIIMFSFGGLELVGITAAEADNPEQSIPKATNQVIYRILIFYIGSLAVLLSLMPWTRVTADTSPFVLIFHELGDTFVANALNIVVLTAALSVYNSCVYCNSRMLFGLAQQGNAPKALASVDKRGVPVNTILVSALVTALCVLINYLAPESAFGLLMALVVSALVINWAMISLAHMKFRRAKQEQGVVTRFPALLYPLGNWICLLFMAAVLVIMLMTRGMAISVYLIPVWLIVLGIGYLFKEKTAKAVKAH

SEQ ID NO: 9119 - protein, 215 aa, Zea mays
MTRRCSHCSHNGHNSRTCPNRGVKIFGVHLTDGSAIRESASMGNLSLLSAGSTSGGASPADGPDLADGGGGYASDDFVQGSSSASRDRKKGVPWTEEEHRRFLLGLQKLGKGDWRGISRNFVVSRTPTQVASHAQKYFIRQSNMSRRKRRSSLKPSNPIQTRQARNPPMAHRVLLLLSLASAAVAAAVDAEDPLIRQVVPGGDDNDLELNAESTF

SEQ ID NO: 9120 - protein, 162 aa, Glycine max
MAASSSEKQVVVIGIDDSEQSTYALNWALDNFFPSPIFKLVLIHSRPTATSAVGFAGPVFAGAAEVLPIVDSDLRKIGARVLETAKQLCINKSVNDVTAEVVEGDPRNVLCDAVDKYRAAMLVVGSHGYGAIKRAVLGSVSDYCAHHAHCTVMIVKKPKIKH

SEQ ID NO: 9121 - protein, 81 aa, Glycine max
PLGRLASSSLLDHVKPLNLEIERPDLVHRPDSSQLNRVSSIETEEEGVDAKADDFINRFRQQLRLQRLDSIIRYRDMLKRY

SEQ ID NO: 9122 - protein, 236 aa, Pseudomonas aeruginosa PAO1
MAWHAALEAVIHHPLFGVGVTLGAYQLALAAYERTRWVFLQPVLVSMLVVIGVLLLCGIDYDEYSASAKVLTILLGPATVALAVPLFLNLRRIRQLFWPTLLTLVVAGTLATVLGIAFGWLFGAEPRMLMSMAPKSVTSPIAMLVASQIGGVAALAAVFVLITGVLGAILGPELLSAIGVRHPAAQGMALGMTAHAVGTSRALQEGEECGAFAALAMSLMGVATAVLLPLAVALVA

SEQ ID NO: 9123 - protein, 365 aa, Apium graveolens
MAKSSEIEHPVKAFGWAARDTTGLLSPFKFSRRATGEKDVRLKVLFCGVCHSDHHMIHNNWGFTTYPIVPGHEIVGVVTEVGSKVEKVKVGDNVGIGCLVGSCRSCESCCDNRESHCENTIDTYGSIYFDGTMTHGGYSDTMVADEHFILRWPKNLPLDSGAPLLCAGITTYSPLKYYGLDKPGTKIGVVGLGGLGHVAVKMAKAFGAQVTVIDISESKRKEALEKLGADSFLLNSDQEQMKGARSSLDGIIDTVPVNHPLAPLFDLLKPNGKLVMVGAPEKPFELPVFSLLKGRKLLGGTINGGIKETQEMLDFAAKHNITADVEVIPMDYVNTAMERLVKSDVRYRFVIDIANTMRTEESLGA

SEQ ID NO: 9124 - protein, 187 aa, Glycine max
LASGLLSSPSSSQVFHSSSYPINPKLFLALEQIKTNKMCFNIEHNAKNITGLNSPEQMQRKLIFDVVNDILAQKIILESSTLWRQPNQPAGRKLRGQLLLDELCTEIDKLQHKNTNANLADEDENLTSLLWEELMHCPTIYTNSYSEIPNVVLDIERLIFKDLITEVVRSGLANHSGKHCRQLLLSK

SEQ ID NO: 9125 - protein, 497 aa, Staphylococcus aureus subsp. aureus MW2
MSKVQNESNNVVKRGLKDRHISMIAIGGCIGTGLFVTSGGAIHDAGALGALIGYAIIGIMVFFLMTSLGEMATYLPVSGSFSTYATRFVDPSLGFALGWNYWFNWVVTVAADITIAAQVIQYWTPLQGIPAWAWSALFLVIIFSLNSLSVRVYGESEYWLALIKVVTVIVFIAIGLLTIVGIMGGHVVGFEIFNKGEGPILGGNLGGSLLSILGVFLIAGFSFQGTELIGITAGESENPERAVPKAIKQVFWRILLFYILAIFVIGMLIPYDSSALMGGSDNVATSPFTLVFKNAGFAFAASFMNAVILTSVLSAGNSGMYASTRMLYSMSKDKLAFEAFGKTNKNGVPYMSLLVTAIIVVIIFVLQSLTKGAYEYIVAASGLTGFIAWVGIAVSHYRFRRAFDKQNYDKSKLKYTAKLFPFGPLFAGFLCIVVIIGQDVDFIKTGDFNFSRFLITYMGIPVFLAFFIYHKLRYKTKKIPLEQVDLRQDVSMDEIKG

SEQ ID NO: 9126 - protein, 121 aa, Zea mays
  unsure (1)..(121): unsure at all Xaa locations
MAAAAFDAYTDKNAIFRRLKAKPENKMCFDCNAKNPTWASVTYGIFLCLDCSXVHRSLGVHITFVRSTNLDSWTPDQLKMMAFGGNNRAHAFFKQHGWTDGGKVEAKYTSRAAELYRQMLN

SEQ ID NO: 9127 - protein, 250 aa, Zea mays; identical to SEQ ID NO: 2044

SEQ ID NO: 9128 - protein, 312 aa, Agrobacterium tumefaciens str. C58 (Cereon)
MPMALGHEAAGVVEALGEGVRDLEPGDHVVMVFMPSCGHCLPCAEGRPALCEPGAAANAAGRLLGGATRLNYHGEVVHHHLGVSAFAEYAVVSRNSLVKIDRDLPFVEAALFGCAVLTGVGAVVNTARVRTGSTAVVIGLGGVGLAAVLGARAAGASKIVAVDLSQEKLALASELGATAIVNGRDEDAVEQVRELTSGGADYAFEMAGSIRALENAFRMTKRGGTTVTAGLPPPGAALPLNVVQLVGEERTLKGSYIGTCVPLRDIPRFIALYRDGRLPVNRLLSGRLKLEDINEGFDRLHDGSAVRQVIEF

SEQ ID NO: 9129 - protein, 150 aa, Zea mays
MYGWEMLSFNIHDGFLEAIVRGNRSGLLTAADYNNLCQCETLDDIKMHLTATEYGPYLQNEPSPLHTTTIVEKCTLKLVDEYKHMLCQATEPLSTFLQYITYGHMIDNVVLIVTGTLHERDVNELLEKCHPLGMFDSIASLAGAQNMREL

SEQ ID NO: 9130 - protein, 322 aa, Streptomyces avermitilis MA-4680
MQFVKLGSTGLDVSRICVGCMSFGLPDRGPHEWTLDEEASRPLIRQALEAGINFFDTANVYSDGTSEEIVGRALADFARREEIVLATKVNGSMHEGPNGHGLSRKAIMTEIDNSLRRLGTDYVDLYQIHRWDPTTPVEETMEALHDVVKAGKARYVGASSMYAWQFSKAQYTARLNGWTRFVSMQNHYNLLYREEEREMLPLCEDQGVGVLPWSPLARGRLTRDRDVTTARSRTDEFGKTLYRQGDDEIVDAVARIAADRGVPRARVALAWLLHQRAVTAPIVGATKPAHLDDAVAALDLELSEKEIEQLEQPYVPRAISGH

SEQ ID NO: 9131 - protein, 211 aa, Desulfitobacterium hafniense
FYVGTLFVIMSIYPWNQVGTNGSPFVLTFQHLGITFAASILNFVVLTASLSAINSDVFGVGRMLHGMAEQGSAPKMFAKTSRRGVPWVTVTVMTIALLFAVYLNYIMPENVFLVIASLATFATVWVWIMILLSQIAFRRRLPPEEAKALKFRVPGGVATTVIGLLFLVFIIGLIGYHPDTRISLYVGFAWILLLLIGWQFKTRRERKLAKA

SEQ ID NO: 9132 - protein, 160 aa, Oenococcus oeni MCW
MSIYDYKATLENGESYKLDKYKGKIMVIVNTATKCGFAPQFEELEKIYKQFKDSGLVVLGFPSNQFKQELDSSQAAAEACRTTYGVTFLMHEINDVNGKDELPLFSYLKDNAPGAIGKSIKWNFTKFLVKQDGEVAKRYAPKTDPEKMIPDIEELLQLQK

SEQ ID NO: 9133 - protein, 313 aa, Salmonella enterica subsp. enterica serovar Typhi
MNKAVIAIHGGAGAIARAQMSHEQELRYIQALSEIVESGQKMLEAGDSALDVVTEAVRLLEACPLFNAGIGAVYTRDGTHELDACVMDGNTLKAGAVAGVSHVRHPVLAARLVMERSPHVLMVGEGAENFAFSQGMARVSPDIFSTPARYEQLLAARAAGEMALDHSGAPLDETKKMGTVGAVARDKFGNLAAATSTGGMTNKLPGRVGDSPLVGAGCYANNASVAVSCTGTGEVFIRTLAAYDIAALMEYGGLSLADACERVVMEKLPALGGSGGLIAVDHEGNVALPFNSEGMYRAWGYAGDTPTTGIYRE

SEQ ID NO: 9134 - protein, 180 aa, Triticum aestivum
QIDFSAGTSSKPGVLTKKPAGIDGDGAEVDGLCKDEGPPPALEDRRPRKRGRKPANGREEPLNHVEAERQRREKLNQRFYALRAVVPNISKMDKASLLGDAITYITDLQKKLKEMEVERERLIESGMIDPRDQTPRPEVDIQVVQDEVLVRVMSPMESHPVRAIFQAFEEAEVHAGESKI

SEQ ID NO: 9135 - protein, 274 aa, Ceratopteris richardii
MAWSPVKEEHLPQLVSTESTIEKTLKAKDPCKRPKRRAKKRTGKGSTIDDSIDKRRGLTVEQINFLEMSFKEDNKLEPERKACIAKQLGVRPRQVAIWFQNRRVRWKNKQVEQDYETLKARYQDVVKEKDSIMMQYESTMEGNRKLQAEVARLTNLLQSTEGISAHTDMDQVLSNCNSENLNCISENISPAKSADYPSEIIVSGDPTEGDISRFIFQEPISSMPYDLLPDGDYFILSPENSTGSFPSLVQQLVSNGHCVEDAYNIYLGYEYLCC

SEQ ID NO: 9136 - protein, 282 aa, Glycine max
MDTCKKSPLKPWKKGPTRGKGGPQNASCEYRGVRQRTWGKWVAEIREPKKRTRLWLGSFATAEEAAMAYDEAARRLYGPDAYLNLPHLQPRSTSTITSGKFKWFPSKNFISMFPSCGLLNVNAQPSVHLIHQRLQELKRNSVVSQSSSSSSNDPKAEIQNVDSKNHGEDENPPKDVQTSSEEVLGDLQEKPQIDLHEFLQQMGILKEERQSERTDSSGSSTVREAVLTDDCDHLGVFSDKSVNWEALIEMHGLAGIQESEVTQLEAYEPNDDLTFSTSIWNF

SEQ ID NO: 9137 - protein, 376 aa, Brassica napus
MGWIPCSGKSSGKTKKRSDSDENLSRNCSVSASERSKAKSSVSESRSRGSDNIVAQTFTFSELATATRNFRKECLIGEGGFGRVYKGYLASTGQTAAIKQLDHNGLQGNREFLVEVLMLSLLHHPNLVNLIGYCADGDQRLLVYEYMPLGSLEDHLHDISPSKQPLDWNTRMKIAAGAAKGLEYLHDKTMPPVIYRDLKCSNILLGDDYFPKLSDFGLAKLGPVGDKSHVSTRVMGTYGYCAPEYAMTGQLTLKSDVYSFGVVLLEIITGRKAIDNSRCTGEQNLVAWARPLFKDRRKFSQMADPMIQGQYPPRGLYQALAVAAMCVQEQPNLRPVIADVVTALTYLASQRFDPMSQPVQGSLFGPGTPPRSKRVV

SEQ ID NO: 9138 - protein, 147 aa, Lactococcus lactis subsp. lactis
MNGETVSMSDFKGKVVIVVNTASKCGFTPQFEGLEKLYENYKDQGLEILGFPCNQFVNQDAGENSEINEFCQLNYGVTFPMFQKIKVNGKEAHPLYQFLKKEAKGALSGTIKWNFTKFLIDREGNVIERFAPKTEPKEMEEEIQKLL

SEQ ID NO: 9139 - protein, 672 aa, Zea mays
  unsure (1)..(672): unsure at all Xaa locations
MSSSRPAHSSSSSSRTRQSSRARILAQTTLDAELNAEYEESGDSFDYSKLVEAQRSTPPEQQGRSGKVIAYLQHIQRGKLIQPFGCLLALDEKSFRVIAFSENAPEMLTTVSHAVPNVDDPPKLGIGTNVRSLFTDPGATALQKALGFADVSLLNPILVQCKTSGKPFYAIVHRATGCLVVDFEPVKPTEFPATAAGALQSYKLAAKAISKIQSLPGGSMEALCNTVVKEVFDLTGYDRVMAYKFHEDEHGEVFAEITKPGIEPYIGLHYPATDIPQAARFLFMKNKVRMICDCRARSVKIIEDEALSIDISLCGSTLRAPHSCHLKYMENMNSIASLVMAVVVNENEEDDEPEPEQPPQQQKKKRLWGLIVCHHESPRYVPFPLRYACEFLAQVFAVHVNKEFELEKQIREKSILRMQTMLSDMLFKESSPLSIVSGSPNIMDLVKCDGAALLYGDKVWRLQTAPTESQIRDIAFWLSEVHGDSTGLSTDSLQDAGYPGAXASLGDMICGMAVAKITSNDILFWFRSHTAAGIKWGGAKHDPSDKDDNRRMHPRLSFKAFXLEVVKTKSLPWXSDYEMDAIHSLQLIXLRGYTGMMASKPAQASGLDKPESVDLKLXMGLAEFASSGKVEMVPPWMENSKLXPNLGAVDGQWXMGQWDGNQKVAELSGLRV

SEQ ID NO: 9140 - protein, 616 aa, Arabidopsis thaliana
MGCLRSLVRRKQFDSSNGKAETHHHHQQLAKALTFPHLIAIGVGSTIGAGVYILVGTVAREHSGPALALSFLIAGISAALSAFCYAELSSRFPSAGSAYHYSYICIGEGVAWLIGWALILEYTIGGSTVARGISPNLAMIFGGEDCLPTILARHQIPGLDIVVDPCAAVLVFIVTGLCCLGVKESTFAQGIVTTANVFVMIFVIVAGSYLCFKTGWVGYELPTGYFPYGVDGMLTGSATVFFAYIGFDTVASMAEEVKNPRRDLPLGIGISLLLCCLLYMMVSVVIVGLVPYYAMDPDTPISSAFSSHGIQWAAYLINLGAVMALCSALMGSILPQPRILMAMARDGLLPSYFSYVNQRTQVPINGTITTGVCAAILAFFMDVSQLAGMVSVGTLVAFTMVAISLLIVRYVVPPDEVLIRLELVPLPSSLQENSSSHVGTSIRSKQPLLGKVDDSVVDKENAPGSWVLNKKNRRKFAGWSIMFTCIGNFLLSYAASSFLLPGLLRYSLCGVGGLFLLVGLIVLICIDQDDARHSFGHSGGFICPFVPLLPIVCILINMYLLVNLGAATWVRVSVWLFLGVVVYIFYGRRNSSLVNAVYVSTAHLQEIRRTSGHSLA

SEQ ID NO: 9141 - protein, 453 aa, Staphylococcus aureus subsp. aureus Mu50
MAEKLQRELSNRHIQLIAIGGAIGTGLFLGAGQTIALTGPSILLTYIIIGFMLFMFMRGLGEIIIQNTEFKSFADVTNTYIGPFAGFVTGWTYWFCWIITGMAEVTAVAKYVSFWFPEIPNWISALFCVLLLMSFNLLSARLFGELEFWFSIIKIATIIGLIVVGFVMILFAFKTQFGHASFTNLYEHGIFAKGASGFFMSFQMALFSFVGIEMIGVTAGETKDPVKTIPKAINSVPIRILIFYVGALAVIMSIIPWQQVDPDNSPFVKLFALIGIPFAAGLINFVVLTAAASSCNSGIFSNSRMLFGLSSQQQAPPNFSKTNKYGVPHVAIFASSALLLVAALLNYIFPDATKVFTYVTTISTVLFLVVWGLIIIAYINYSRKNPDLHKNATYKLLGGKYMGYLIFVFFIFVFGLLFINVDTRRAIYFIPIWFILLAFMYLRYKRIAAKSNK

SEQ ID NO: 9142 - protein, 193 aa, Enterolobium cyclocarpum
YDRVMAYKFHEDDHGEVVSEIRRSDLEPFFGLHYPATDIPQAARFLFKQNRVRMICDCHANPVKVIQSEESRQPLCLVNSTLRSPHQCHAQYMENMGSIASLVMAVIVNGNDTTKLWGLLVCHHTSPRHVPFPLRYACEFLMQAFGLQLYMEMQLASQMAEKRTLKTQTLLCDMLLRDALFSIVTQSPNIMDL

SEQ ID NO: 9143 - protein, 342 aa, Humulus lupulus
MSGLRSKFMEVYSILKSELLNDPAFEFTDDSRQWVERMLDYNVPGGKLNRGLSVIDSYQLLKGGKELTEEEIFLTSALGWCIEWLQAYFLVLDDIMDNSVTRRGQPCWFRVPKVGLIAANDGILLRNHIPRILKKHFKGKSYYVDLLDLFNEVEFQTASGQMIDLITTIEGEKDLSKYSIPLHHRIVQYKTAYYSFYLPVACALVMAGENLDNHVDVKNVLIEMGTYFQVQDDYLDCFGHPDVIGKIGTDIEDFKCSWLVVKALEIATEEQKKMLFEHYGKGDEASVKKVKELYKALDLEGVFADYENASYQKLIKSIEAHPKEEVQAVLKSFLAKIYKRQK

SEQ ID NO: 9144 - protein, 152 aa, Zantedeschia aethiopica
MVKAVAVLTGSEGVQGTVFFAQEGEGPTTITGSLSGLKPGLHGFHVHALGDTTNGCMSTGPHFNPAGKEHGAPEDGNRHAGDLGNVTVGEDGTVNFTVTDSQIPLTGLNSVVGRAVVVHADSDDLGKGGHELSKTTGNAGGRLACGVIGLQA

SEQ ID NO: 9145 - protein, 491 aa, Bacillus cereus ATCC 14579
MLNMNSATNQATSKTETTQGKGELRRGLKSRHLTMISLGGTIGTGLFLASGGVIHSAGPGGALIAYAAIGIMVYFLMTSLAELAAYMPVTGSFSTYATKFVDPSLGFALGWNYWYNWAITIAAELAAVTLIMKFWFPDTPSLIWSGLCLAIIFLLNYLSVKGFGESEYWFALIKVVTIIIFLIVGFMMIFGIMGGETVGFKNFTVADAPFNGGIMAIIGVFMAAGFSFQGTELLGVAAGETSDPERNIPKAIRSIFWRILLFYILAILVIGLLIPYTTESLAASDVTVSPFTLIFEKAGVAFAASVMNAVILTAVLSAGNSGMYASTRMLWDLARQGKAPKFLGKLDSRGVPVNALIVTSIVGSIAFIASLFGDGVVYIWLLNASGMSGFIAWVGIAISHYRFRKAYIAQGKDLNDLPYRAKWFPFGPIFAFTLCIIVILGQNYGAFMGESIDWNGVLVSYIGLPLFLVLWLGYKFTKKTKVIPLDKCELK

SEQ ID NO: 9146 - protein, 152 aa, Triticum aestivum; identical to SEQ ID NO: 6819

SEQ ID NO: 9147 - protein, 293 aa, Rhizobium sp. USDA 3353
  unsure (1)..(293): unsure at all Xaa locations
RGKSQIKDYAEFPTLEQLPLWGFDGSSTQQAEGHSSDCVLKPVAVFPDPARTNGVLVMCEVMMPDGVTPHSSNKRATILDDEGAWFGFEQEYFFYKDGRPLGFPESGYPAPQGPYYTGVGYSNVGSVARQIVEEHLDQCLAAGINHEGINAEVAKGQWEFQIFGKGSKKAADQMWMARYLMQRLTEKYGIDIEYHCKPLGDTDWNGSGMHANFSTAYMREVGGKAYFEALMAAFDKNLMDHIAVYGPDNDKRLTGKHETAPWNKFSYGIADRGASIRVPHSFINNGYKGYXED

SEQ ID NO: 9148 - protein, 198 aa, Porteresia coarctata
GQTPVFPRTFGHEAGGIVESVGEGVTDLTPGDHVLPVFTGECKECPHCKSAESNMCDLLRINTDRGVMIGDGKSRFSINGKPIYHFVGTSTFSEYTVMHVGCVAKINPKAPLDKVCVLSCGISTGLGATINVAKPPKGSTVAIFGLGAVGLAAAEGARIAGASRIIGVDLNPNRFEEARKFGCTEFVNPKDHDKPVQQ

SEQ ID NO: 9149 - protein, 231 aa, Zea mays
  unsure (1)..(231): unsure at all Xaa locations
MKKIFGAKKDKGPPPSIQDATERINKRGETVDEKIKKLDEELARYKEQIRKTRPGPSQEAIKARAIRLLKHKRMYEEQRNMLYNQTYNLDQVGFAADGLKDAQQTMNAMKAANKELKGMMKTVKIDEIDNMQDEMTDLMDVSNEIQETLGRSYNIPDDVDEEELMGELDALESDMEFDSAAVPSYLQPDSDFDADLNLPAAPSRPAMVPAGGLQEDELGLPXAVPRASLRS

SEQ ID NO: 9150 - protein, 492 aa, Candida albicans
MPQVTKTNNENEFRLTRSKVQHQESISTIKNTTISNSQHKQQTQQQISSPPQVSVTSSEGVSHVNTRQYLGDVSNQYITNAKPTNKRKPLGGDNAPLQKQQHRPSRPIPIASDNNNNGSTSSSSNSSNNNNNDANRLASLAVPSRLPQKRQATESSTNLVEKLRVPQPEVGERSQSYHKKSRLIDYEWQDLDEEDNDDQLMVSEYVNEIFSYYYELETRMLPDPQYLFKQTLLKPRMRSILVDWLVEMHLKFKLLPESLFLAVNVMDRFMSVEVVQIDKLQLLATAALFTAAKNEEVFSPLVKNYAYFTDGSYTPEEVVQAEKYMLTILNFDLNYPNPMNFLRRISKADDYDVQSRTLGKYLLEITIVDYKFIGMRPSLCCALAMYLARLILGKLPVWNGNLIHYSGGYRISDMRECIELMFQYLIAPIEHDEFFKKYAMRKFMRASTLCRNWAKKFQASGRDLFDERLSTHRLTLEDDDEEEEIVVAEAEE

SEQ ID NO: 9151 - protein, 226 aa, Paeonia suffruticosa
SQVTFSKRRGGLLKKAHEISVLCDAEVALIVFSTKGKLFEYSTDSSMEKILDRYEQYSIAERQLVEEPGSQGNWSLEYSKLRAKIELLQRNQRRFMGEDLDSLSPKDLQNMEQQLDVSLKNIRSRKNQLMYESISELQKKERAIQEQNNLLAKQIKEKEKTMAQQAQWEQQIHHGPNASAYLLSPHELTTLNMGGNYQGEPTEMRRNELDLTLEPIYTCHLGCFGA

SEQ ID NO: 9152 - protein, 359 aa, Zea mays
MAGPAPDRAALTVGPGMDMPIMHDSDRYELVRDIGSGNFGVARLMRDRRTSELVAVKYIERGEKIDENVQREIINHRSLKHPNIIRFKEVILTPTHLAIVMEYASGGELFERICKNVRFSEDEARYFFQQLISGQVCHRDLKLENTLLDGSDAPRLKVCDFGYSKSSVLHSQPKSTVGTPAYIAPEVLLKKEYDGKIADVWSCGVTLYVMVVGAYPFEDPEEPKNFRKTIQRILNVQYAIPDNVNISPECRHLISRIFVGDPATRITIPEIRNHSWFLKNLPADLMDDDSMSNQYEEPDQPMQTMDQIMQILTEATIPPACSRSINVLADGLDMDDDMDDLDSDSDLDVDSSGEIVYAM

SEQ ID NO: 9153 - protein, 406 aa, Oryza sativa
KEREMAATASLKSSLLLPSPISDFSSAALSISTQARRRSWQPRGARMQVAAAADSKNILVMGGTRFIGVFLSRLLVKEGHQVTLFTRGKAPITQQLPGESDAEYAEFSSKVLHLKGDRQDFDFVKTSLAAKGFDVVYDINGREAVEVAPILDALPNLEQYIYCSSAGVYLKSDLLPHFETDAVDPKSRHKGKLETESLLETRDVNWTSIRPVYIYGPLNYNPVEEWFFHRLKAGRPIPVPGAGNQITQLGHVKDLATAFVLALGNPKASKQVFNISGAKYVTFDGLARACAKAGGFPEPEIVHYNPKDFDFGKKKAFPFRDQHFFASIEKATLELGWKPEYDLVEGLTDSYNLDFGRGTFRKAADFTTDDMILGKKLVSRLTGRAAMAGGQEQAETVSVLLSTLVW

SEQ ID NO: 9154 - protein, 153 aa, Saccharomyces cerevisiae
VQAVAVLKGDAGVSGVVKFEQASESEPTTVSYEIAGNSPNAERGFHICEFGDATNGCVSAGPHFNPFKKTHGAPTDEVRHVGDMGNVKTDENGVAKGSFKDSLIKLIGPTSVVGRSVVIHAGQDDLGKGDTEESLKTGNAGPRPACGVIGLTN

SEQ ID NO: 9155 - protein, 318 aa, Arachis hypogaea
VMHRDLKPESFLFANKKENSPLKAIDFGLSVFFKPGEKFSEIVGSPYYMAPEVLKRNYGPEIDIWSAGVILYILLCGVPPFWAESEQGGAQAILRGLIDFKREPWPSISESAKSLVKQMLEPDPKLRLTAKQVLEHPWIQMLRRAPNIPLGDAVKSRLKQFSMMNRFQKKALRVIADFLSNEEVEDIKDIFQKMDTDNDGIVSIEELKAEFQNFGSQLAESEIQMLLEAVNTNGKGTLDYGEFVAVSLHLKRMANDEHLRKAFSYFDKDGNGYIEPDELRNALMEDGTDDCADVANDIFQEVDTDKDGRISYEEFVAM

SEQ ID NO: 9156 - protein, 360 aa, Azotobacter vinelandii
MTTSPGSTMRAAVWHGRHDIRVENVPLPANPPPGWVQIRVDWCGICGSDLHEYVAGPVFIPVEKPHPLTGIQGQCILGHEFSGEIVKLGTGVSGFAPGERIAADACQHCGTCYYCRSGLYNLCEKLAFTGLMNNGAFAELVNVPAELLYKLPADFPVEAGALIEPLAVGMHAVKKAGNLLGRNVVVVGAGTIGLCTIMCAKAAGAAQVIALEMSSARKAKALEVGASLVLDPKECDALAEIRARTNGLGADVSFECIGNKHTAKLAIDVIRNAGKSVLVGIFEEPSSFNFFELVSTEKQVIGALAYNGEFADVIAFIADGRLDVEPLITGRIGLEEIVGRGFEELVNNKEHNVKIIVSPH

SEQ ID NO: 9157 - protein, 171 aa, Triticum aestivum
MADVEYRCFVGGLAWATDDQSLQNAFSKYGDVIDSKIITDRETGRSRGFGFVTFASDEAMRQAIEAMNGQDLDGRNITVNEAQSRRSGGGGGGFSGGGGGGYGGQRREGGGGGGGYGGGRSGGGGGYGSREGGGGYGGGGGGYGGSRGGSGGGGGGYGGSRGGSGGGNWRE

SEQ ID NO: 9158 - protein, 751 aa, Geobacillus stearothermophilus
MENQNRQNAAQCPFHGSVTNQSSNRTTNKDWWPNQLNLSILHQHDRKTNPHDEEFNYAEEFQKLDYWALKEDLRKLMTESQDWWPADYGHYGPLFIRMAWHSAGTYRIGDGRGGASTGTQRFAPLNSWPDNANLDKARRLLWPIKKKYGNKISWADLFILAGNVAIESMGGKTIGFGGGRVDVWHPEEDVYWGSEKEWLASERYSGDRELENPLAAVQMGLIYVNPEGPDGKPDPKAAARDIRETFRRMGMNDEETVALIAGGHTFGKAHGAGPATHVGPEPEAAPIEAQGLGWISSYGKGKGSDTITSGIEGAWTPTPTQWDTSYFDMLFGYDWWLTKSPAGAWQWMAVDPDEKDLAPDAEDPSKKVPTMMMTTDLALRFDPEYEKIARRFHQNPEEFAEAFARAWFKLTHRDMGPKTRYLGPEVPKEDFIWQDPIPEVDYELTEAEIEEIKAKILNSGLTVSELVKTAWASASTFRNSDKRGGANGARIRLAPQKDWEVNEPERLAKVLSVYEDIQRELPKKVSIADLIVLGGSAAVEKAARDAGFDVKVPFFPGRGDATQEQTDVESFAVLEPFADGFRNYQKQEYSVPPEELLVDKAQLLGLTAPEMTVLVGGLRVLGANYRDLPHGVFTDRIGVLTNDFFVNLLDMNYEWVPTDSGIYEIRDRKTGEVRWTATRVDLIFGSNSILRSYAEFYAQDDNQEKFVRDFINAWVKVMNADRFDLVKKARESVTALQCCHTPRSDMIGGLQ

SEQ ID NO: 9159 - protein, 900 aa, Zea mays
IRHEGYDRVMAYKFHEDEHGEVFAEITKPGIEPYIGLHYPATDIPQAARFLFMKNKVRMICDCRARSVKIIEDEALSIDISLCGSTLRAPHSCHLKYMENMNSIASLVMAVVVNENEEDDEPEPEQPPQQQKKKRLWGLIVCHHESPRYVPFPLRYACEFLAQVFAVHVNKEFELEKQIREKSILRMQTMLSDMLFKESSPLSIVSGSPNIMDLVKCDGAALLYGDKVWRLQTAPTESQIRDIAFWLSEVHGDSTGLSTDSLQDAGYPGAASLGDMICGMAVAKITSKDILFWFRSHTAAEIKWGGAKHDPSDEDDSRRMHPRLSFKAFLEVVKMKSLPWSDYEMDAIHSLQLILRGTLNDALKPAQSSGLDNQIGDLKLDGLAELQAVTSEMVRLMETATVPILAVDGNGLVNGWNQKVADLSGLRVDEAIGRHILTLVEDSSVPIVQRMLYLALQGREEKEVRFELKTHGSKRDDGPVILVVNACASRDMHDHVVGVCFVAQDMTVHKLVMDKFTRVEGDYRAIIHNPNPLIPPIFGADQFGWCSEWNAAMTKLTGWHRDEVIDRMLLGEVFDSSNASCLLKSKDAFVRLCIIINSALAGEEAEKAPIGFFDRDGKYIECLLSVNRKVNADGVVTGVFCFIHVPSDDLQHALHVQQASEQTALRRLKAFSYMRHAIDKPLSGMLYSRETLKGTGLDEEQMRQVRVADNCHRQLNKILADLDQDNITDKSSCLDLDMAEFVLQDVVVSAVSQVLIGCQGKGIRVACNLPERSMKQKVYGDGIRLQQILSDFLFVSVKFSPAGGSVDISSKLTKNSIGENLHLIDFELRIKHQGAGVPAEILSQMYGEDNREQSEEGLSLLVSRNLLRLMNGDIRHLREAGMSTFILTAELAAAPSAAGH

SEQ ID NO: 9160 - protein, 338 aa, Mesorhizobium loti
MKAVICRSPGELVLEDRPAPGAPPAGWALVAVSHVGICGTDYHIFEGKHPFLAYPRIMGHEVSGTVIETGEGPDLAIGEPVVINPYLSCGKCIACRHGKPNCCVKIEVLGVHRDGAMCERILVPAQNLYPANGLSLADAAAVEFLAIGAHAVRRARADSGARALVIGAGPIGLGNAIFARIAGLDVTLLDMSSERLAFAENELGFSILDGSRGAVPDLVKDATSGEGFDVVFDATGNTRSVQSAFAHVAHGGTLVLVSVVKDDIVFSDPEFHKREMTLVGSRNALRADFDHVAASIRNGAVPLAKLVTHRTTLADTPSDLARWAHEKSGLIKAVIEIG

SEQ ID NO: 9161 - protein, 618 aa, Neurospora crassa
MPPKKAAATQTAKENAPAAKTATKKTKTTTTVTKKTTAKVAKKDEEEPKAAPKTAATKKTAAPKAAAKKAPAPKKTAAPKAAAKKAPAPKKAAAPKKTAAAKKAAAAAKDDSDKENSVAGAKRKREEDEEEEEQEELADEKQVNGTRPMVKRAKTDEDEAAKPAPKKAKAAPKPKPEPKKKPLGKVINEAPTKVMDIFVFGEGTSGELGLGSLKYDGKKPIDVKRPRINHNLSGIVQVACGGMHVAALTKDNKILTWGVNDQGALGRDTTWDGGLRDADAESDSEDEDDTGLNPKESTPGEIDTTDVPEGTVWVQVVASDSATFALTATGQVYGWGTFRSNEGILGFTRNVLIQKTPALITQLSKIKQLAVGSNHVLALDEKNKVFAWGAGQQAQLARRLLERDENGALFPASIGTLPGRAKAAKLACGSYHCFIIDTKGRVIGWGLNNYAELGIEAEAGTDGGFILKPQLVDSLKEHNIVDIAGGEHHSLATNDKGELLTWGRIDGHQVGHPSGSFTEENTIFDEKDKPRILVQPAVVPDIEGKIVHVAAGTDHSFAITEDGKVYSWGFSANYQTGQGTTDDIETPTLIDNSAIRDRKIIFAGAGGQYSILGAEPKE

SEQ ID NO: 9162 - protein, 208 aa, Zea mays
MVSLKPQKRLAAGVLKCGKGKVWLDPNEVYEISMANSRQNIRKLVKDGFIIKKPQKIHSRSRARRAHEAKQKGRHSGYGKRRGTREARLPTKILWMRRMRVLRRLLRKYREAKKIDKHMYHDMYMKVKGNMFKNKRVLMESIHKSKAEKAREKTLSDQFEAKRAKSKASRERKIARREERLAQGPREPAAAPVSATAPAAAAPKKAKK

SEQ ID NO: 9163 - protein, 252 aa, Brassica napus
MAYQMELGGESSPQRKAGRGKIEIKRIENTTNRQVTFCKRRNGLLKKAYELSVLCDAEVALIVFSSRGRLYEYSNNSVKGTIERYKKAISDNSNTGSVAEINAQYYQQESAKLRQQIISIQNSNRQLMGETIGSMSPKELRNLEGRLDRSVNRIRSKKNELLFAEIDYMQKREVDLHNDNQLLRAKIAENERNNPSMSLMPGGSNYEQIMPPPQTQPQPFDSRNYFQVAALQPNNHHYSSAGREDQTALQLV

SEQ ID NO: 9164 - protein, 380 aa, Glycine max; identical to SEQ ID NO: 1772

SEQ ID NO: 9165 - protein, 417 aa, Prochlorococcus marinus str. MIT 9313
MKAISVLGSTGSIGTQTLEIAEEFPERFRVVALTAGTNVSLVVEQIQRHHPEVVALADASLLPELKQQLNALPSEQQPPHLPQLLAGPEGLNVAASWDSADLVVSGIVGCAGLLPTLAAIKAGKDLALANKETLIAAAPVVLPELKRSGSRLLPADSEHSAIFQCLQGTPWAENARLSTGVPTPGLRHIQLTASGGAFRDWSAKDLEKATIADATSHPNWSMGRKITVDSATLMNKGLEVIEAHYLFGIDYNQIEIVIHPQSIIHSMIELADSSVLGQLGWPDMKLPILYCLSWPERLETPWRRLNLAEVGELTFRAPDTKKYPCMKLAYAAGRAGGTMPAVLNAANEEAVAQFLEERIHFLDIPEVIEAACERHKPDLQTQPQLDDVLAVDAWARKAVQEQVKRGTRRLPLPALTA

SEQ ID NO: 9166 - protein, 306 aa, Vibrio cholerae
MIPLIYHPIYSQLDLPVGHRYPINKYRLLYEEIVRQREQSEAWQASFEFHTPIAAELSRITRLHDPDYVQALLEGTLSAAKMRRIGFPWSKPLIERTLYSVGGTCLTVEQALQSGVAIHLSGGYHHAHADFGSGFCLFNDLAIAAHFALSLPSVDKVLIIDSDVHHGDGTATLCAERDEIITLSFHCDKNFPARKPASSMDVGYANQTGDEEFLSTFIQVVEMAVNLHRPDLILYDAGVDIHNDDELGYLSISQAAIAQRDRFMLGLAKQESIPIACVIGGGYREDHTALVPLHLELLKAALSAGY

SEQ ID NO: 9167 - protein, 735 aa, Bacillus halodurans
MDTNNTGKCPFHHGATTSPKSSGTTNNDWWPNALNLNILRQHDKKSNPMGEEFDYAEEFSKLDYDALKQDVRDLMRDSQDWWPADFGHYGPFFIRMSWHAAGTYRIGDGRGGGGTGNQRFAPLNSWPDNGNLDKARRLLWPIKQKYGNKISWADLLVLAGNVAIEDMGGPVIGFGAGREDIWHPEEDIYWGSEKEWLTGDKRYSGDRELENPLAAVEMGLIYVNPEGPDGKPDPIKAAHDIRETFGRMGMNDEETVALIAGGHTFGKAHGAGNPDHVGPEPEAAPIEAQGLGWQNTYGSGKGRDTITSGLEGAWTANPTQWDNGFFDLLFGYEWWLTKSPAGAYQWQAVDPDEKDLAPDAEDPSVKVPTVMLTTDLALRHDPEYEKISRRFHKNPDEFADAFARAWFKLLHRDMGPKARYLGPEVPAEDFIWQDPVPTVDYELTDAEVEELKAKILDSGLTVSELVTTAWASASTFRNSDKRGGANGARIRLAPQKDWEVNQPEQLEKVLSVLENIQSQLDKKVSIADLIVLGGSAAVEKAAKEAGFDVTVPFAPGRGDATQEQTDVEGFAVLEPVSDGFRNYQKKEYSVSPEELLIDKAQLLDLTAPEMTALIGGMRALGANYGGTQHGVFTDCVGTLTNDFFVNLLDMGIEWKPVDYNLYEGRDRKTGEVVRTATRVDLVFGSNSILRAIAEVYAQDDNKGKFVEDFIAAWVKVMNADRFDLKLNKKAQLTSK

SEQ ID NO: 9168 - protein, 557 aa, Thermoplasma acidophilum
MIEQDTFVKSTASDKRFRKELTTIDLLFLSLGGIIGSGWLFAAAGASMLAGPAAVLSWIIGGLIVLVIALVYAELGGMIPRSGAIVRYGQYSHGGLAGFLFGWAYFLSAVSVPAIEAEGVITYAGTYVKGLVTPTGVLTAVGILLAAILMLGFFFLNYFGIKVMGKTNTGMTWWKLIIPSATVALLLTVHFNIGNFFLKTGFVTYGWSSVFEAISVSGIVFSYLGFRQALDYGGEAKNPQRSVPIATILSVVIGIALYALLQVVFIGQVNWAAVGVAPGQWSALSGGVVTAPFATLASSAGLVFLSYFLFADAYVSPSGTLNVYLGTSQRTLYGLATLGYLGKSMSDVNRKHRVPILPLIASLVIGYIFFAPFPSWYKLVGFISSSTVFTYIVGGSALQVFRREASELKRPFRLKGASILSPIAFVGATLIVYWSGWPLVAYLVIAILIGLIVYAAFYLAGKSAINIFSGKHFKGGAWLLAYMGAITLLSYFGEKAYGGTGLIPFPWDFLVMILVAIGFYFWSVYSGFKTDEITEIIESGMQYLPSEEAAQAPAGKK

SEQ ID NO: 9169 - protein, 687 aa, Oryza sativa (japonica cultivar-group); identical to SEQ ID NO: 529

SEQ ID NO: 9170 - protein, 262 aa, Triticum aestivum
  unsure (1)..(262): unsure at all Xaa locations
VRPRVRINPDSAKGYKTRGMANAMLGKWEEAARDLHAASNIDYDDEINAALKKVEPNAHKIVERPRKYDRLRKERAEKKAERDRLRRRAEAQAAYEKAKRKEQSSSRSSGGMPGGMPGGFPFPGGMGGMPGGFPGGMPGGFPGGMGGMPGGMGGGFPGGMGGRLPAXGMGGGMPAGMGGGMPGMGGGRGMGGGMPGAGGAPGNVDMGDILNDPDLMAAFGDPEVMAALQDVMSNPANLAKHQANPKVGPIIAKMMAKMNGNR

SEQ ID NO: 9171 - protein, 507 aa, Musa acuminata
MALPPLLLSPLPSLLVVLALLSSLLLAGRKARGGSATWKLPPGPPKLPVIGHLHLLGSSLLHRSLWELSKKHGPLMHLKFGRVPVVVVSSPEMAKEVLKTHDLECCSRPSLLSFSKFSYGLSDVAFIPYGERWRQLRKLCTVELLSTRKINSFRDIRKEEMERVTKLICSHVRASSMVNLSELLLSLSCNMTCRSAFGSGFDDGGDIQLHDMLREAQEELSGLFLSDYLPLLGWVDRLSGMRSRLERAFLKLDSIYQRRIDYHQDRLRQQGKEDGDVLDALLRMQKDEEGLTEDHIKGVLMDIFIAGTDTSSATVEWAMAELIRQPELMKRAQDEVRRCVGSKGEVEESDLHQLHFFKCVIKETMRLHPPAPLLLPRETMQHFKLNGYDILPKTWMYVNAWAIGRDPNSWGRPHVFDPERFMHDSTEASGQDFKLIPFGEGRRICPGKNLGMLMVELVLANLLYSFDWHLPPGMVKEDISMEEAPGVTVHREYALCLMATKYDATTA

SEQ ID NO: 9172 - protein, 306 aa, Glycine max; identical to SEQ ID NO: 5439

SEQ ID NO: 9173 - protein, 545 aa, Pseudomonas syringae pv. syringae B728a
MVGLIQSAPGSRLQRLEPLLMADPVQHVRFERVAVRKIGVIEVAGLILLHADCLHHLLRRLIVDRRERHDLLQLQALETTAQRGPGRLAGKAQAPVFVRQPPADFHGWGERCLETHDMQPGETYELAGVLALQRPEPEAQFGKMTTQPPDHGSTFETAQGVWKIAHDTRVRAHVGERRQVIVTPLPHQQSGAIKLEYRFHRFPRVTRHEWASVQPSAAPHNWAYGCFTGTIGLPPSNGRKMSLPLIYHEDYSPDFPADHRFPMDKFRLLRDYLIDSGLTSDVQLMRPELCPADILALAHDPSYISRYLSGDLSREDQRRLGLPWSEALARRTIRAVGGSLLTAEQALKHGLACHLAGGTHHAHYDYPAGFCIFNDLAVISQYLLQSGRVDKVLIFDCDVHQGDGTARILADTEDAITVSLHCEKNFPARKAQSDWDIPLPMGMGDADYLNVVDDLLNYLLPLYKPDLVLYDAGVDVHKDDALGYLQLTDQGLANRDEAVLRHCLSRDIPVMGVIGGGYSKDRLALARRHGILHHSAQRVWNDMGL

SEQ ID NO: 9174 - protein, 1118 aa, Adiantum capillus-veneris
MSSTRHSYSSGGSGKSKHGRRIAQTSADAKLYAAYEESSESGSFDYSQSVSAGKEGISSQLVTAYLQRMQRGGLVQQFGCLIAVEEETFRVLAYGANAPEMLDVATQAVPTMGQYSRLCIGADVRTLLSPASASALDRVIGVVDVSMFNPITVQSRSSGKPFYAILHRNDVGLVIDLEPIRPDDASITGGALQSHKLAAKAIARLQSLPGGDIGLLCDSVVEEVHELTGFDRVMAYKFHEDEHGEVVAEIRRTDLEPYIGLHYPATDIPQAARFLFMKNRVRMICDCRLPPVKLIQDKTLSQPMSLTGSKLRAPHGCHTQYMANMNSISSLVMAVIVNDSDDDSPGHSSQGIKLWGLVVCHHTSPRYVPFPVRSACEFLMQVFSLQLNMEVGMAAQVREKHILRTQTLLCDMLLRDAPIGIVSQSPNIMDLVTCDGAALYYGKKCWLLGTTPTEAQIVDIAAWLLDCHKDSTGLSTDSLAKTGYPEASCLGDAVCGLAAAKITATDFLFWFRSHTAKEVRWGGARHDPEERDDGRRMHPRSSFKAFLEVVKQQSLPWEDVEMDAIHSLQLILRGSFQDIDDSNTKTMIHARLNDLKLQGLDELSTVASEMVRLIETATAPILAVDGQGLINGWNGKVAELTGLSFETAMGKSLAKELVHEESKTIVERVLHLALEGEEEQDIEIHLRTYDQHKQKGVVILIVNTCCSRDVSNNVVGVCFVGQDVTGQKLVLDRFIRIQGDYKAIVQSLNPLIPPIFGADEYGFCSEWNAAMEKLSNWRREEVLGKMLVGEIFGLQMVCCRLQGQDVVTKLMIVLNDAVNGQESEKFPLVFYDRNGRRVEALLIASKRTDADGRITGVFCFLHTASPELLQALIIKRAKEKVDKELSYVKEELKKPLEGLAFTRTVLEGTNLTIEQRQLIKTNAWCERQLRKILEDDLNNIEEGYMDLEMSEFFMGSVIDAVISQGMAASRGKGVQILTEIPNDVKLMCLFGDQARLQQVLADLLFCAINHATTTNEDEKDWVTIKVSRTKTRLDDGVHLMHFEFRISHSGQGISEALVEEMTNKSQKWTPEGLAISISCTLIRLMNGDVKYTTDAGNKCFLVTIQFPLAHRDDATSVR

SEQ ID NO: 9175 - protein, 230 aa, Zea mays
  unsure (1)..(230): unsure at all Xaa locations
MKKIFGAKKNKDPPPTIQDATDRITKRGDTVDEKIKKLDAELARYKEQIKKTRPGPAQEAVKARAMRVLKQRRMYEGQRDMLYNQTYNLDQVAFAAEGLKDAQQTMTAMKAANKELKGMMKTVKLEDIDSMQDEMMDLMDVSNEIQETLGRSYNVPXDDIDEEQLMAELXDALGADMDLPSESGPSYLQPDQESELNLPAAPTGHAAVPANQQQEDELGLPTVPQASIRT

SEQ ID NO: 9176 - protein, 269 aa, Zea mays
  unsure (1)..(269): unsure at all Xaa locations
MGRGKIEIKRIENTTSRQVTFCKRRNGLLKKAYELSILCDAEIALIVFSTRGRLYEYSSNSVRSTIERYKKASASTSGTAPVTDVNSLQYFQQEAAKLRQQIQTLQNSNRHLMGESTGNMTAKELKGLESRLERGIGRIRSKKHELXLLAEIEYMQKREADLHNENMFLRAKVAEAERALEQEAAEDQTMMVPAAVRGATTELKALPASFDASGYYQYQQHQHVVAAASAASSSQYAEQPQGQQEYHHQTALHLGYHVKIDSAADKGFL

SEQ ID NO: 9177 - protein, 553 aa, Oryza sativa
GRRREKSISLKEHRLLALQSIGVSDSHLVVLSLHSAPHNLLLPPLLCLYTTPSLPHSPASASRPDVESSINSVRVAMALKVVSFPGDLAAVSFLDSNRGGAFNQLKGWIFLDLPFQTRDRRAVSLRRTCCSMQQAPPPAWPGRAVVEPGRRSWDGPKPISIVGSTGSIGTQTLDIVAENPDKFRVVALAAGSNVTLLADQVKTFKPKLVAVRNESLVDELKEALADCDWKPEIIPGEQGVIEVARHPDAVTVVTGIVGCAGLKPTVAAIEAGKDIALANKETLIAGGPFVLPLAQKHKVKILPADSEHSAIFQCIQGLPEGALRRIILTASGGAFRDWPVDKLKEVKVADALKHPNWNMGKKITVDSATLFNKGLEVIEAHYLFGAEYDDIEIVIHPQSIIHSMIETQDSSVLAQLGWPDMRIPILYTMSWPDRIYCSEVTWPRLDLCKLGSLTFKAPDNVKYPSMDLAYAAGRAGGTMTGVLSAANEKAVELFIDEKIGYLDIFKVVELTCDAHRNELVTRPSLEEIIHYDLWAREYAASLQPSTGLSPVPV

SEQ ID NO: 9178 - protein, 222 aa, Zea mays
MAAAAEVVLLDFWVSPFGQRCRIALAEKGVAYEYREQDLLDKGELLLRSNPIHKKIPVLLHAGRPVCESLVILQYIDEAWPDVAPLLPKDDPYARAQARFWADYIDKKIYDSQTRLWKFEGEAREQAKKDLVEVLETLEGELADKPFFGGGALGFVDVALVPFTSWFLAYEKLGGFSVQEHCPRIVAWAARCRERESVAKAMSDPAKVLEFVQFLQSKFGAK

SEQ ID NO: 9179 - protein, 152 aa, Zea mays
MVKAVAVLGSSEGVKGTIFFTQEGDGPTTVTGSVSGLKPGLHGFHVHALGDTTNGCMSTGPHYNPASKEHGAPEDENRHAGDLGNVTAGADGVANINVTDSQIPLTGPNSIIGRAVVVHADPDDLGKGGHELSKSPGNAGGRVACGIIGLQG

SEQ ID NO: 9180 - protein, 324 aa, Escherichia coli CFT073
MQYNPLGKTDLRVSRLCLGCMTFGEPDRGNHAWTLPEESSRPIIKRALEGGINFFDTANSYSDGSSEEIVGRALRDFARREDVVVATKVFHRVGDLPEGLSRAQILRSIDDSLRRLGMDYVDILQIHRWDYNTPIEETLEALNDVVKAGKARYIGASSMHASQFAQALELQKQHGWAQFVSMQDHYNLIYREEEREMLPLCYQEGVAVIPWSPLARGRLTRPWGETTARLVSDEVGKNLYQESNENDAQIAERLTGVSEELGATRAQVALAWLLSKPGIAAPIIGTSREEQLDELLNAVDITLKPEQIAELETPYKPHPVVGFK

SEQ ID NO: 9181 - protein, 581 aa, Zea mays subsp. mays
MKREYQDAGGSGGDMGSSKDKMMAAAAVAGEQEEEDVDELLAALGYKVRSSDMADVAQKLEQLEMAMGMGGVGGAGATADDGFVSHLATDTVHYNPSDLSSWVESMLSELNAPPAPLPPATPAPRLASTSSTVTSGAAAGAGYFDLPPAVDSSSSTYALKPIPSPVAAPSADPSTDSAREPKRMRTGGGSTSSSSSSSSSMDGGRTRSSVVEAAPPATQASAAANGPAVPVVVVDTQEAGIRLVHALLACAEAVQQENFSAAEALVKQIPMLASSQGGAMRKVAAYFGEALARRVYRFRPPPDSSLLDAAFADLLHAHFYESCPYLKFAHFTANQAILEAFAGCRRVHVVDFGIKQGMQWPALLQALALRPGGPPSFRLTGVGPPQPDETDALQQVGWKLAQFAHTIRVDFQYRGLVAATLADLEPFMLQPEGDDTDDEPEVIAVNSVFELHRLLAQPGALEKVLGTVRAVRPRIVTVVKQEANHNSGTFLDRFTESLHYYSTMFDSLEGAGAGSGQSTDASPAAAGGTDQVMSEVYLGRQICNVVACEGAERTERHETLGQWRSRLGGSGFAPVHLGSNA

SEQ ID NO: 9182 - protein, 335 aa, Zea mays
MAPGSKAERKAALDAGAWMFNVVTSVGIIMVNKALMATHGFSFATTLTGLHFAMTTLMTLVMKWLGYIQPSYLPLPELVKFAFFANLSIVGMNVSLMWNSVGFYQIAKLCIIPVLCILEIIFDKVRYSRDTKLSIVLVFIGVAVCTVTDVSVNSQGLLAAVIAVWSTALQQHYVHHLQWKYSLGSFNLLGHTAPAQAASLLIVGPFVDFWLTNKRVDAFNYTSIVTFFIVLSCIIAVGTNLSQFICIGRFTAVSFQVLGHMKTVLVLTLGFLFFGKEGLNFHVALGMLLAVIGMIWYGNASSKSGGKERQVYPTPSEKTQKHGALSSQSELDQKV

SEQ ID NO: 9183 - protein, 533 aa, Thermoplasma volcanium
MNGATKNVSFENSITNSNLIENEERKFRRKLGLLDLFMIGITGVIGSGWLFSPLYAANAAGPASIASWVLGGALVLMVGLVFSQLMRFKSEAGGITRYPYYTNGALAGTITGWTLWLAYSMNPPSESSGLVQYMSSYVPGLYINGALTPVGLAIAISFMGLFVLVNYFGVVIFSKIINAITALKLVVPTITMVTLFLVSFKLRNFSAYGVAPYGPFSVVSAIVTSGIVYSYLGFQAVINLAGESRNPKRDGPLSLILVIIFSVVFYVVLQIAFIGSVPASDISKGWAFLSLPSPFADIAVSFNMFWLYTLIIADSIYSPSGSSMAAVASNSRNLYALSKNGTLPSFFLRVDNNTGIPRRALLFNFVISLIVLVTLKSWHQIIETLGILLLISFIGSAVSSGVIGSIKRYSSIKMPFIVIVSAIVFVFSGLIISISSFSKVLVVSLLLVPSLLLFAVSSGRGNRVIADVKAGLWFIIYVMEIAILSFIYNEHYVSGYIFLGAYLLSSTITFILARRSGVKFMHQAGEYDIAEIP

SEQ ID NO: 9184 - protein, 463 aa, Glycine max
MKYKNIFEHPFRRLSFFDIDDYSLDDFCGLVMAAGKSGSSRMLEPLKHPSKKSRRDRSLGKSSGRSSRDEAMEQQIWKKLPEDLFEPVIARLPIATFFCFRSVCQRWNSLLTSQSFSQHCAQVPQANPWFYTVTHEHANSGAMYDPSMKKWYHPTISTLPAELIVLPVASAGGLVCFLDIYRQNFYVCNPLTQSLKELPARSVRVGSRASVGMTVNGNSTSAGYKILLVGCDGEYEIYDSVTKSWSHPENMPADIKLPLSLNFRSQAVSIDSTLYFMHSDPEGIVLYDMATGVWTQYIIPAPLHLTDHMLAECDGRILLVGLLTKNAATCICIWELQKMTFLWKEVDRMPNVWCLDFYGKHVRMTCLGNKGLLMLSLRSRQMNRLVTYNIASREWVKVPACLVPHGRKRQWVAHGFLQRHTGKKLGFQFRWLPPTTRCSTLQVKVIRILRLMIVVSVFRQWER

SEQ ID NO: 9185 - protein, 141 aa, Solanum tuberosum
MKGAKSKAKADTKLGVRKKATESKKAKNAAKDPNKPKRPPSAFFVFMEEFRKTYKEKHPNNKSVAVVGKAGGDKWKQLSDEEKAPYQAKAEKRKAEYQKNMDAYNKKLAAGDADDEESDKSKSEVHDDDEDDDGSEQEDDD

SEQ ID NO: 9186 - protein, 171 aa, Glycine max
  unsure (1)..(171): unsure at all Xaa locations
LDLPLCQGPLLKKVLDSSKDLVNNPNYYCSSTGFSLKALNSTLCALVPLLLRPEGFNPYRWNPITSWGLTLNTWARILRSPGKNNFLPYKAVTGANPLLSWFKGLPHIRIPDLRINLMAFTGNHLGIPKENFMPLVXMPSSLFVRTRRCLIVFVALVVISLPREVLRCSPT

SEQ ID NO: 9187 - protein, 136 aa, Sonchus oleraceus
YFLVLDDIMDESHTRRGQPCWFRLPIVGMIAANDGIILRNHIPRILKKHFRGKPYYIDLVDLFNEVEFQTASGQMIDLITTLVGEKDLSKYSLSIHKRIVQYKTAYYSFYLPVACALLMFGEDLEKHVEVKDVLVE

SEQ ID NO: 9188 - protein, 260 aa, Magnetospirillum magnetotacticum
MLNGKRALVTGSTSGIGLGIARALAAKGASVMLNGFGDAAEIEALRAGLAKEFGVTVLYNGADLSKSDGAGDLVRDAEARLGGVDILVNNAGIQHVSKVEDFPLERWDAVIAINLTSVFQAIRAAMPGMKARGWGRIINVASAHGLVASVDKSAYVASKHGVLGLTKVVGLETAELDITCNAICPGWVLTPLVQKQIDARAAAQGVSVEQAGRDLLSEKQPSKKFTTPEQLGDLAVFLCSGAAANMTGTSLTMDGGWTAQ

SEQ ID NO: 9189 - protein, 471 aa, Cucumis sativus
MEDDYSIFPPDSDLDFSFTSTTTDRTFTTSSSARTSLARSSLTLSFNESRLSAAAAALNLRPYHRSDSHWSAIRAATTLSSDGHLHLRHLKLIRHLGTGNLGRVFLCHLRDNDHASFALKVVDKEALSNKKLLQVQTEAEILASLDHPFLPTLYARLDVSHYTCLLIDYCPAGDLHSLLRKQPGSRFSVAAARFFAAEVLVALEYLHALGIVYRDLKPENVLLREDGHVMLSDFDLCFKSDVVPTFHTWTRPGPQATGSCFGWRTSPEFEEEIVGEFVAEPTSAFSKSCVGTHEYLAPELVTGGGHGNGVDWWAFGVFVYELLHGTTPFKGVNKEGTLRNIASSEGVKFRGGGEEEGGMGEARDLIERLLVKDPGRRLGWEKGATEIKRHPFFEGIKWPLIRTYRVPEVYGMMRKGRAQVSHVREVTERIRRRGWWNWRKVMRKRLIKNGSCSKSHSNTNYYSYSSKKKTG

SEQ ID NO: 9190 - protein, 267 aa, Glycine max
  unsure (1)..(267): unsure at all Xaa locations
KRLTSSSNQLAQICACDCFRHRWTGRYEAHLWDKNCWNESQSKKGRQACIYNKNLHYLFPLNWXGWDTILXFPLSNYEEKLKEMEGQSKEEYIGSLRRKSSGFSRGVSKYRGVARHHHNGRWEARIGXGVFCDKYLYLGTYATQEEAAAAYDMAAIEYRGLNAVTNFDLSRYINWPRPKTEENHQTIPSNENVNSNAELELGSASDEITEEGVAPSSESNPSRRTFPEDIQTIFENQDSGIYTENDDIIFGDLGSFGAPIFHYELDV

SEQ ID NO: 9191 - protein, 174 aa, Ferroplasma acidarmanus
MIYEFEGQVPEISRKAYVFENATVIGNVHIGDYVWIGPGAVLRGDYGEISIGAYSAIEDNCVIHARPGEKTTIGEHVTIGHLSVIHTGTIDDYAVIGMNSTVSDFATVGKWAAIGEGAVVKSKSKIPDRSIAVGVPAKVVGEVSEDYIKTWEKYKENYNSFCKRYLENLKVVKK

SEQ ID NO: 9192 - protein, 263 aa, Zea mays
RLEPSPPLLSCQVAVVSLLRRSLPPLPSRRLAMDYVDVVYCHRPDASTPVEETVRAMNWVIDQGWAFYWGTSEWSAQQITEAWAVANRLDLVGPIVEQPEYNLFSRHKVESEFLPLYSTYGIGLTTWSPLASGVLSGKYGKGDIPADSRFALDNYKNLANRSLVDDTLRKVNGLKPIAAELGVSLAQLSIAWCASNPNVSSVITGATKESQVHFPNSGVLLRISTSIVENMKALDVIPLLTPEVVDRIEAVVQSKPKRTESYR

SEQ ID NO: 9193 - protein, 234 aa, Thermoplasma volcanium
MVLLTILILGILFVASLKLNVLDLRGSTIALFIGAFISFIGSIYWLILMLIFVASSFIATKAFFKTKKLMKVQEGQNGERKASNVTYAAVTGIIITFIYALYPHMQNYFFELFAISFAVINSDTFASEIGVIDKKVYMITNFKKVNPGVNGGVSLTGELAALLGGFIIAISYSLFAYRSVQAYPVALVTLAGFAGCQIDSVLGSLFENRGKLNKGQVNFLASFLTVAASAALIV

SEQ ID NO: 9194 - protein, 425 aa, Helicobacter pylori 26695
MAYNPKILQKPKEGEEITIKDNKLHVPNHPIIPFIEGDGIGSDITPAMIKVVDSAVQKAYKGEKKIAWYEVFVGEKCYQKFKDYKELSPEEQWLLPDTIEAINHYKVSIKGPLTTPIGEGFRSLNVALRQKMDLYVCLRPVRWYGSPSPVKEPQKVDMVIFRENSEDIYAGIEWQEGSAEAKKLIHFLQNELKVKKIRFPESSGIGVKPISKEGTERLVRKAIEYAIDNDKPSVTFVHKGNIMKYTEGAFMKWGYALAQKEFNAQVIDKGPWCSLKNPKNGKEIIIKDMIADAFLQQILLRPSEYSVIATMNLNGDYISDALAAMVGGIGIAPGANLNDTVGMFEATHGTAPKYAGLDKVNPGSIILSAEMMLRHMGWVEAADLIVSAMEKAIKSKKVTYDFARLMDGAKEVKCSEFASVMIENM

SEQ ID NO: 9195 - protein, 214 aa, Paeonia delavayi
IVESVGEGVTDVKPRDHVLPIFTGECKECRHCKSEESNMCDLLRINTDRGVMLNDSKSRFSINGQPIFHFVGTSTFSEYTVLHVGCLAKINPEAPLDKVCVLSCGISTGLGATLNVAKPNKGSTVAIFGLGAVGLAAAEGARIAGASRIIGVDLNPKRFDEARKFGVTEFVNPKDYNKPVQEVIAEMTGGGVDRSVECTGSIMAMMSAFECVHD

SEQ ID NO: 9196 - protein, 98 aa, Glycine max
MKKEDTVKLISAEGFEFVVDKEAAMVSQTIHNMLTSPGSFAERQHGEVTFPEISTTILEKICQYFYWHLQFASGKETEFPIEPELTLELMMAANYLHT

SEQ ID NO: 9197 - protein, 334 aa, Pseudomonas aeruginosa PAO1
MTSQINRQYQLAQRPSGLPGRDTFSFVETPLGEPAEGQILVKNEYLSLDPAMRGWMNDARSYIPPVGIGEVMRALGVGKVLVSKHPGFQAGDYVNGALGVQDYFIGEPKGFYKVDPSRAPLPRYLSALGMTGMTAYFALLDVGQPKNGETVVISGAAGAVGSVAGQIARLKGCRVVGIAGGAEKCRFLVEELGFDGAIDYKNEDLAAGLKRECPKGIDVFFDNVGGEILDTVLTRIAFKARIVLCGAISQYNNKEAVRGPANYLSLLVNRARMEGMVVMDYAQRFPEGLKEMATWLAEGKLQSREDIVEGLETFPETLLKLFSGENFGKLVLKV

SEQ ID NO: 9198 - protein, 362 aa, Vigna radiata
MAMKKLLWVVLSLSLVLGVANSFDFHEKDLASEESLWDLYERWRSHHTVSRSLTEKHKRFNVFKENVMHVHNTNKMDKPYKLKLNKFADMTNHEFRSTYAGSKVNHHKMFRGTQHGNGTFMYEKVGSVPASVDWRKKGAVTDVKDQGQCGSCWAFSTVVAVEGINQIKTDKLVSLSEQELVDCDKEENQGCNGGLMESAFEFIKQKGGITTESNYPYTAQEGTCDASKVNDLAVSIDGHENVPVNDENALLKAVANQPVSVAIDAGGSDFQFYSEGVLTGDCNTDLNHGVAIVGYGTTVDGTNYWIVRNSWGPEWGEQGYIRMQRNISKKEGLCGIAMMASYPIKNSSDNPTGSFSSPKDEL

SEQ ID NO: 9199 - protein, 379 aa, Glycine max
MYRVLNRAFCTATEPATTIAVSIRSISEDLYKEVKLKNVVEKFKKASDNDRFRKKTGIYEDTVRRLAGARRFRWVRDILEHQKQYSDISNEGFSARLISLYGKSGMTKHARKVFDEMPQRNCSRTVLSLNALLAAYLHSHKYDVVQELFRDLPTQLSIKPDLVTYNTIIKAFCEKGSFDSALSVLREIEEKGLSPDSITFNTLLDGLYSKGRFEEGEKVWEQMSVNNVAPGVRSYCSKLVGLAEVKKAGEAVELFREMEKVGVKPDLFCINAVIKGFVNEGNLDEAKKWFGEIAKSEYDPDKNTYSIIVPFLCEKGDFKTAIEMCKEIFNNRCRVDATLLQGVVDKLASEGMITEAKEIVEIGKTNRYCRYRLDLPAKE

SEQ ID NO: 9200 - protein, 620 aa, Gossypium hirsutum
MSTGVQHQERVPMNLKKQLALAVRNIQWSYAIFWSISTRQPGVLEWGEGYYNGDIKTRKTVQSVELNTDQLSLQRSEQLRQLYESLSAGESSPQAKRPSAALSPEDLTDTEWYYLVCMSFVFNIGQGLPGRTLSSGQPVWLCNAHCADSKVFGRSLLAKSASIQTAVCFPFSGGVVELGVTDLVFEDLSLIQRVKTLLLDDPQPIVSKRSIQVDGMNNDLACPALDPLILATKLSPILGCEQLETVSPDDSPDGLEPKQSREDSLLIEGINGGASQVQSWQFMDEEFSNCVHHSLNSSDCISQTIADHRKVVPLCRGENDNGLQDVEECNQTKLTSFDRQNDDRHFHEVLSALFKSSHPLILGPQFRNSNKESSFIRWQKNGLKPQKERDETPQKLLKKILFLVPHMHDRGLIESPETNAVRDAAWRPEADEICGNHVLSERKRREKINERLMMLKSLVPANNKADKVSILDVTIEYLQTLERRVAELESCRKSEARTKIERTSDNNGKKSSLSKRKAYDVVDEADQEIGYVASKDGSTDKVTLSMNNKELLIEFKCPWREGILLEVMDALSILNLDCHSVQSSTTEGILSLTIKSKYKGSSVAKAGPIEQALQRIASKC

SEQ ID NO: 9201 - protein, 361 aa, Agrobacterium tumefaciens str. C58 (Cereon)
MGIRSTKSIAAGQSRKFKKKDDIMQMRKLGESGLFVSELCFGAMTFGGTDGLWGKVGRLDQEDADALVKAALEAGINLFDTANVYAHGRSEEILGRSLKNLGVSRSDVVIATKVASAMGDGPNHRGASRGHIISECRASLGRLGLDHIDLYQIHAFDSATPIEETLEALDTLVRAGDVRYIGLSNWAAWQIMKAIGITRARALAPITSLQAYYTLVGRDLEREIGPLLSSERVGLMVWSPLAGGYLTGKYSAGGNAAGGRQTELDFPPIDRIRGEPLIAVLKAVAEKHGSSPAQIAIAWLLKQKVVSTVIIGAKRVEQLQENIRSASIELDDNDMAKLDEVSRLPVEYPGWLLNDGNGHSR

SEQ ID NO: 9202 - protein, 338 aa, Pasteurella multocida
MAILVTGGAGYIGSHTVVELLNANKDVVVLDNLCNSSPKSLERVAQITGKQVKFYQGDILDTALLQKIFAENQIQSVMHFAGLKAVGESVQKPAEYYMNNVTGSLVLIQEMKKAGVWNFVFSSSATVYGDPEIIPITESCKVGGTTNPYGTSKFMVEQILKDIAKATPEFSITILRYFNPVGAHESGLIGEDPNGIPNNLLPYISQVAIGKLPQLSVFGSDYETHDGTGVRDYIHVVDLAIGQLKALDRHEGDAGLHIYNLGTGSGYSVLDMVKAFEKVNDIKIPYKLVDRRPGDIATCYSDPSLAKTELNWTAARGLEQMMKDTWHWQKKNPKGYRD

SEQ ID NO: 9203 - protein, 394 aa, Nassella viridula
EPARTEIPALSIAGAVQSQKLAVRAISRLQALPGGDVKLLCDTVVEHVRELTGYDRVMVYKFHDDEHGEVLAESRRADLEPYLGLHYPATDIPQASRFLFRQNRVRMIADCHAAPVRVIQDPAMQQPLCLVGSTLRSPHGCHAQYMANMGSIASLVMAVIISSGGDDEHNMGRGTIPSAMKLWGLVVCHHTSPRCIPFPLRYACEFLMQAFGLQLNMELQLAHQLSEKHILRTQTLLCDMLLRDSPTGIVMQSPSIMDLVKCDGAALYYHGKYYPLGVTPIEAQIKDIIEWLTVCHGDSTGLSTDSLADAGYSGATALGDAVCGMAVAYITPSDYLFWFRSHTAKEIKWGGAKHHPEDKDDGQRMHPRSSFKAFLEVVKSRSLPWENAEMDAIH

SEQ ID NO: 9204 - protein, 282 aa, Glycine max
  unsure (1)..(282): unsure at all Xaa locations
APPPPQFNPSVPVTGRKKKSKIWKFYGHSAAISGKETSTRSSRLTQVGPFKGCMAWDSSIFTDCQSSANGVHYGTQNLKDINSNPLGPGKVVHHTQSVLQTSXKLFNPPPETLGAAALALHYANVIIVIEKLAASSHLIGLDARDDLYNMLPRRVRASLKAKLKPYTKTLASSSSSSIYDPSLAEEWNEAMSSILEWLAPLAHNMIRWQSERSYEQQSFISRTNVLLVQTLYFANQEKTEEVITELLVGLNYVWKYGRELNAKALAECGSFRVDNEYPNLNG

SEQ ID NO: 9205 - protein, 168 aa, Glycine max
MSTSKSVSSSSEDDNELRRGPWTLEEDNLLSQYIFNHGEGRWNLLAKRSGLKRTGKSCRLRWLNYLKPDVKRGNLTPQEQLIILELHSKWGNRWSKIAQHLPGRTDNEIKNYWRTRIQKQARHLKIYTDSREFQELVRRFWMPRLLQKSKRIIFFKHVNSKPGKSYAF

SEQ ID NO: 9206 - protein, 250 aa, Solanum tuberosum
MGKSYPTVSEEYLKAVDKCKRKLRALIAEKNCAPIMLRLAWHSAGTYDVCSKTGGPFGTMRFKAEQAHGANNGLDIALRLLEPIREQFPTLSHADFHQLAGVVAVEVTGGPDVPFHPGREDKPEPPVEGRLPDATKGCDHLRDVFVKQMGLSDKDIVALSGAHTLGRCHKERSGFEGPWTANPLIFDNSYFTELLSGEKEGLLQLPSDKALLCDPAFRLLVEKYAADEDAFFADYAKAHLTLSELGFAEA

SEQ ID NO: 9207 - protein, 370 aa, Agrobacterium tumefaciens
MTVRSVFLLPGDGIGPEAMTEVRKLIEYMNSAHNAGFTVSEGLVGGSAYDAHGVAISDADMEKALAADAILFGAVGGPKWDGVPYEHRPEAGLLRLRKDLELFANLRPAICYPALAAASSLKPELVEGLDILIVRELTGGVYFGEPKQIIDLGNGQKRGIDTQIYDTFEIERIASVAFELARSRDNRVCSMEKRNVMKSGVLWNQVVTETHAAKYKDVQLEHMLADAGGMQLVRKPKQFDVIVTDNLFGDMLSDVAAMLTGSLGMLPSASLGAPDAKTGKRKAMYEPVHGSAPDIAGKSIANPIAMIASFAMCLRYSFNMVDEATKLEAAIANVLDKGIRTADIMADGCRQVGTSDMGDAVLAEFKALSA

SEQ ID NO: 9208 - protein, 409 aa, Glycine max
MAACLQLWQCKLARPFDSLPVRRSIPLSLRCSAAPSSSKPTRSYSITLIPGDGIGPEIISVAKDVLVLAGYLEGIKYDFREMLMGGAALDATGLPLPHETLSAAKQSHAVLLGAVGGYKWDRNDKHLKPETGLLQIRKELGVFANLRPATVYSPLVDASTLKREVAEGVDIMLIRELTGGIYFGEPRGFGTNDNGEEIGFNTEIYATHEIDRIAHFAFKVAQKRRRKLCSVDKANVLEASMLWRKRFLAIAQEYPDVELSHMYVDNASMQLIRDPKQFDTMVTNNIFGDILSDEASMVTGSIGMLPSASLGASGPGLFEPIHGSAPDIAGQDKANPFATVLSAAMLLRYGLGEEKAAERIENAVMDTLNRGFRTGDIYSAGTKLVGCKQLGEEILKSVESNVPAGAAAV

SEQ ID NO: 9209 - protein, 193 aa, Gibberella zeae
DLDMAFVPRTSPKPSLSFRIAGMDVAELIEDTPIAQAVKLIFHQLFGWQVYTFFNASSGKGSKQWEPKSGLASWFRVSHFEPTSAVFRPAEAPFILISDIGLALTGTALYFASKEVGVSTVLYLYLVPYLWVHHWLVAITYLHHHHTELPHYTAEGWTYVKGALATVDREFGFIGKHLFHGIIEKHVIHHLFP

SEQ ID NO: 9210 - protein, 299 aa, Zea mays
SIVDLQVSLTQARIDMSELDEDSDGFLQPHEMEAYIRGLIPNLAQLRDMPTAFVQMYCRIAARKFFFFCDPHRRGKACIKKVLLSNCLQELMELHQESEEEVTDTEQAENWFSLTSAQRICDMYLALDKDTNGTLSKQELKEYADGTLTDIFIERVFDEHVRRSKVGGGNSREMDFESFLDFVLALENKDTPEGLTYLFRCLDLNGRGFLTTADIHTLFRDVHQKWIEGGNYELCIEDVRDEIWDMVKPADPLRISLSDLLSCKQGGTVASMLIDVRGFWAHDNRENLLQEEEEQVEEA

SEQ ID NO: 9211 - protein, 454 aa, Pseudotsuga menziesii
MGILLLFAVLALSAMAGSASRADFSIISYDSQDLIGDDAIMELYELWLAQHKKAYNGLDEKQKKFSVFKDNFLYIHQHNNQGNPSYKLGLNQFADLSHEEFKAAYLGTKLDAKKRLSRSPSPRYQYSVGEDLPESIDWREKGAVTAVKNQGSCGSCWAFSTVAAVEGINQIVTGNLTSLSEQELVDCDTSYNQGCNGGLMDYAFQFIISNGGLDSEDDYPYKANNGSCDAYRKNAHVVTIDDYEDVPENDEKSLKKAAANQPISVAIEASGRAFQFYESGVFTSNCGTQLDHGVTLVGYGSESGIDYWLVKNSWGNSWGEKGFIKLQRNLEGASTGMCGIAMEASYPVKKGANPPNPGPSPPSPVKPPTVCDNYYSCPESNTCCCMYDFGGYCYAWGCCPLNSATCCDDHYSCCPSDHPVCDLDAQTCLKSRKDPFGTKMLKRTPAKPYWSLSG

SEQ ID NO: 9212 - protein, 367 aa, Nicotiana tabacum
MVFPLDTQLLNPIFDVLYCEEDRFLDDDDLGEWSSTLEQVGNNVKKTLPLLECDMFWEDDQLVTLLTKEKESHLGFDCLISDGDGFLVEVRKEALDWMLRVIAHYGFTAMTAVLAVNYFDRFVSGLCFQKDKPWMSQLAAVACLSIAAKVEETQVPLLLDLQVADSRFVFEAKTIQRMELLVLSTLKWKMNPVTPLSFIDHIMRRFGFMTNLHLDFLRRCERLILGIITDSRLLHYPPSVIATAVVYFVINEIEPCNAMEYQNQLMTVLKVKQDSFEECHDLILELMGTSGYNICQSLKRKHQSVPGSPSGVIDAYFSCDSSNDSWSVASSISSSPEPQYKRIKTQDQTMTLAPLSSVSVVVGSSPR

SEQ ID NO: 9213 - protein, 239 aa, Glycine max
CAKQSDKFNDQLMSNLEVKRVVSGEGFTCGEVNDGGLICWGPTSENLGNINISNVTDSFAVLVAGRSAVCGVFNVSGELKCWGDPVSYSDPPLDSVRLVSLSAGANHFCGVRMDNHEVECWGDLNSSVVPKGNGFMAIASSDFTTCGIREDDLLLDCWLVNASKPDFDPPLELSSPGLCRASECGVDEFAFNVSVLNELSLTSVCVREDLRICSPCGSNCSKRFFLSSECSTNADRVCT

SEQ ID NO: 9214 - protein, 149 aa, Oryza sativa
MVSLKLQKRLAASVLKCGKGKVWLDPNEVNEISMANSRQNIRKLVKDGFIIKKPQKIHSRSRARRAHEAKQKGRHSGYGKRRGTREARLPTKILWMRRMRVLRRLLRKYREAKKIDKHMYHDMYMKVKGNMFKNKRVLMESIHKFILIV

SEQ ID NO: 9215 - protein, 176 aa, Rhodovulum sulfidophilum
STFLVNSAGLHPGRAASDFAPKSWNRIMDVNVTGTFRVSQHIARGMAERGYGRIINIASISGLRAGVGRTAYGTSKAAIIGLTRQFALELGSRSITANAIAPGIIETPMTLAAYSEDTWKRVLEMIPARRRGQPEDIAEAVAFLASPAASYVNGEVLTVDGGYVASGMTQTGNLET

SEQ ID NO: 9216 - protein, 435 aa, Oryza sativa
MPSPSLRLAVVGAGAAGLVAARELPREGHSPVVFERAASVGGTWLYDAAPATFDPLAAGAAHSSLYASLRTNLPREVMGFLDFPFASSAAEAGGGGDTRRFPGHDEVLRYLEEFARRFDLYGLVRFGTEVVRVRRDGGGGGGRWAVTSRKIGEKGRREEEEEVYDAIVVCNGHYTEPRVAHIPGVEAWPGKQMHSHNYRVPEPFHDQVTVFLYLCVVIIIGASASAVDISRDLAGVAEEVHVADRSAPACTCKRQPGYDNMWLHSMIDHAHTGYLYDFPFLEDDSAITVDDNCVDPLYKHVFPPEVAPHLSFIGLPWKVIPFPLFELQSKWVAGVLSGRVKLPSSEEMMEDVKAFHSKMEARGWPKRYAHNFSDCQFEYDDWLAEQCGHPPIEQWRKLMYAANSENKAARPESYRDEWDDDHLVAEAAEDFKKYL

SEQ ID NO: 9217 - protein, 143 aa, Zea mays; identical to SEQ ID NO: 2031

SEQ ID NO: 9218 - protein, 325 aa, Thermobifida fusca
METRRLGRTGRNVGVVGFGAWQIGDAWGEVSETDAMGALHAAVESGITFFDTADVYGDGRSERLVGRLLREYDGLTVATKMGRRVPQSPEVYNLENFRAWNDRSRANLGVDTIDLVQLHCPPSEVYADDAVFDALDTMVEEQRIAAYGVSVETCEQALTAIRRPNVATVQIILNAFRLKPLEEVLPAAREAGVGIIARVPLASGLLSGKFTADTTFAANDHRSFNRNGEAFDVGETFSGVDYATGLAAVERLRPLVPEGATMAQFALRWILDQPGVSVVIPGARNADQARSNAAAASLAPLPETVHARVRAVYDELIRPQVHHRW

SEQ ID NO: 9219 - protein, 245 aa, Alcaligenes latus
MAQKLAYVTGGMGGIGTSMCQRLHKDGFKVIAGCGPSRDHQKWIDEQAALGYTFYASVGNVADWDSTVAAFEKVKAEHGTVDVLVNNAGITRDGQFRKMSKADWQAVMSTNLDSMFNVTKQVIEGMLDKGWGRIINISSVNGEKGQFGQTNYSAAKAGMHGFSMALAQEVAAKGVTVNTVSPGYIATDMVKAIRQDVLDKIIATIPIRRLGTPEEIASIVAWLAGEESGFTTGADFSCNGGLHMG

SEQ ID NO: 9220 - protein, 447 aa, Trichodesmium erythraeum IMS101
MMTKVAIIGSGPCGLSILRSFQQAEEKGQIIPELVCFEKQSNWGGLWNYSWRTGSDQYGDPVHNSMYRYLWSNGPKECLEFADYSFDEHFQQPIPSFPPREVLYDYILGRAKKSNLKKYIKFNTVVNNVVFNDDQFVITSLNKKENSISQENFDYLVVATGHFSVPYVPEYEGMNSFPGRILHSHDFRDAEEFRNKDVVVLGSSYSAEDIALQCYKYGAKSVTIGYRNNPIGFEWPEGMKEVHYLDKLEGNKATFKDGHTQNVDALILCSGYLHHFPFLEESLKLKTHNRLYPPKLYKGVVWQDNHKLFYLGMQDQFYTFNMFDCQAWYARDVIMGKTQVPDDAEIEKDINNWVVKEEALEDSIQMIDFQTEYTKDLQVASDYPKIDFELIRTHLKEWKHHKEENIMTYRDKSFSSPVTGTVAPLHHTPWVEAMDDSMTTFMKAKSS

SEQ ID NO: 9221 - protein, 339 aa, Francisella tularensis subsp. novicida
MNKKILVTGGVGYIGSHTVVELLDRDYQVVVVDNLSNSKLSVIDRVKKITNKDFDFYQLDLLDKAKLTKVFQEHDIYAVIHFAGFKAVGESVEKPLEYYHNNIQGTLNLLELMQEYKVYKFVFSSSATVYGMNNKPPFTEDMPLSTTNPYGATKLMLEDILRDLQNANNNFNITCLRYFNPVGAHSSGMIGEDPQGIPNNLMPYVAQVGAGKLAKLSIFGGDYETIDGTGVRDYIHVVDLAIGHILALEKLSQDKPSWRAYNLGSGNGYSVLEIVKAYQKALGKEIPYQIVARRAGDIAASFADVAKAKRELGFETQKTIDDICQDMLKWQKYAKENNI

SEQ ID NO: 9222 - protein, 478 aa, Bifidobacterium longum NCC2705
MDQLVAESTPLKRTMRTFDLTMLGIGAIIGTGIFVLTGKGALTAGPALSVSFLLAAVCCGFAGLCYAEFAAMAPVSGSAYSYAYLAFGELIAFVIGWDLILEYALQAATVSAGWSGYFNKLLEGFGLHLPVELTAAYGTNPDVTTYFNLPGFVIVLIITWVLSIGINQTKRTNDVMVLIKLAIIVLFIACAVWYVKPSNWQPFSPYGVYTFQPGSTQPYGIVPAASIVFFSFIGFDAVSSSAEETINPNKTLPRGILLSLAVSTVLYIVMTMIMTGVVPYQDFAKYIDAPVAGVILETGMNWLAVIVNLGALIGMTTVMLVQLYGQSRICYAMSRDGLFPKFFGHVHEKYRTPFKGTWFFGLLTAFAGGFININVLFELVNIGTLSAFIIVSAGILWMRKTQPNAPRGFRAPGVPVTPILAIVFCFVLIAGLNWETWVRFAIWFGLGLIVYFGYSRKRSKLGLEQKAGADTKVAATED

SEQ ID NO: 9223 - protein, 870 aa, Cochliobolus heterostrophus
MASLLFLSLSGLAAGAAIQQRDPVPAGYVAPPYYPAPHGGWVSDWAESYRKASLLVSNMTLAEKTNLTAGTGIFMGRCVGNTGSALRVGIPQLCLQDGPLGVRNTDHNTAFPAGITAGATWDKDLIYRRAVAIGEEFRGKGVNIHLGPSVGPLGRKPRGGRNWEGFGSDPVLQAFGGSLSVEGIQSTGVIATIKHLIANEQEMYRMWNIVKPGYSSNVDDRTLHELYLWPFAEGVRSGVGSVMIAYNAVNGSACAQNSYMINGLLKDELGFQGFVMSDWLAQISGVSSTLAGLDMSMPGDRNDIPLVLGNSYWMYEQTRSVLNGSVPVDRVNDAVTRILATYFQMGQDQNYPRPNFDTNTQNAEGPLYPGALISPSGVVNEFVDVQGNHAEVAREVARDAITLLKNQDNILPLAASAPLKIFGTDAEKNPDGINSCADQGCNKGTLGMGWGSGSARYPYMDSPIDGFKARGANYQFFNTDNFPGNSNPSPNDTAIVFVTADSGENYITVEDNPGDRTSANLNLWHNGDRLIQDVAAKYSNVVVVVHTVGVILMNEWHDLPSVKAIVFAHLPGQEAGNSLMQVLYGDVSPSGHLPYTLPNAEDDFGNSVKLVGYQLGQPQDTFTEGLYIDYRHFHKANITPRYAFGHGLSYTTFSFSDATITPVTPLTRTPPARPAKGTTPSYSTAIPPASEAYWPANFNRIWRYLYSWLDKNDADAAAQVGTSPSTYPYPAGYSNEQKPGPAAGGAQGGNPALFDVAYDIAVTVTNTGNRTGKAVAQLYLQFPSESTVDTPILQLRDFAKTSTLAAGASQMLKMRLTRKDLSVWDVVEQNWVVPAVSGDYGVWIGGASDDLHLRCGTATGRCQGDQTSPV

SEQ ID NO: 9224 - protein, 302 aa, Actinidia chinensis
LRFIDEHNADTNRSYKVGLNQFADLTGEEFRSTYLGFTGGSNKTKVSNRYEPRVSQVLPSYVDWRSAGAVVDIKSQGECGGCWAFSAIATVEGINKIVTGVLISLSEQELIGCGGTQNTRGCNGGYITDGFQFIINNGGINTGENYPYTAQDGECNLDLQNEKYVTIDTYGNVPYNNEWALQTAVTYQPVSVALDAAGDAFKHYSSGIFTGPCGTAIDHAVTIVGYGTEGGIDYWIVENSWDTTWGEEGYMRILRNVGGAGTCGIATMPSYPVKYNNQNYPKPYSSLINPSAFSMSKDGPVE

SEQ ID NO: 9225 - protein, 388 aa, Phragmites australis
EDPALSIAGAVQSQKLAVRAISRLQALPGGDVKLLCDTVVEHVRELTGYDRVMVYRFHEDEHGEVVAESRRADLETYLGLHYPATDIPQASRFLFRQNRVRMIADCHATPVRVIQDPGLPQPLCLVGSTLRAPHGCHAQYMANMGSIASLVMAVIISSGGDDEQTARGSISSTMKLWGLVVCHHTSPRFIPFPLRYACEFLMQAFGLQLNMELQLAHQLSEKHILRTQTLLCDMLLRDSPTGIVTQSPSIIDLLKCDGAALYYHGKYYPLGVTPTEFQIKDIIEWWTVCHGDSTGLSTDSVADAGYLGASALGDAVCGMAVAYITSSDYLFWFRSHTAKEIKWGGAKHHPEDKDDGQRMHPRSSFKAFLEVVKSRSLPWENAEMDAIH

SEQ ID NO: 9226 - protein, 341 aa, Glycine max
  unsure (1)..(341): unsure at all Xaa locations
MAGNSATATATSSALSPENLKFNFSPDNPSRIILTSDQVNHCTQALNLLKEKLHDPHVITQEFAHLQANRITPSEMRRRCTVAYDAVNLSKNRYTDVLPFNKNRVVLKSSTDYRPEAQGYINASLISTSSAGNVSHFIATQGPLPHTCEDFWXEMITQYHCPVIIMLTRLVDNYKMVKCGDYFQAEDGPREVGNISIIGKWENTTETSLVLRHLEVNHREVEDAPLSVLHIQYPEWPDHGVPKDTFAVREILKRLYHLPPNFGPIVVHCSAGIGRTGTYCTIHNTIQRIVAGDMAAVDIAKTIAMFRSQRIGMVQTQDQCIFCYNAFIDELEDLVSQQQSE

SEQ ID NO: 9227 - protein, 340 aa, Streptomyces hygroscopicus
MSIKAEYIWIDGTQPTAKLRSKTKILSDGSRLPRWGFDGSSTNQAEGHASDLVLEPVFSCPDPIRGGDHLLVLCEVLHTDLTPHPSNTRALLRPVAERFAGQEPIFGIEQEYTFLKGDRPLGFPEGGGYPAPQADYYCGVGADAIFGREIVEKHLDLCLAAGLGLSGINAEVMPGQWEFQVGALPPLEVSDHMWVARWLLHRVAEEFGVTASLDAKPAKGDWNGAGAHTNFSTRAMREGYDPIITACEALGQDDKPLEHVRQYGTGIEDRLTGAHETAPWDAYSYGASDRGASVRIPWQVEVEKKGYIEDRRPNANVDPYVVTRLMVDTCCTELARREQI

SEQ ID NO: 9228 - protein, 162 aa, Oryza sativa
RHEAEREQKIRSEVKEIQKVFFCSLCNKQYKLAHEFESHLSSYDHNHRKRFKEMKEMHSSSSRDDRQKREQQREEKELAKFAQLYPSHVLQQQQKQEPSESSSERITMKNLPNPSNQDQRKTLKFGFSKMAPSKAPVGNVSKKPKVATKMSSVFGNESDEES

SEQ ID NO: 9229 - protein, 316 aa, Pseudomonas putida KT2440
MHEHDVLCFGETMAMFVAEQAGDLAGVGQFGKRIAGADSNVAIGLARLGFKVRWLSRVGDDSLGRFVLDSLRCEGLDCSGVEVDANYPTGFQLKARSEDGSDPAVEYFRRGSAASRLSAAMVSPVWLQARHVHATGIPLALSDSCRALSHALLDGMRAAGRSISFDPNLRPSLWPDQSSMVREINALAAKADWVLPGLEEGRLLTGQHTPADIAAFYLDQGVELVVIKLGDAGAYFRSAKGEGQVAPVPVSRVVDTVGAGDAFAVGVLSALLEGRPVAEAVARGNWCGSRAVQSRGDMEGLPLRHELEAYDLRRSA

SEQ ID NO: 9230 - protein, 339 aa, Streptococcus pneumoniae R6
MQEKILVTGGAGFIGTHTVIELIQAGHQVVVVDNLVNSNRKSLEVVERITGVEIPFYEADIRDTDTLRDIFKQEEPTGVIHFAGLKAVGESTRIPLAYYDNNIAGTVSLLKAMEENNCKNIIFSSSATVYGDPHTVPILEDFPLSVTNPYGRTKLMLEEILTDIYKADSEWNVVLLRYFNPIGAHESGDLGENPNGIPNNLLPYVTQVAVGKLEQVQVFGDDYDTEDGTGVRDYIHVVDLAKGHVAALKKIQKGSGLNVYNLGTGKGYSVLEIIQNMEKAVGCPIPYRIVERRPGDIAACYSDPAKAKAELGWEAELDITQMCEDAWRWQSKHPNGFED

SEQ ID NO: 9231 - protein, 192 aa, Triticum aestivum
  unsure (1)..(192): unsure at all Xaa locations
CRCWLALLETESISRPALVEXDDVNDKVLTYXHHDSPFKLYVLXNYTVQYRISDIDVQEIVISNAVMLQIYSRKKGYIHVEILSSEDGKRLKSFSHLIHGNKKTDIMEQCNEKFLANQDGEILQIRDVHLTLTSXEVSSNEFVTPSXCIFSCAMQFFLPFCNRSVSFGYLSGRLVTSFEDHGLCHPDSDSHT

SEQ ID NO: 9232 - protein, 244 aa, Eucalyptus globulus
MGRGRLQLKRIENKINRQITFSKRRAGLLKKAHEISVLCDAEVALIVFSAKGKLFEYSTDSCMERILERYERYSYAEHQVLASETESIGSWTLEHAKLKARLEVLHRNYRHFMGEDLDSLSLKDLQNLEQQLESALKHIRSRKNQLMHESISVLQKKDRALQEQNNLLTKKIKEKERALAQQAQWEQQDHALDSPVVLPHYLPSLDINGSYQARHNGHDDGENLTQPRAGTLLPPWISASQLRL

SEQ ID NO: 9233 - protein, 83 aa, Zea mays
  unsure (1)..(83): unsure at all Xaa locations
FVLDNKAYLYSITLLNMLTSAGRFFXTRHDQVRFPXIHTHMLETTCQYXYWPIHYSSGKQTPXLLIEPNTTLELMMARNYTYT

SEQ ID NO: 9234 - protein, 461 aa, Prunus persica
ADAIKAGLDLDCGPFLAIHTEAAVRRGLVSQLEINWALANTMTVQMRLGMFDGEPSAHQYGNLGPRDVCTPAHQQLALEAARQGIVLLENRGRSLPLSTRRHRTVAVIGPNSDVTVTMIGNYAGVACGYTTPLQGIGRYTRTIHQAGCTDVHCNGNQLFGAAEAAARQADATVLVMGLDQSIEAEFVDRAGLLLPGHQQELVSRVARASRGPTILVLMSGGPIDVTFAKNDPRISAIIWVGYPGQAGGTAIANVLFGTANPGGKLPMTWYPQNYVTHLPMTDMAMRADPARGYPGRTYRFYIGPVVFPFGLGLSYTTFAHNLAHGPTLVSVPLTSLKATANSTMLSKTVRVSHPDCNALSPLDVHVDVKNTGSMDGTHTLLVFTSPPDGKWASSKQLMGFHKIHIATGSEKRVRIAVHVCKHLSVVDRFGIRRIPLGEHKLQIGDLSHHVSLQTNLGEIKV

SEQ ID NO: 9235 - protein, 291 aa, Zea mays
AAVAPQPALRPALAFHAGGHAVALPHHHHHDIPAPPRKPGPLAVGAQILRSEGAAGLFSGVSATMLRQTLYSTTRMGLYDILKTRWARENGGVLPLHRKILAGLVAGGVGAAVGNPADVAMVRMQADGRLPLAERRNYRGVGDAIGRMARDEGVRSLWRGSSLTVNRAMIVTASQLATYDQAKEAILARRGPGADGLATHVAASFTAGIVAAAASNPVDVVKTRMMNMKVAPGAPPPYAGAVDCALKTVRSEGPMALYKGFIPTVMRQGPFTVVLFVTLEQVRKVFKGVEF

SEQ ID NO: 9236 - protein, 169 aa, Saccharomyces cerevisiae
  unsure (1)..(169): unsure at all Xaa locations
GAHXVTSNVVLVSGEGERFTVDKKIAERSLLLKNYLNDXGDDDDEDDDEIVXPVPNVRSSVLQKVIEWAEHHRDSNFPDEDDDDSRKSAPVDSWDREFLKVDQEXLYEIILAANYLNIKPLLDAGCKVVAEXIRGRSPEEIRRTFNIVNDFTPEEEAAIRRENEWAEDR

SEQ ID NO: 9237 - protein, 274 aa, Thermosynechococcus elongatus BP-1
MEITSQDPCVPDPLKPYVQIDGWGEVPVVLGHGFGTDKSAWDYLTPFLPKGFTYIRYDLAGCGSDEDTQHRYDVQRHSHLYGYADDLIELLDQLGVQSCIYVGHSVSCMIGAIAAIARPDLFRRHIWIGPSPCYLKDENYPGTLTPDDLQAIYEAMVTNYQAWAAGFAPLMFGLKEEHRLADFSQTLFRLQPRIALRTLQMIFDSDTRSFVGKVQQPVHLIFNRNDFVVPQGVALWLHATLPHSTLDWIDAQGHLPHMTHPTAVGSLLKKYMSI

SEQ ID NO: 9238 - protein, 190 aa, Triticum aestivum
  unsure (1)..(190): unsure at all Xaa locations
MAAAAQGEASTGATTTATFRRVYETLKAELLRDGYFHFNDDALRWLDAMLDYNVLGGKLNRGLAVVESYKSLKAGSEPSEEEEFLACVLGWGIEWLQAYFLILDDIMDNSQTRRGKPCWYRLPKVGLIAINDGLLLRSQISRIFKRYFYGKPYXVDLLDLFNEVEVXKTTSGEVVXTKLQQSEGXKNLSK

SEQ ID NO: 9239 - protein, 353 aa, Agrobacterium tumefaciens str. C58 (Cereon)
MKYKTLGNTGLLVSQLCLGTMTFSDGTGIYEHIGDVGQTGADELVKASIDAGINFFDTADVYSAGASERTLGQSFKNLGIARNEIVLATKVYSRMGSGRNDVGASRGHIMDAVEASLKRLQTDHIDLYQIHATDTLTPVEETLRALDDLVRQGKVRYVGVSNWQAWRIATALGVSARLGLERFNTLQAYYSIAGRDLERELKPLLDAEKMGLLVWSPLAGGLLSGRFSRANQSPEGSRRSSFDFPIVDKERAWNVIDVLKPIAKAHGCSPARIALAWLLAKPVVTSVIVGAKRLSQLEDNIAAVGTVLSDDEVARLDAVSELPPEYPGWMLETQGADRLGPVDLWSGKTSQTS

SEQ ID NO: 9240 - protein, 448 aa, Oryza sativa (japonica cultivar-group)
MRIEEVQSAAKKQRIATHTHIKGLGLDGFSLGVIRVDLRVFFVLFSDGLACWFGFIEQANGAAIGLASGFVGQAAAREAAGLVVDMIRQKKMAGRALLLAGPPATGKTALALGISQELGSKVPFCPMVGSEVYSSEVKKTEVLMENFRRAIGLRIKENKEVYEGEVTELSPEEAESTTSGYGKSISHVIIGLKTVKGTKQLKLDPTIYDALIKEKVAVGDVIYIEANSGAVKRVGRCDSFATEYDLEAEEYVPIPKGEVHKKKEIVQDVTLHDLDAANAQPQGGQDILSLMGQMMKPRKTEITDKLRQEINKVVNRYIDEGIAELVPGVLFIDEVHMLDIECFSYLNRALESPLSPIVILATNRGICNLTSLLYTCVNVSRGTDMTSPHGIPVDLLDRLVIIRTETYGPTEMIQILAIRAQVEEIEIDEESLAFLGEIGQQTSLRYDS

SEQ ID NO: 9241 - protein, 369 aa, Zea mays
MEAAASAEYGYYGGGAGPHETKTAGCGDHFVVDDLLALPPYDEEEEGATGETPLCLQPVKEEGGLGNFSADSSIVTAIDSCSNSFCRLADDDFPGEFYEPYDQLVELEWLSNYMGEGEETFAAEDLEKLKLISGGFSPAAVNVSAPAPVGVASAASATQSGMFLPVPAKARSKRSRAAPGNWSSRLVVLPPTPASPPAPAASMAISPSESGISAQQAFRAKKPPPSKKKDAAAPAEGRRCVHCDTDKTPQWRTGPMGPKTLCNACGVRYKSGRLVPEYRPAASPTFVMSKHSNSHRKVLELRRQKEVVVQQPPHVMAGAGGPAGGLMRMQSAMLLDGPVAAVSSSSPIVGGDEFLIHQHLGTADYRQRI

SEQ ID NO: 9242 - protein, 472 aa, Pseudomonas putida KT2440
MSGQNMHSGELKRGLKNRHIQLIALGGAIGTGLFLGSAGVMKSAGPSMILGYAICGFIAFMIMRQLGEMIVEEPVAGSFSHFAHTYWGGFAGFLSGWNCWVLYILVGMSELSAVGKYVHYWWPEIPTWVTAAAFFVLINAINLMNVKFFGEAEFWFAIIKVVAIVSMIGLGAYLLTSGSGGPEATVANLWTHGGFFPNGVSGLVMALAFIMFSFGGLEMLGFTAAEADKPKTVIPKAINQVIYRILIFYVGALVVLLSLTPWDNLVASIDASGGSYGSSPFVQVFSLLGSDVAANLLNFVVLTAALSVYNSGTYCNARMLLGMAEQGDAPASLAKVDKRGVPVRSILVSAAVTFVAVLLNYLMPQNALELLMSLVVATLVINWAMISYSHLKFRQHLDRTGQKPLFKALWYPYGNYVVLAFVVLILGIMLMIPGIQVSVYAIPVWLLAMLVVYMVKSRRQVNAGGAVETVAK

SEQ ID NO: 9243 - protein, 302 aa, Magnetospirillum magnetotacticum
  unsure (1)..(302): unsure at all Xaa locations
LRVVLFRYFRWPPFFIPFRLALASLFRYLASRGGVPGSAAEVVQGSDXRMXMDRLQSGAGEMADQHIPAAPLPFSIRLRCPIRVRPDAQARNRRRDRPLPGKSRLERSDSMPDIREAKILILATDGFEESELTVPQAKLKEAGATVTVASPQSRQSKGTIRGWDKTDWGKDVAVDLDLESVNPADYDALVLPGGQINPDKLRVEAKAIEVIRSFLTSGKVVAAICHGPWLLIEAGAVKGRTLTSFSSIKTDVINAGGNWQDKDVVTDGGIVTSRNPGDLDAFCAKIVEEVKEGRHEPRQLAA

SEQ ID NO: 9244 - protein, 647 aa, Sulfolobus solfataricus
MGEREAKGARDLGISSDKQLRRSLGKFELLYLSLGGIIGSGWLFASLSTAAYAGGAAILSWIIAGILVMFVGLAYAEIGAAIPKSGGITRYPHYTHGGLVGYIITWAYFLSAASVPAIEAAAAIEYIGSYYPQLITSGTFDGTTVTILTPLGIGLAGLLLIFFFFLNYFGVNILGKVTHGAGWWKLLVPTITFLALLALDLHSANFTLGGGFFPSAQYVKGGSSGIYGFSAVLFAIPSTGVIFAYLGFRQAVEYGGEGKNPSKDIPFAVLGSLLIAIALYTLLQVSFIGGIDWSKLYLVNKTTGILIPVVPGNWSALSTAVTASNVSISSGPFLVLTQIAPVSGLAAAFFTALAVLLTIDAVVSPSGTGWIYTGTSTRTLYAFASNGYLPEIFLKIGKTKIPTYSLIAALIVGFIFLLPFPSWYALVGFISSATVLTYIMGGIGLAVLRKHAKELNRPFRVPASVIIAPIATLAAGLIVYWSSFAILFYVFTGIFLGLPLFFIFYSNRILGINKAYSIVVGVINLVIDLVMAFLLFDETSGLGAANNLFFGIYIVVIAAMLIGDMLFLLKTVPPDVKREINAGWWLIYFILAIYIISYFGGFGLYTIIPFPYDTIVAAIVILIGYFWAIRSGFRTQAIQDIIQATRE

SEQ ID NO: 9245 - protein, 513 aa, Morinda citrifolia
MALTTATIFTAAGNISTAIATTSFHHATEPTIFSPFPCSPSNHRKRKANPISAVTTIPPAQKDWSPDSWKSKKASQLPEYPEKSELEAVLRTLKSFPPIVFAGESRKLEEKLGQAALGNAFLLQGGDCAESFKEFNANNIRDTFRVILQMGVVLMFGGQMPVIKVGRMAGQFAKPRSEPFEERDGVKLPSYRGDNVNGDAFDEKSRIPDPHRMIRAYSQSVSTLNLLRAFATGGYAAMQRVSQWNLDFTEHSEQGDRYRELAHRVDEALGFMAAAGLTDGHPVMSTTDFWTSHECLLLPYEQALTREDSTSGLYYDCSAHMLWVGERTRQLDGAHVEFLRGVANPLGIKVSDKMDPGELVRLIDILNPQNKAGRITVITRMGAENMRVKLPHLIRAVRRAGQIVTWVSDPMHGNTIKAPGLKTRSFDSIRAEVRAFFDVHDQEGSCPGGVHLEMTGQNVTECVGGSRTITYNDLSSRYHTHCDPRLNASQSLELAFIIAERLRKRRHQTSSPM

SEQ ID NO: 9246 - protein, 519 aa, Triticum aestivum
MAVAGAPPVLQLLPQQWQLILAILLVPLGFLLLRGRSGSGLKLPPGPMRLPFVGNLHQIGPLPHRSLAALARRHGPVMMLRLGMVPTVVLTSPEAAREALKTKDDDCSSRPLSAGPGLLSYGYKDVAFSPWSDYVREMRKLFIIELLSRRRVQSAYYARDAQIDKLIETLTVVGPNPVPLEAHIFATMDRIVGLFAFGESYAGEQFKGQFVPLLNATMDMLGSFSAQDFFPNAVGRLIDRITGVKAHRQRVFRQLDRFFEHIIEQCDGRKATGGGGSDLVQELLDIMKRPAASAAGTFTRDHVKAILMNTFIGSIDTTTVTITWAMAELIRKPRVLQRAQLEIRTAAGGGSRVHQADMPKMSYLRMVLSETLRLHPPATLLVPRETLRPIQVAGYDIPAKTQVIVNAWAISRDPSAWKDPEEFNPERFQDTDVDFNGSHFEFIPFGAGRRICPGLAMGVANAEYILANLLYCFNWALPNGVSREGVNMEEEGVLTYRKKTSLMLVPTPYHPAQEKEEEY

SEQ ID NO: 9247 - protein, 543 aa, Oryza sativa (japonica cultivar-group)
MASAAEAVEELTRLYRELPPRPAVEEVEAAEAVLASADAEEAARLDEVAREEASASASSSAAAPGRADGELLAVLREARRNAVRLRALQQRKEAAYVVELERRFKVFDDLIQRASRVVSSSSDAAEAGGGTTGDGYVGVGADSVDLEMELRKKEAAVAAAAAVAEMERGSKGLAALGLESKPISSLRRDVSAGTDMEKLSLIQVASLIESSAKKGITELSLRGKLVDQIEWLPVSLGKLQDVTELDLSENRIMALPSTIGSLRYLTKLDLHSNQLINLPDAFGELSNLIDLDLHANQLKSLPSSFGNLTSLANLDLSSNMLKALPDCLGKLANLRRLIVETNELEELPYTIGSCTSLVELRLDFNQLKALPEAIGKLEKLEILTLHYNRIKGLPTTVGSLSRLRELDVSFNEVEVIPENICFATSLVKLNLSRNFADLRALPKSIGNLEMLEELDISSNQIRVLPDSFRCLSRLRVFHADETPLEFPPREVVKLGAQAVVKYMNDLNAARGTNQKKTDRGSFWTWLFSLFGCCKKNQEVGLPV

SEQ ID NO: 9248 - protein, 678 aa, Bacteroides thetaiotaomicron VPI-5482
MKKKYDIKTTDVETLKKWYHLMTLGRALDEKAPSYQLQSLGWSYHAPYAGHDGIQLAVGQVFTLGEDFLFPYYRDMLTVLSAGMTAEEIILNGISKATDPGSGGRHMSNHFAKPEWHIENISSATGTHDLHAAGVARAMVYYGHKGVAITSHGESATSEGFVYEAINGASLERLPVIFVIQDNGYGISVPKSEQTANRKVAENFSGFKNLKIIYCNGKDVFDSMNAMTEAREYAISTRNPVIVQANCVRIGSHSNSDKHTLYRDENELEYVKEADPLMKFRRMLLRYKRLTEEELLQIEAESKKELSAANRKALAAPEPDPKSIYDFVMPEPYQPQKYKEGTHQEEGEKTFLVNAINETLKAEFRHNPDTFIWGQDVANREKGGVFNVTKGMQQEFGEARVFSAPIAEDYIVGTANGMSRFDPKIHVVIEGAEFADYFWPAVEQYVECTHEYWRSNGKFAPNITLRLASGGYIGGGLYHSQNIEGALTTLPGARIVCPSFADDAAGLLRTSMRSKGFTLFLEPKALYNSVEAAAVVPEDFEVPFGKARIRREGTDLSIITYGNTTHFCLHVAEQLEKESGWKVEVIDIRSLIPLDKEAIFESVKKTSKALVVHEDKVFSGFGAELAAMIGTDMFRYLDGPVQRVGSTFTPVGFNPILEKEILPDEAKIYEAAKKLLEY

SEQ ID NO: 9249 - protein, 337 aa, Escherichia coli
MKVLLTGGLGYIGCHIAVELLQQGHDVVIFDNLSNSHLTVLERIKAITQKKVVFIRGDLRSLSDIRKTFESSQIEAVIHLAALKSVSESVRHPLEYYINNVVGSLNLIQAMSHANIKRLIFSSSATVYGQPEHLPITEQASVGKVTNPYGQTKLIIEKILADICLADPEWQITSLRYFNPIGAHPSGMIGEDPRGMPNNILPYITQVAIRRRPYFTILGDDYPTKDGTGVRDYIHVQDLALGHIAALMNAKNKSYQVYNLGTGKGYSVLDIINSFKEINNIDIPFIIEKRRPGDIAECWSSPELAKRELGWQAKFELKDMLRDSWNWQQKNPFGYGN

SEQ ID NO: 9250 - protein, 296 aa, Rhizobium sp. CIAM2209
  unsure (1)..(296): unsure at all Xaa locations
RGKTQIKDYAEFPTLEQLPLWGFDGSSTQQAEGHSSDCVLKPVAVFPDPARTNGVLVMCEVMMPDGVTPHSSNKRATILDDEGAWFGFEQEYFFYKDGRPLGFPESGYPAPQGPYYTGVGYSNVGSVARQIVEEHLDQCLAAGINHEGINAEVAKGQWEFQIFGKGSKKAADQMWMARYLMQRLTEKYGIDIEYHCKPLGDTDWNGSGMHANFSTAYMREVGGKAYFEALMAAFDXNLMDHIAVYGPDNDKRLTGKHETAPWNKFSYGIADRGASIRVPHSFVNNGYKGYLEDRRP

SEQ ID NO: 9251 - protein, 195 aa, Oceanobacillus iheyensis HTE831
MRPLILGLIMSLTLLLSACLLHNPKSLTIEMYNVDGDRVGTALLSDQEDAVAIELDLEGLQPGFHAIHVHEYGRCEAPDFTTAGNHLNPQGKEHGMIHPEGSHLGDLPNIEADAGGLVHAELELSGASLQEGKSSLINNDGTALIVHEGQDDGMSQPGGDSGTRIVCGEIHAEKESGDSEKAPTDPTEQNDEQEE

SEQ ID NO: 9252 - protein, 472 aa, Hordeum vulgare subsp. vulgare
MTYGGERRGSNPTTVIHKTFLPLPLFRVLETTSSSCSSPSFPRPSFSPPVHSAAGEDFRRRAREAIGIDPWMDAAQWHQGLGLVKPMEEMIMAGNPNPNPNGNPSPQPAPPSGAEAQRAPLPGPPAAGAGAAAGTGSTERKAARPQKEKAINCPRCNSTNTKFCYYNNYSLQQPRYFCKTCRRYWTEGGSLRNVPVGGGSRKNKRSSSSVVSSAAGAVSTSGAASGTVPVGGMPAKNPKLMHEGAHDLNLAFPHHHGRVLHPSEFAAFPSLESSSVCNPGGAMAANGVGGGRGMGTFSAMELLRSTGCYVPLPQVQLGMPPEYAAAGFALGEFRMPLQHQQQHHQQQQQQQQQHHQHQHQHQQHQQQQQQQQVQNMLGFSLDTGGGGDGGGYGGGLQGAQESATGRMLFPFEDLKPGANAAGGGGASGGDQFEHSKEQGGGGGHETLGFWNNSMIGNGSSNDAGGGGGGGSW

SEQ ID NO: 9253 - protein, 340 aa, Bradyrhizobium japonicum USDA 110
MRSMTVLVTGGAGYIGSHTVLALAEAGEDVVVIDDLSTGFSAYLPEGVPLFIGDAGDENLLEGVIAQHNIESIIHFAGSVVVPDSMRDPLGYYRNNFMTARNLLNVAVKRGIGRFIFSSTAAVYGDPDQVPVPEHAPTRPLSPYGSSKLMTEIMLHDVAAAYGMQYVTLRYFNVAGADPQARIGLATVGATHLLKIAVEAATGQRAKIDVFGTDYPTPDGSCIRDFIHVTDLSQAHRSALAYLRNGGASTTLNCGYGRGYSVLETIDAVRRVSGRSFAVQYAPRRPGDIMTMVADTSRIRGLLDWKPQYDDLETIAAHALAWEDKLYRERHGELRHAVSA

SEQ ID NO: 9254 - protein, 327 aa, SYNECHOCOCCUS SP. WH 8102
MAGTLLFNALREAIDEEMARDPYVCVMGEDVGHYGGSYKVTKDLCEKYGDLRVLDTPIAENGFTGMAVGAAMTGLRPIVEGMNMGFLLLAFNQISNNMGMLRYTSGGNFTIPTVVRGPGGVGRQLGAEHSQRLEAYFHAVPGIKIVACSTPTNAKGLMKAAIRDNNPVLFFEHVLLYNLSEELPEGEFTCALDQADLVQEGSDVTILTYSRMRHHCLKAVEQLEADGISVELIDLISLKPFDMETIGRSIRKTHRVIVVEECMKTGGIGAELIALITEQCFDDLDARPVRLSSQDIPTPYNGSLENLTIIQPHQIVEAAQQMVRQGV

SEQ ID NO: 9255 - protein, 332 aa, Nostoc punctiforme
MTLPTTNLGKTGLTFSRLCLGTMTFGLQTDEETSRDILDTAADGGINFLDTADVYPLGGGLATAGRTEEIVGRWLKGKRKHFILATKCVGRVGPAPWDQGASRKHILDAIDASLRRLGTDYIDLYQLHSDDTSTPLDETLEALDAVVRAGKVRYIGVSNFLAYRLARALGRAETRNLTRFVSIQPRYNLLFREIERELLPLAKEEGLGVISYNPLAGGLLTGKHILAQGPTSGTRFTLGAAAERYQERYWHDREFDTVEELRTVADLAGLSLTTLAVAWVLSNPIITAPIIGASRPQQLADNFKAVEVKLDDSLKQKLDDLTAEYRRGDSLR

SEQ ID NO: 9256 - protein, 298 aa, Clostridium tetani E88
MGYVICYNKLTSERKINMDINWFPGHMAKTRRELKENLKMVDAIIEIRDARIVKSSANPEIENICGNKPRIILLNKSDLGEEKVTNEWIKALSGENTKVIAINSLKDSGMKKIKNAIDDLLKEKTEKLKAKGLKNIVNRVMVVGIPNVGKSTFINRMAKSSIAKTGDRPGVTKSRQWIKTKIGVELMDTPGILWPKFEDEKVGLNLAFTGAIKDEIMDIETLALNLIERLSEDYGENLKERYKLDKLEEIPLDNMENIAKKRGAILGRGEIDYNRVAIMILDEFRGGKLGRISLEKPE

SEQ ID NO: 9257 - protein, 133 aa, Glycine max
MAHPLSFAPICSFKSSSTPGALTVTGNSVVSAFIRINEACHDSKARNFQSLKVKAADDNPSTKTKSIVCSDCEGNGAILCTQCKGTGVNSVDHFNGQFKAGGLCWLCTGKRDILCGSCNGAGFIGGFMSTFDD

SEQ ID NO: 9258 - protein, 344 aa, Helicobacter pylori 26695
MALLFTGACGYIGSHTARAFLEKTKENIIIVDDLSTGFLEHLKALEHYYPNRVVFIQANLNETHKLDAFLNKQQLKDPIEAILHFGAKISVEESTHLPLEYYTNNTLNTLELVKLCLKHAIKRFIFSSTAVVYGESSSSLNEESPLNPINPYGASKMMSERILLDTSKIADFKCVILRYFNVAGACMHNDYTTPYTLGQRTLNATHLIKIACECAVGKRKKMGIFGTNYPTRDGTCIRDYIHVDDLANAHLASYQTLLEKNKSEIYNVGYNQGHSVKEVIEKVKEISNNDFLVEILDKRQGDPASLIANNAKILQNTSFKPLYNNLDTIIKSALDWEEHLLRFQ

SEQ ID NO: 9259 - protein, 364 aa, Glycine max
MTNNNDNIAVTDLTSALNEENRADLVNALKSKIQSLAGAHSDVLETLSPNVRKRVESLREIQGKHDEIEADFLKEKEALEAKYQKLYQPLYTKRYEIVNGVIEVEGAANETTDESEEDKEKGVPSFWLNAMKNNDVLAEEISERDEGALKFLKDIKWSRIENPKGFKLEFFFDTNPYFSNTILTKTYHMIDEDEPILEKAIGTEIEWYPGKCLTQKVLKKKPKKGSKNAKPITKTESCESFFNFFKPPEVPEDDVDIDEDLAEELQNQMEQDYDIGSTIRDKIIPHAVSWFTGEAVEGDEFEDLEDDEDGDDDEDDEEEDEDEDDDDGDEEEEDSKTKKKSSAVKKSGRAQAGDGERPPECKQQ

SEQ ID NO: 9260 - protein, 249 aa, Zea mays
MASSERVYEDFVPPHKTEREPATHTLTVNLSGQGFKKEHVRVQMVHSQRRLIVRGERPVDGNRWRRFGLELLVPDGCDAKAIHARFENGVFRVTMPAVPPEQVPVVASAAKQDGGDRAARGREDNKHETPRKQEARQRVVSSARDPGGSSSKNDGAGGGSSAPPSSCQGFLSNPKMATTVACRGARPHQPRHLCQEQRLAVNSVLARAYVWYTGCGNDSWTQLVKVPRVRYVSKRLEGYVCLISFVSRK

SEQ ID NO: 9261 - protein, 97 aa, Zea mays
  unsure (1)..(97): unsure at all Xaa locations
SLKTNDTLPFCLNAGVKANLAPPHPFKSSIQSEAKFWADKKNFGTEAIYGSALNIRKVLYAKILLRFQRPLXGLAIIFVGYEALTGSLNDCGFEDYL

SEQ ID NO: 9262 - protein, 363 aa, Pichia stipitis
MTANPSLVLNKIDDISFETYDAPEISEPTDVLVQVKKTGICGSDIHFYAHGRIGNFVLTKPMVLGHESAGTVVQVGKGVTSLKVGDNVAIEPGIPSRFSDEYKSGHYNLCPHMAFAATPNSKEGEPNPPGTLCKYFKSPEDFLVKLPDHVSLELGALVEPLSVGVHASKLGSVAFGDYVAVFGAGPVGLLAAAVAKTFGAKGVIVVDIFDNKLKMAKDIGAATHTFNSKTGGSEELIKAFGGNVPNVVLECTGAEPCIKLGVDAIAPGGRFVQVGNAAGPVSFPITVFAMKELTLFGSFRYGFNDYKTAVGIFDTNYQNGRENAPIDFEQLITHRYKFKDAIEAYDLVRAGKGAVKCLIDGPE

SEQ ID NO: 9263 - protein, 73 aa, SINNINGIA STRIATA
  unsure (1)..(73): unsure at all Xaa locations
ISGTNGEVMPGQWEFQVGPSVGIEAGDHIWCARYLLERIXEQAGVVLSLDPKPIEGDWNGAGCHTNYSTKSMR

SEQ ID NO: 9264 - protein, 392 aa, Janusia mediterranea
DLEPVNPADVPVTAAGALKSYKLAAKAISRLQSLPSGNISLLCDVLVKEVRDLTGYDRVMVYKFHEDEHGEVVSECRRSDLESYLGLHYPATDIPQASRFLFMKNKVRMICDCLAPSVKVIQDERLPQPLSLCGSTLRSPHGCHAQYMTNMGTIASLVMSVTVNEDDDTMDGDQQQMARKLWGLVVCHHTSPQFVPFPLRYACEFLIQVFGVQITKKVELAAQVREKHILQIQTMLCDMLLRDAPVAIITQSPNVMDLVKCDGAALYFKSKTWFLGVTPTEEQIRDIAEWLLKYHSGNTGLSTDSLMEAGYPGASGLGDAVCGMAAVSITSRDFLFWFRSHTAKEIKWGGAKHDPDDKDDLRKMHPRSSFKAFLEVVKWRSMPWEDMEMDAI

SEQ ID NO: 9265 - protein, 270 aa, Ferroplasma acidarmanus
MINMEKIMWYGKIIDKKIYLYRNLQKDYMNILESLRQGIIPETEETCSEKIPDLREILLKFEKERINSEFSHDQYIIKVYSVKKELEEIINLYLEKLVSIYTLLDIKYNNDPCLYFSKLKNAGLQDVDNAAAEMGINMCSFRSYLDNYLGNEIEKYMPHTVSLIGKTLALDFLLKSGSLENLVKYPAGTLQILGAEKAFFNHMRKGTPPPKHGIIFNYPGLSALPPNQRGKVARAIANKMAITLKMDFFKTDGDTEGMVNEIKKKMNIQV

SEQ ID NO: 9266 - protein, 495 aa, Oryza sativa
MTMRTTRLTATVPINIWIHTNTNGIVVLARLLPRDYKNGSFAAAPAAPPPPVHLGRRRCRCRDRDPRLDRLPQEPAAAAAGVAWHRGRPARAFSLFCAAAAAAGRSVFLAQAASMAAANGSACGGGGVDKEKEEFKQIYGVLKEELLRDPAFEFTDSSRQWIDRVMLFSPSPFSSCVADRMCFSSRIVSSGFSVGFRSGKCNRGLSVVDSYKLLKGTNVLSQEDMFLASTLGWCVEWLQAYFLVLDDIMDDSHTRRGQPCWFRVPQVGSIAINDGIILRNHITRMLRLHFRGKLYYADLLDLFNEVEFKTASGQLLDLITTHEGEKDLNKYNIGVHRRIVQYKTSYYSFYLPVACALLLSGEDLTKYGAVEDILVKMGIYFQVQDDYLDCYGDPKFIGKIGTDIEDYKCSWLVVQALERADESQKSVLFENYGKKDPACVAKVKSLYRELNLEAVFLDYENESYKKLIADIEAQPSIAVQNVLKSFLHKIYKRQK

SEQ ID NO: 9267 - protein, 981 aa, Oryza sativa
  unsure (1)..(981): unsure at all Xaa locations
MGRATAAYVVSSRCVLLRGGQWRVCFRAALMATVRVVCRSNQKPCAGILWTKICVGDCEGWKMTTNERTNATGSLGQVGRARHAAFNAAQRTLIRSVTGRDRSDRGLGGNRRPVTRLAPSRRNDKSFLALVPSRSWCANSWSWQLEAHVVTPDQIKRRPRPRKKGERGNEGSGDSGEGFLEPELSFALGLSVFLHAQIHQNTGVGCCASQRPEPVYVARVLRISSLADVPQIEGEEPHLAPPAEPAKGGLRGLPVIAVVFLAGYTLLLHRFVASPPRFGEERKGERKRVQEDLAPLLLLVARPDQQHQLPFCLSLSLLSAAPTHHFPVRPSPPASLFRTHLLQLRTFNLQKERKKERKESKAPPSATASPTHLLHHHREGNAYQKRGRKAKITSDQVGAPRSRLPQSPPDRSIDASFSSSSEATLCRALAYVCLCVRAPPSAGAMSSAAGGGGGYGGGGGEHQHQQQQHHLLLGXXAAGQLYHVPQHSRREKLRFPPDHPAESPPXXPPPGSWPLPPAFYSYASSSSSYSPHSPTLAHAQLVAHGMPPGXPRPQIPSQNFALSLSSASSNPPPTPRRQFGGPGGGGGAAGPYGPFTGYAAVLGRSRFLGPAQKLLEEICDVGGRPAQLDRGSDEGLLDVDAMDAAGSVDHEMDGSDRAVADAVTVSGAEQQWRKTRLISLMEDVCKRYRQYYQQLQAVVSSFETVAGLSNAAPFASMALRTMSKHFKYLKGIILNQLRNTGKGATKDGLGKEDTTNFGLMGGGAGLLRGNNVNSFSQPHNIWRPQRGLPERAVSVLRAWLFEHFLHPYPTDSDKQMLAKQTGLTRNQVSNWFINARVRLWKPMVEEIHNLEMRQLQKNPSLDKNQLSMQHXXQHSSDSSGKPCDPSNSLQGQSSSMTRNHSISASRHIEDGLSQMPHDISGQXXNNRAYIAEPLPAALPLNLAHRFGLEDVSDAYVMSSFGGQDRHFTKEIGGHLLHDFVG

SEQ ID NO: 9268 - protein, 96 aa, Tripsacum dactyloides
MGRRACCAKEGVKRGAWTSKEDDVLAAYVKAHGEGKWREVPQKASLRRCGKSCRLRWLNYLRPNIKRGNISYDEEDLIIRLHKLLGNRWSLIAGRL

SEQ ID NO: 9269 - protein, 347 aa, Sinorhizobium meliloti
MKSYSIALIPGDGIGQDVTDAAWQVLSTVARHSGFTLTGTSFPWSCAFYKETGAMMPADGIEALRPFDAILLGSVGWPAEVPDSISLHGLLLPIRKAFVQYANIRPHRLLSGVEGPLKASDFDILCVRENTEGEYSGAGGRVHQGTADEVAVETSIFTRAGVERILRFAFEQARQRRGKLASVTKSNAQKHSMVFWDEVTRQLADEYPDVEVTSYHIDAMAARVVMAPESLDVVVASNLFGDILTDLGAAIQGGLGFAASANINPDRSAPSMFEPVHGSAPDIAHLGIANPIAAIWSGAMMLEHLGEREAAGMIMAALERTTIRGIGTVPGKDRTRSITAAVLAALD

SEQ ID NO: 9270 - protein, 356 aa, Agrobacterium tumefaciens str. C58 (Cereon)
MYRSKLAWKKPSSISMHCSPAGKWRRPYEMARTILVTGGAGFIGSHICKALAQSGFKPIAYDNLSTGHADSVRWGPLIEGDILDGVLLKATLREFSPAFVIHCAANAYVGESVEDPRKYYRNNVGGSLSLLDACLDQNIGGLVFSSSCATYGVPQQLPIREETAQMPVNPYGRTKLIFEMALEDYAAAYGLRFVALRYFNAAGADPDGELYERHEPETHLIPRALMAAAARLPQLDVFGADYDTSDGTCIRDYIHVSDLADAHLAAVNYLSDGGETLRVNLGSGHGTSVGDIIRAIHRVTGQEVPVHFGARRAGDPPALFADIRRAEETLGFTPKRSDIDTIIRTAGPGFGLEARS

SEQ ID NO: 9271 - protein, 394 aa, Zea mays subsp. mays
LGAERRARLPPGEMGWPLVGGMWAFLRAFKSGKPDAFIASFVRRFGRTGVYRSFMFSSPTVLVTTAEGRKQVLMDDDAFVTGWPKATVALVGPRSFVAMPHDEHRRIRKLTAAPINGFDALTGYLPFIDSTVTSSLRAWADHGGSVEFLTELRRMTFKIIVQIFLGGADQATTRALERSYTELNYGMRAMAINLPGFAYRGALRARRRLVAVLQGVLDERRAARAKGVSGGGVDMMDRLIEAQDERGRRLDDDEIIDVLVMYLNAGHESSGHITMWATVFLQENPDMFARAKAEQEAIMRSIPSSQQGLTLRDFRKMEYLSQVIDETLRLVNISFVSFRQATRDVFVNGYLIPKGWKVQLWYRSVHMDPHVYPDPTKFDPSRWEGHSPRAGTFL

SEQ ID NO: 9272 - protein, 140 aa, Triticum aestivum
  unsure (1)..(140): unsure at all Xaa locations
MNRKPGDWDCRACQHLNFSRRDICQRCSEPRGVADRGGGGGGGGDYASFGGRGGXSFGGGFGAAGLTSALGDWXYCSCGAHNFANRSNCLNAPAYKEEAPVNMAFYTSGTVPERLWSGLPVYNARWINGLTNVKNFNKMI

SEQ ID NO: 9273 - protein, 130 aa, Zea mays
  unsure (1)..(130): unsure at all Xaa locations
RIRLEIDMSELDEDSDGFLQRHXMEAYIRGLIPNLAQLRDMPTAFVQMYCRIAAHKFFFFCDPYRRGKACIKKVLLNNCLQELMELYQESEEEVTDTKQAENLFSLTSAERICDMFLALDKDTNGTLSKH

SEQ ID NO: 9274 - protein, 358 aa, Escherichia coli K12
MKALARFGKAFGGYKMIDVPQPMCGPEDVVIEIKAAAICGADMKHYNVDSGSDEFNSIRGHEFAGCIAQVGEKVKDWKVGQRVVSDNSGHVCGVCPACEQGDFLCCTEKVNLGLDNNTWGGGFSKYCLVPGEILKIHRHALWEIPDGVDYEDAAVLDPICNAYKSIAQQSKFLPGQDVVVIGTGPLGLFSVQMARIMGAVNIVVVGLQEDVAVRFPVAKELGATAVVNGSTEDVVARCQQICGKDNLGLVIECSGANIALKQAIEMLRPNGEVVRVGMGFKPLDFSINDITAWNKSIIGHMAYDSTSWRNAIRLLASGAIKVKPMITHRIGLSQWREGFDAMVDKTAIKVIMTYDFDE

SEQ ID NO: 9275 - protein, 439 aa, Salmonella enterica subsp. enterica serovar Typhi
MSKPKSNKMGVVQLTILTMVNMMGSGIIMLPTKLSEVGTISIISWLVTAVGSMALAWAFAKCGMFSRKSGGMGGYAEYAFGKSGNFMANYTYGVSLLIANVAIAISAVGYGTELFGAALTPLQIGLATIAVLWVCTIANFGGARITGQISSVTVWGVIIPVVGLCIIGWFWFSPSMYVASWNPHHVPFFSAVGSSIAMTLWAFLGLESACANADVVENPEKNVPIAVLGGTLGAAVIYIVSTNVIAGIVPNMDLANSTAPFGLAFAQMFTPAVGKVIMALMVMSCCGSLLGWQFTIAQVFKSSADEGYFPKVFSRVTKVDAPVQGVLIIVIIQTGLSLMTISPSLNSQFNVLVNLAVVTNIIPYILSMAALVIIQKMANVPSSKAKVANFVAFVGAMYSFYALYSSGEEAMLYGSIVTFLGWTLYGLVSPRFELKNKHG

SEQ ID NO: 9276 - protein, 361 aa, Arabidopsis lyrata subsp. kawasakiana
CKAAVAWEAGKPLVMEEVEVAPPQKHEVRIKILFTSLCHTDVYFWEAKGQTPLFPRIFGHEAGGIVESVGEGVTDLQPGDHVLPIFTGECGDCPHCHSEESNMCDLLRINTERGGMIHDGESRFSINGKPIHHFLGTSTFSEYTVVHSGQVAKINPDAPLDKVWIVSCGLSSGLGATLNVAKPKKGQSVAIFGLGAVGLAAAEGARIAGASRIIGVDLNPQRFDQAKEFGVTEFVNPRDHDKPVQQVIAEMTNGGVDRSVECTGSVQPMIQAFECVHDGWGVAVLVGVPSKDDAFKTHPMNFLNERTLKGTFFGNYKPKTDIPGVVEKYMNKELELEKFITHTLPFSEINKAFDYMLKGES

SEQ ID NO: 9277 - protein, 363 aa, Pseudomonas aeruginosa UCBPP-PA14
MNSSPQANAAMRAAVWHGRHDIRVEDVPLPAEPPPGWVQIRVHWCGICGSDLHEYLAGPVFIPVEAPHPLTGLKDQCILGHEFSGEIVRLGNGVTGFALGQAVAADACQHCGTCYYCRHGLYNICENLAFTGLMNNGAFAEYVNVPANLLYALPAGFPSEAGALIEPLAVGMHAVKKAGSLLGQNVVVVGAGTIGLCTIMCARAAGAAQVIALEMSSARKAKALEVGASQVLDPSRCDALGEIRALTGGLGADVSFECIGNKHTAKLAIDAIRKAGKCVLVGIFEEPSEFNFFELVSTEKQLLGALAYNGEFADVIAFIADGRLDIAPLVTGRIGLEEIVERGFEELVNNKEHNVKIIVSPGG

SEQ ID NO: 9278 - protein, 793 aa, Gaeumannomyces graminis
MLRSSAFALLAWASLSEAQFGIKHTQYGTSEPVYPSPEISGSGGWEAGLAKAKDFVAQLTPEEKANMVTGTPGPCVGNIAPVPRLNFTGLCLQDGPATLRQATYVTVFPGGVSAASSWDKDLIYKHGVLMAEEFRDKGSHVILGPVIGPRGRSPYAGRNWEGFSPTSYLAGVMAEQTVKGMQSVGVQACTKHFIGNEQEEQRNPTAVDGKTVEAISSNIDDRTMHEAYLWPFYNAVRAGTTSIMCSYQRINGSYGCQNSKTLNGLLKTELGFQGFVVSDWAATHSGVASIEAGLDMNMPGPLNFFAPTFESYFGKNITTAVNNGTLSSRRVDEMIERIMTPYFALGQDKNYPPVDGSTVSVGFSQPGFWSHEFPLGPTVDVRRNHHEHVRELGAAGSVLLKNEKGALPLKKPMNIGVFGNDAADVTRGPYMAGGPFGGVGGDCDIGTLPLGGGSGTGRYTYVFPPLEDIKARGRSYGALVQYITSNEVITSGGLVTIFPVPEVCLVFLKSWATEGEDRISLEAQWNAAVVVEKTAVLCNNTIVVIHGGAPVVMPWRNNPNVTAILAAHMPGQENGHSLVDLVWGDVNPSGKLPYTLADQATDYNKNLVNSTELVQSTDPDAWQADFLEGQLIDYKDFDAHNKTPAYEFGFGLSYTTFELSGVQVEVQASNPSRLPDPSAPIAPGGNVQLWETLATVKATVKNTGDREGATVAQLYLSLPGAEAGKDTPVRNLRGFEKVKLAPGACAEVEFALMRRDLSFWDTTAQAWRLPEGAIGVDVGFSSRDLKLKSEIKI

SEQ ID NO: 9279 - protein, 228 aa, Gossypium costulatum
FTSLCHTDVYFWEAKGQTPLFPRIFGHEAGGIVESVGEGVTHLKPGDHVLPVFTGECGNCRHCKSKESNMCDLLRINTDRGVMLSDGKTRFSINGKPIYHFVGTSTFSEYTVAHAGSVAKINPAAPLDKVCILSCGISTGLGATLNVAKPAKGSTVAIFGLGAVGLAAAEGARIAGAFRIIGVDLNPNRFEEAKKFGCTEFVNPKDHNKPVQEVLAEMTNGGVDRSVE

SEQ ID NO: 9280 - protein, 491 aa, Bifidobacterium longum DJO10A
MSTTDAPKKPRETDDVPVPATLRKSLKNRHIQLIALGGAIGTGLFYGSSESIALAGPSILLAYLVGGFAIFMIVRALSEMSVEDPKAGAFSYYATRYWSKRAGFISGWNYWFNYILVSMVELSVVGSFVNYWFPAIPTWVSAAVFLVIICAANLLGVSKFGEFEFWFAIIKIVAVIAMIIGGLAVIIFVLPTASGVRASFANWFTVGNGFFPNGLMGQNSDGSWTGLLMALVVVMFSFGGTELIGITAGETEDPKTTIPRATNDIIWRILVFYIGALGVIMAVVPWNTIDGKSSPFVQIFDSVGIHAAAGILNFVCLTAVMSVYNSGLYANSRMLYSLAKQGNAPAYLGKLNSRGVPVAGVLTSAAITAIAVVVVFVWPEFAFNYLMSIATIAGIINWTMIMLTEMKFRKVVAAGGAPEDSELAGLSGQEALDAIHFKLPFAKVTPWVVLAFLALVVVLMCFSTSYRIAVIAGVIWLAILFAAYQLTQAKK

SEQ ID NO: 9281 - protein, 249 aa, Zea mays
MGFLEDFQASVEALPSMLHRNYSLMRELDKSLHGVQLENEQRCQQEIEDIKHGLESGSITYDPAKLKFSEEAMEEQKHCVRIADEKVALATQTYDLVDAHIQQLDQFMRKLEEIRQGKEAAAAVTAGTAVATTATPTVNAGATTADANPKSGRSGERGRGGRKKAKVPTEQSVPVPVPLPPIDLELPVDPNEPTYCLCNQVSYGEMVACDNPNCKIEWYHYGCVGVKEQPKGKWYCPNCIGFQKKRKGK

SEQ ID NO: 9282 - protein, 231 aa, Escherichia coli CFT073
MMANIWWSLPLTLIVFFAARKLAARYKFPLLNPLLVAMVVIIPFLMLTGISYDSYFKGSEVLNDLLQPAVVALAYPLYEQLHQIRARWKSIITICFIGSVVAMVTGTSVALLMGASPEIAASILPKSVTTPIAMAVGGSIGGIPAISAVCVIFVGILGAVFGHTLLNAMRIHTKAARGLAMGTASHALGTARCAELDYQEGAFSSLALVLCGIITSLIAPFLFPIILAVMG

SEQ ID NO: 9283 - protein, 370 aa, Streptomyces coelicolor A3(2)
MHATFLIALYAFAGAAAAGLVGAAVLRLIRRRSLTASLAVVAAVAVLAMLAGTLAVAWAMFLSPHDLSVVTTVVAMAAVVSLATALLLGRWVVARSRELAAAARSFGDDGDYAAPSTPATAELDALSRELAATSARLAESRERERALEASRRELVAWISHDLRTPLAGLRAMSEALEDGVAADPDRYLRQIRAEVERLNDMVGDLFELSRIHAGTLVLAPARISLYDLIGDALAGADPLARRHGVRLVGDAVAAVPVEVDGKEMSRVLGNLLVNAIRRTPADGTVAVAAERSADGVVVSVTDGCGGIPEEDLPRVFDTGWRGTHARTPPAGAGLGLAIVRGIVEAHRGRATVRNIPGGCRFEVILPPAGA

SEQ ID NO: 9284 - protein, 423 aa, Halomonas elongata
MQTQILERMESEVRTYSRSFPTVFTEAKGARLHAEDGNQYIDFLAGAGTLNYGHNHPKLKQALADYIASDGIVHGLDMWSAAKRDYLETLEEVILKPRGLDYKVHLPGPTGTNAVEAAIRLARNAKGRHNIVTFTNGFHGVTMGALATTGNRKFREATGGIPTQGASFMPFDGYMGEGVDTLSYFEKLLGDNSGGLDVPAAVIIETVQGEGGINPAGIPWLQRLEKICRDHDMLLIVDDIQAGCGRTGKFFSFEHAGITPDIVTNSKSLSGFGLPFAHVLMRPELDIWKPGQYNGTFRGFNLAFVTAAAAMRHFWSDDTFERDVQRKGRVVEDRFQKLASFMTEKGHPASERGRGLMRGLDVGDGDMADKITAQAFKNGLIIETSGHSGQVIKCLCPLTITDEDLVGGLDILEQSVKEVFGQA

SEQ ID NO: 9285 - protein, 364 aa, Aquifex aeolicus VF5
MKKYKIAVLKGDGIGPEIVEQALRVLDKIGEIYGVEFEYREGLIGGEAIDKTGDPLPEETLKICKESDAILLGAVGGPKWDNLPTDKRPEKGLLRIRKELDLYANLRPAKVWDALISSSPLKEEVVKGTDMIVIRELTSGIYYGEPRGIFEENGKRYAINTMKYTEDEIRRIVRKGFEIARKRRKKLTSVDKANVLEVSALWRQIVEEEKENYPDVELEHLYIDNCAMQLVRRPTSFDVIVTGNIFGDILSDEAGVVVGSLGMLPSASIGDRYALYEPVHGSAPDIAGKGIANPIATILSAAMMLKYSFNMDKAHDLIEKAIEETLNQGYRTPDIYSEGCIKVGTKEITDKILENLERLKDAYT

SEQ ID NO: 9286 - protein, 65 aa, Glycine max
  unsure (1)..(65): unsure at all Xaa locations
IISSLFSLYSTALVGRLVALEPSLTVSILPRCITVALALSIVSXXEGKHHVLHPHLSQPLCIQQI

SEQ ID NO: 9287 - protein, 409 aa, Zea mays
MAAALQATPIKTLATSRWRVEGAEARPRPRPIAVSFRCSAAARSYNITLLPGDGIGPEVVAVAKDVLSFAGALEGVELRFQEKLVGGSALDATGVPLPDETLDEAKGSDAVLLGAIGGYKWDTNEKHLKPETGLLQLRAGLGVFANLRPAAVLPQLVDASTLKKEVAEGVDIMVVRELTGGIYFGKPRGFGTNDKGDDIGFNTEVYSASEIDRIARVAFEVARKRRGKLCSVDKANVLEASMLWRKKVTALASEFPDIELSHMYVDNAAMQLVRNPKQFDTIVTNNIFGDILSDEASMITGSIGMLPSASVGESGPGLFEPIHGSAPDIAGQDKANPLATILSAAMLLRYGLGEENAARRIEAAVTETLNHGFRTGDIYSPGTTLVGCKRMGEEVLKTVESLKEVAAVN

SEQ ID NO: 9288 - protein, 502 aa, Capsicum annuum
MEIQFTNLVAFLLFLSSIILLLKKWKTQKLNLPPGPWKLPFIGSLHHLAVAGPLPHHGLKNLAKLYGPLMHLRLGEIPTVIISSPRMAKEVLKTHDLAFATRPKLVVADIVHYDSTDIAFSPYGEYWRQIRKICILELLSAKMVKFFSSIRQDELSMMVSSIRTMPNFPVNLTDKIFWFTSSVTCRSALGKICRDQDKLIIFMREIISLTGGFSIADFFPTWKMLHDVGGSKTRLLKAHRKIDEILEHVVNEHKQNRADGQKGNGEFGGEDLIDVLLRVRESGEVQISITDDNIKSILVDMFSAGSETSSTTIIWALAEMMKKPSVLAKAQAEVRQVLKEKKGFQQIDLDELKYLKLVIKETLRMHPPIPLLVPRECMKDTKIDGYNIPFKTRVIVNAWAIGRDPESWDDPESFSPERFENSSVDFLGSHHQFIPFGAGRRICPGMLFGLANVGQPLAQLLYHFDRKLPNGQSHENLDMTESPGISATRKDDLVLIATPYDP

SEQ ID NO: 9289 - protein, 524 aa, Bifidobacterium longum NCC2705
MSQPDTDTAAQSPSSQQEPQIQTDGRRSHSEQMNQPAQTSQSESSHDGKDEHALHTNLKRGMESRHLQMISLGGVIGTGLFLSSGYTIQQAGPIGTILAYSIGALIVYLVMLTLGELSVAMPVTGSFHVYAEKFIGPGTGFVIAIQYWLTWTVALGSEFTAAGLLMQRWFPDSPTWVWSAACIILIFTLNALSVRLFAEAEFWFASIKVFAICAFIVIGLLAIFGVIPIAGYQHAPMFGNLVKDGIFPNGFMPVFATILTVNFAFSGTELIGVTAGETRDPETTVPKAIHTTLWRLVLFFIGSITVMCALIPWRQAGVGESPFVLVFNSIGIPYAGDIMNFVVLTAVLSASNSGLYASTRMVWSMGNEGMIPRWFAKTNRRGVPMLALCAAMAGGLLALLSSVIAASTVYLVLVALSGLSAVVVWIAIAYCQIVFRRRWLESGHSTSELKYRTPGYPYVSWAAFILCTASFVLVIFDVEQRFALVAELVFIVACYGAYFLQQWVRKRKKATEADDLDTLWVARD

SEQ ID NO: 9290 - protein, 125 aa, Zea mays
NNSGSSPLVPTLPQLSCIYKIFRDGPAFQETCLIHINLFECLSRGHSQNEQYQDKMRQSDERLLALVKAAMDVVVAVGLFQLAPKKVPPRVTGAFGFVTSLISCYQQLPSRAPVAKVKVLEVSPS

SEQ ID NO: 9291 - protein, 466 aa, Escherichia coli
MGQSSQPHELGGGLKSRHVTMLSIAGVIGASLFVGSSVAIAEAGPAVLLAYLFAGLLVVMIMRMLAEMAVARPDTGSFSTYADKAIGRWAGYTIGWLYWWFWVLVIPLEANIAAMILHSWVPGIPIWLFSLVITLALTGSNLLSVKNYGEFEFWLALCKVIAILAFIFLGAVAISGFYPYAEVSGISRLWDSGGFMPNGFGAVLSAMLITMFSFMGAEIVTIAAAESDTPEKHIVRATNSVIWRISIFYLCSIFVVVALIPWNMPGLKAVGSYRSVLELLNIPHAKLIMDCVILLSVTSCLNSALYTASRMLYSLSRRGDAPAVMGKINRSKTPYVAVLLSTGAAFLTVVVNYYAPAKVFKFLIDSSGAIALLVYLVIAVSQLRIGKILRAEGSEIRLRMWLYPWLTWLVIGFITFVLVVMLFRPAQQLEVISTGLLAIGIICTVPIMARWKKLVLWQKTPVHNTR

SEQ ID NO: 9292 - protein, 73 aa, Sinningia schiffneri
ISGTNGEVMPGQWEFQVGPSVGIEAGDHIWCSRYLLERITEQAGVVLSLDPKPIEGDWNGAGCHTNYSTKSMR

SEQ ID NO: 9293 - protein, 156 aa, Novosphingobium aromaticivorans
MLLVVNVASKCGLTPQYEGLEALYKARKDEGLEVLGFPANDFGAQEPGSHEEIAEFCKLNYGVSFPLFAKADVTGPGKQPLYAALTEAAPTKQGPAQEFRDRLKGYGMTPTEDPEVLWNFEKFVIGRDGEVAARFAPGVTPDDPALLAAIDAELAK

SEQ ID NO: 9294 - protein, 276 aa, Sinorhizobium saheli
WGFDGSSTNQAEGRSSDCVLKPVAVYPDPVRTNGVLVMCEVMMPDGKTPHPSNSRATILDDEGAWFGFEQEYFFYKDGRPLGFPEQGYPAPQGPYYTGVGYKNVGNIARQIVEEHLDICLAAGINHEGINAEVAKGQWEFQVFGKGSKKAADEVWMARYLLQRLTEKYGIDIEWHCKPLGDTDWNGSGMHCNFSTAYMREVGGKDYFEALMAAFDKNLHEHIAVYGPDNHLRLTGKHETAPWNKFSYGVADRGASIRVPHSFVNNGYRGYLEDRRP

SEQ ID NO: 9295 - protein, 501 aa, Zea mays
MDTVSVPVVAVANGIGEVERKVQKSYWEEHSKCLTVESMMLDSRAADLDKEERPEILSLLPSYKGKSVLELGAGIGRFTGDLAKEAGHVLALDFIESVIKKNQSINGHHKNITFRCADVTSNDLKIEDNSVDLIFSNWLLMYLSDEEVQKLVGKMVKWLKVGGHIFFRESCFHQSGDSKRKVNPTHYREPRFYTKVFKEGHSFDQDGGSFELSLVTCKCIGAYVKNKKNQNQICWLWEKVKSTEDRDFQRFLDNVQYKTSGILRYERVFGEGFVSTGGIETTKEFVGMLDLKPGQKVLDVGCGIGGGDFYMAANYDVHVLGIDLSVNMVSFAIERAIGRKCSVEFEVADCTTKDYPENSFDVIYSRDTILHIQDKPALFRSFFKWLKPGGKVLISDYCKNPGKPSEEFAAYIKQRGYDLHDVKAYGQMLKDAGFHNVIAEDRTEQFLNVLQRELGEVEKNKDAFLADFTQEDYDDIVNGWNAKLKRSSAGEQRWGLFIATK

SEQ ID NO: 9296 - protein, 329 aa, Clostridium acetobutylicum
MSILVCGGAGYIGSHTVHELIESGKEVVIVDNLQSGHLQAVNKKAKFYKGDIRDSEFLDKVFSENKIQSIIHFAANSLVGESMEKPLLYFNNNVYGMQILLESMVKHNIKNIVFSSTAAVYGEPKKIPILESDDTNPTNTYGETKLTMEKMMKWSSKAYGINYVALRYFNVAGALDDGSIGEDHNPETHLIPLILQVPLKKRPFITVFGTDYPTPDGTCIRDYIHVIDLAAAHIKAVEYLENGGKSSIFNLGNGVGFSVKEMIDAAREVTKQNIKVVLGERRSGDPAQLVASSQKAKEVLGWSPKFTNVKDIIKDAWKWHETHPNGFDA

SEQ ID NO: 9297 - protein, 328 aa, Sinorhizobium meliloti
MQNNNILVVGGAGYIGSHTCLQLAAKGYQPVVYDNLSNGHEEFVKWGVLEKGDIRDRQRLDEVLARHKPRAILHFAAMIEVGESVKDPAAFYDNNVIGTLTLLSAALAAGIDAFVFSSTCATYGLPDSVPMDESHKQAPINPYGRTKWICEQALKDYGLYKGLRSVILRYFNAAGADFEGRIGEWHEPETHAIPLAIDAALGRREGFKVFGTDYDTRDGTCVRDYIHVLDLADAHVRAVDYLLEGGESVALNLGTGTGTTVKELLDAIEKVAKRPFNIGYAERREGDSTTLVANNDKARQVLGWEPQYDLAAITESAWNWHSRRNQGG

SEQ ID NO: 9298 - protein, 644 aa, Oryza sativa (japonica cultivar-group)
MTRMRCIPGLLAGRRKKRVVADAKKASGDCPKVKPVEFIDSPAAECGDRKVAPCDVKVVVDDTVVTALAATKGGGGGDDHGGDMALAKRGSMSSDFEFEFHAHEKPDGHGVPAGASPDAVIASGKEVVVADASPKLKRSCSNIETKRPGTHDAAAEAAPARSRSYGDLGNLPGGGGGGISLETTPRGAAPQAEASPASVRTSRTADRVMLKKRSSSQVLPSRSRKLWWRLFLWSHRNLHRPSPAARPAAAACTPAGHHGGGGGYTSDTLEEGPATAAADRKNKKVMVDDSPPIPNQWVAFSADNSLHDRISAWVNSIDNDTFRIAEEDDDDHHHHHHYHGDADDDDGEHAMEHGDCVARAPRALEIGESSGKGHGKSKRSTAADEVAQANTIIQSLNAFSSVAHISGMGLKVVPMIAPFSSLRAINLSGNFIVHISPGSLPKGLHSLDLSRNKIANIEGLRELTKLRVLNLSYNRISRIGHGLSGCTALRELYLAGNKISDVEGLHRLLKLAVLDLGFNKVTTARALGQLVANYHSLRALNLVGNPVQANVGDDALRRAVTGLLPHLAYLNKQPVKPRGAAPADGAVSRAALEAGGAGGGSRSARKRSSAAAASRRLGQRGEGSGSGRSRSKGRQPSSSLPARR

SEQ ID NO: 9299 - protein, 339 aa, Vibrio parahaemolyticus RIMD 2210633
MKVLVTGGMGYIGSHTCVQMIEAGIEPIIVDNLCNAKLEVLNRIEALTGKQPAFHQGDIRDEAFLDTVFAQHDIQAVIHFAGLKAVGESVAKPLEYYDNNVNGSLVLARSMRKSGVKSIVFSSSATVYGDPEIVPITEDSPTGATTNPYGRSKYMVEQCFSDLFHAENDWSITLLRYFNPVGAHSSGSMGEDPQGIPNNLMPFIAQVAVGRREKLAVFGSDYPTPDGTGVRDYIHVMDLADGHIAALKSVGKTSGLHIYNLGTGKGSSVLEMVDAFAAACGKPVPYELCPRRPGDIAECWASTEKAERELGWKATRTVAEMTADTWNWQSKNPNGYSPA

SEQ ID NO: 9300 - protein, 216 aa, Heuchera americana
ELSVLCDADVALIVFSTKGKLFEYSTDSSMEKILERYERYSYAERQLIATDSELQGNWSLECPKLMARIEVLQRNIRQYMGQDLDPLSLRELQNLEQQLDSALKRIRTRKNQLMHESIAELQKKEKALQEQNNQLAKKIKENEKTVGENAQWQQPNQGHTSSSFMLAPALPPPSLQLPSLNIGDTFQARGVMNGDAGAQTRPSTNTLMPPWMLRHL

SEQ ID NO: 9301 - protein, 468 aa, Vibrio cholerae
MDKKLGLGSLTALVIGSMIGAGVFSLPQNMAAVASPLAVMIGWSITGIGMIFLALSFQYLAVNKPHVNSGVFGFAREGFGDFAGFCSAWGYWFSAMVANVSYLVIVFSTLGLLFDTPDQIIFGSGNTWWSIGGASLLLWAVHSLVLRGVQTAALINLITTMTKMVPLLLFIVSAIAAFNWSTFSLDFAGLHHISGADLLGQVKATMLITVWVFVGIEGAVVVSSRARQRKDIGRATILGLLTALSIYVLVTLLSMGVIQVNQLAQYPNPSMAQVLTTIIGPWGKYIIAVGLLISVCGAFLSWTVLASEAPFLAAKDKMFPRHFAKQNQAGSPVNALFLTTLCIQVSLILVRYTSSTYDSLLIFASEMILVPYFLVGAFTLKLALEQRDRGKLLLIGFGATAYGLWLLYASGLHYLMLSTLLYVPGFAFYLKAKREQGVKAFCGREMVGASTLLLFAVGAAGMLWQGAW

SEQ ID NO: 9302 - protein, 337 aa, Petroselinum crispum
ILSPFKFSRRATGDNDVRFKVLYCGVCHSDLHMVKNEWGMTTYPIVPGHEIVGRVTEVGSKVEKFKVGDAVGVGCLVGSCLSCENCDDDSENNCAKQVQTYAFTNVDGSITYGGYADSMVADQHFVLRWPENLPLDSGAPLLCAGITTYSPLRYHGLDKPGTKVGVVGLGGLGHVAVKMAKAFGAHVTVISTSESKKQEALEKLGADEFLVSSDSDQMQAATGTLHGIIDTVSALHPVVPLLGLLKVNGKLVMVGAPEKPLELPVFPLLMGRKVLAGSNIGGLKETQEMLDFAAQHNITADVEVIPVDYVNTAMERLVKSDVRYRFVIDVANTIKTE

SEQ ID NO: 9303 - protein, 618 aa, Chlamydomonas reinhardtii
MAPPAPAPPPATGRLTDYELQYIDKGSFGAVFKAVRKSDGRVYALKQVDLRSADFKNPTLDRAAAIDEARMLAQLNHPHVIRHFESFVDGEGKLNILMEYASKGSVRQLVKSYRGRPLPEEGVWRIFIQTLIGLSYLHSKKIIHRDIKSANLFIDAYDNIKIGDFGIARSLGASSNLAQTILGTPYYMAPELCQDKPYDAKSDVWALGVVMYECCMGHYPFDVENNNQVALIRKIARGVFKPVSGPYTQQLIQLITSCLTLDPRQRPDTTALLRNPSLVAKAGALKIDLNPQPASAKEDKPVYEQRGGVATAPPPQQQVGTPPRGVPGPPEHPFASPHGGGGGAPPPYPAQPSPHSPYPYQQGQIPYLPHQRPGSGRSPGPGPGDHPFSLPGGQQAPPYGAYPSPQHQQPPQQQQGGYGGGYSPPQPYGHQQQQPSPRGSPYAQQQRGYNGYGGDPYDQLAGDINRMHLRESEVARNNVERAQQVQANAHAGRMDHAKGVIYGGPQDSGPRPQRVAPEALPAAGARPTSAHAGAPFATHYPGGGSQLQTHAQASMNEAWRATYQAPQYGRRRNPELQITGPSLRSTSARGAGGGGGYARAADDATSYVSSTSYYTSAK

SEQ ID NO: 9304 - protein, 552 aa, Uromyces viciae-fabae
MSSDDVKALGGDLEKAHSIMDQEFVTEKGNGTITEDKQDGQMQRHLKPRHMSMIAIGGTIGTGLFIGSGQGLNQGGPVGLLLGYSTMGIVVYSVMVSLGEMVTMFPITGSFVHYASRFVDPALGFALGWNYWYCYAITLPTEITAAGIVIQYWTKSVNVAVWITIFLVASCGVNLFGVRWYGEAEFWCSAVKVIAIVCLIILGIIIDLGGGPNHDRIGFRYWISPGPFNQLNGIPGSTGRFLAFWSVFIQASFSYQGTEIVALAAGEALNPRKTIPKAINRVFYRILLFYVGGVTVIGLLVPYNSPDLLGGTGDATSSPFVIAIKSAGISVLPDVLNAVILAVVFSAANSDLYAASRMTFGLATDGMAPAIFSRCTSNGLPIAGLILTIGFGLLAYMNVNSSTGTVFQWLANFSSVTGLLTWWSISLAYIRFYHGLIHHKIDRNTFAYKAPYQPWLSYFSITMSTLIIFFNGFEVFMSGSWSTSKFVSAYLSIPMFIVFFITWKIYHKTAFVKIDQMDFVTGKREFDSMEQIESEKEVEPVGKFAQFLEWLM

SEQ ID NO: 9305 - protein, 424 aa, Shewanella oneidensis MR-1
MSLRLKKLQKIVPYSPLKSLKIWHLFCVVRLCSIVVTSMTAGKTPTHFTTQPLNRVLGETSGAFADLGTFLPLVLGLIALNQFSPQGIFLGFGVFAILSALFYRRPMPVQPMKVIAALVIAQGLTPGMLQASAMLMGIILLILAFSGAITWLAKQLSQAVSVGIQLAIGLQLMWMGAKMMSDFWLLGLGAFALLFASKFLPLRYLAMPLVIAAGMIWQANSQTDMATSLSIPALSASLHLAWPTLNEWSSAAILLVLPQLALTLTNAVIATSVMAQEKFPEDAAKLTPKNLAISSGLANLLLAPFGAAAMCHGAGGLAVQYHFGARTHLAPLIFGGTCLVIALFWDSQMAWLLGLIPVAILGSLLSIGGLQLAWSKRLIDGKPFCIFVILSTAVTCLAINAAAGLAVGIILEQGRRTWAMLAMR

SEQ ID NO: 9306 - protein, 267 aa, Glycine max
HASADAWAQICACDCFRHRWTGRYEAHLWDKNCWNESQSKKGRQGAYDDEEAAARAYDLAALKYWGQDTILNFPLSNYEEKLKEMEGQSKEEYIGSLRRKSSGFSRGVSKYRGVARHHHNGRWEARIGRVFGNKYLYLGTYATQEEAAAAYDMAAIEYRGLNAVTNFDLSRYINWPRPKTEENHQTIPSNENVNSNAELELGSASDEITEEGVAPSSESNPSRRTFPEDIQTIFENQDSGIYTENDDIIFGDLGSFGAPIFHYELDV

SEQ ID NO: 9307 - protein, 169 aa, Leavenworthia crassa
NTDRVGMIHDGESRFSIKGKPIHHFLGTSTFSEYTVVHSGQVAKINPEAPLDKVCIVSCGLSTGLGATLNVAKPKKGQSVAVFGLGAVGLGAAEGARIAGASRIIGVDLNSNRFEQAKKFGVTEFVNPKEHDKPVQQVIAEMTNGGVDRSVECTGSVQAMIQAFECVHD

SEQ ID NO: 9308 - protein, 214 aa, Paeonia peregrina
IVESVGEGVTDLKPGDHVLPVFTGECKECRHCKSEESNMCDLLRINTDRGVMLNDGKSRFSINGQPIFHFVGTSTFSEYTVVHVGCVAKINPEAPLDKVCVLSCGISTGLGATLNVAKPKKGSSVAIFGLGAVGLAAAEGARIAGASRIIGVDLNPKRFEEAKKFGVTEFVNPKDYNTPVQEVIAEMTGGGVDRSVECTGSIMAMISAFECVHD

SEQ ID NO: 9309 - protein, 596 aa, Neurospora crassa
MAAYGSRGGDSFGQGSSWSFREPFAVGRVPTWARARHRQEPRLRTFLDSFKRDPVRRISTHGIYAQSHPDQYQAADSSDEPPTEQNHGSHYFDLHAANVRTANTGLARELKGRHLQMIAIGGSVALGELAVAFPVAGSFSSYSTRFLDPAWGFAMGWNYALQWLTVLPLELIAASITIGYWNDQLNKAIFITIFLATVIIINLFGVKGYGEAEFVFSIVKIAAVTGFIILAAVINIGGFDDPQGNTGYIGGRYWTNPGAFHHGFKGLCSVFVSAAFAFTGTELVGLAAAETANPRKSLPTAIKQVFWRITLFYIVSLTLVGLIVPYNHERLLGNIQHYSVSDASYSPFVIAIESASIQVLPGIMNAVILIAVLSVGNSAVFGSSRTLAALADQRQAPQILAYVDRKGRPLFAILFAALVGLIGYLADLKFQSDVLNWLLAVSGLSSIFTWGSICLCHIRFRRAWARRGRSLTQLSFTAQAGITGSYVGLFLNVFVLIAQFWIAAFPIVTFTDNQSAATASPSKVAQSFFLQYLCVPIVVAFYLVYKLWFRTKIVRSDEMDLDTGRRRDVNLPVLVMREKEEVEGWPGWKRVYRFFC

SEQ ID NO: 9310 - protein, 579 aa, Nicotiana benthamiana
MLDSGKNVNFSKGKKKLFLTVVASVLLVAAVIGVVVGVKFRSNNSDDHADIQAITSAAHAIVKSACENTLHPELCYSTIASVSDFSKKVTSQKDVIELSLNITCRAVQHNFFKVEKLIKTRKGLKPREKVALHDCLETIDETLDELHTAIKDLELYPNKKSLKAHADGLKTLISSAITNQETCLDGFSHDDADKKVRKALLKGQKHVEKMCSNALAMICNMTDTDIANEQKLKGTTTNRKLREDNSEWPEWLPAGDRRLLQSSTVRPDVVVAADGSGNFKTVSEAVAKAPEKSSKRYVIRIKAGVYRENVDVPKKKTNIMFMGDGRSNTIITGSRNVKDGSTTFHSATVAAVGEKFLARDITFQNTAGAAKHQAVALRVGSDLSAFYRCDILAYQDSLYVHSNRQYFVQCLIAGTVDFIFGNAAAVLQDCDIHARRPGSGQKNMVTAQGRSDPNQNTGIVIQKCRIGATSDLRPVQKSFPMYLGRPWKEYSRTVIMQSSITDVINSAGWHEWNGNFALNTLFYGEYQNTGAGAGTSGRVKWKGFKVITSATEAQAYTPGRFIAGGSWLSSTGFPFSLGL

SEQ ID NO: 9311 - protein, 357 aa, Pinus sylvestris
MSSVLTDLLNLDLSDVTEKVIAEYIWIGGSGMDMRSKARSLSGPVSSVKELPKWNYDGSSTGQAQGHDSEVILYPQAIFRDPFRRGKHILVICDAYSPNGTAIPSNKRAAAAKIFNEKAVSDEETWYGLEQEYTLLQKDVKWPLGWPIGGYPGPQGPYYCGVGADKAWGRDIVDAHYKACLYSGINISGINGEVMPGQWEFQVGPSVGISAADELWCARFIMERITEKAGVVLSFDPKPIEGDWNGAGCHTNYSTKSMRKEGGFEVIKKAIEKLKLRHKEHISAYGEGNERRLTGRHETADMNTFSWGVANRGASVRVGRDTEKEGKGYFEDRRPASNMDPYIVTSMIAETTILWKP

SEQ ID NO: 9312 - protein, 591 aa, Thermoplasma acidophilum
MMNEDTNFGNAKLRRSLGMWDLFFLSITGMIGSGWLFAALDAADYVGPASIFTWIIAALFFFVIALTYAELSGIIPYSGSIVRFNQYSHGSMSNFLIGWAYLIGAVSTVTVEAISVVTYTSTYMPQFYNSSAGVLTPLGILVSIVLIGFFFFIQFIGVNVYGKLNTIMTAWKLAIPVITVVLIMSLSFNPRNFYVAHGFLPYGSAAIFAALIPSGVVYAFEGFRQGIEYAGEARNPQRDVPISLIAAMLATIGIYVALEIAFIGSIKWGAIGISPGDWAALSTSSWASGPFYYATKYSGVLILSVFAVVILIDAFISPFASLGVYEGTSARSFYGMARLNVIPEFFGSIHPRFRTPWVGLIFTLILSSLFLAPFPSWYLIVGINASFTVYAYLSAGITNTVIRKNAPDIHRPFRLPAASVLSPIAFVVASMLVYWSGFSIIDFLILVVYAGLPLILLSKFREKLNLSLRASIIISAVYWILIAVVGFSGYTGRLPFVYYWPLISAIPSATFAYAYLKSRSIEIVSSVWIIVYNILIGAVSYYGSLGTGVIAYPYDYAIFAVISLGIYFLAVRTGYSTEELKNLVTYGPVAE

SEQ ID NO: 9313 - protein, 483 aa, Streptomyces avermitilis MA-4680
MTSSQVDKQYDGNGAVGGDAPEEGYERGLGSRQVQMIAIGGAIGVGLFLGAGANIAKAGPSLILMYALAGVIIFFIMRALGELLLYRPVSGSFAEYSREFLGPFFGYFTGWTYWLMWVVTGMAELTAAAIYVHYWFPAVPQWVTALVFLVVLFVANLISVKLFGEIEFWFSMVKVTALIGMIVIGLGVLTFGFSSAGDTASVANLWQFDGFFPKGIGSSLMTLQGVMFAYLAVELVGVTAGESEDPEKTLPKAINTLPWRIALFYVGALTVILCVVKWTEFAPGVSPFVKAFAMIGIPAGAGIVNFVVLTAALSSCNSGMYSTGRMLRTLADNGEAPRVFSKLSASKTPAFGITISVLFMGIGVILNYVVPEKAFGYVTSVATAAGIWTWLMILVSHVLYRRAVDAGRLPASSFPAPGGAKCSWVAIVFLLFVTGLIAYDADSRVCLYVMAVWAAALAIGWYVLKARNPQVAERHEPKFEKVG

SEQ ID NO: 9314 - protein, 296 aa, Streptococcus pyogenes MGAS8232
MLGPFIFIAFGVIVILAIVASTLYVVRQQSVAIVERFGRYQKTATSGIHVRLPFGIDKIAARVQLRLLQSEIIVETKTKDNVFVTLNVATQYRVNEQNVTDAYYKLMKPESQIKSYIEDALRSSVPKLTLDELFEKKDEIALEVQHQVAEEMSTYGYIIVKTLITKVEPDAEVKQSMNEINAAQRKRVAAQELANADKIKIVTAAEAEAEKDRLHGVGIAQQRKAIVDGLAESIQELKEANISLNEEQIMSILLTNQYLDTLNTFAAKGNQTLFLPNTPSGVEDIRTQVLSALKTK

SEQ ID NO: 9315 - protein, 383 aa, Glycine max
MATIPITYNHAWTFSHPHHALSRFLSPCNFSRITFSRRKYGVGGPAPSSPLSHFRVFCQSKTEILEIRKCSPFLESSLLLGNGGVASDEWKAVPDIWRSSAEKYGNNVALVDPYHDPPTTMTYTQLEQAILDFAEGLRVIGVRPDEKLALFADNSCRWLVADQGMMASGAINVVRGSRSSVEELLQIYNHSESVALVVDNPEMFNRVANTFYSRTSMRFIILLWGEKAELVGQENKHVPVFTFMEVIDLGRQSRRGQRYIYEAINTDSIATLVYTSGTTGNPKGVMLTHRNLLHQIKNLWDIVPAEAGDRFLSMLPPWHAYERACEYFIFTCGIEQVYTTVRNLKDDLQRYQPQYLISVPLVFETLYSFLVLEYGVLCQKQHF

SEQ ID NO: 9316 - protein, 269 aa, Triticum aestivum
MARWAIAIHGGAGVDPNLPEHRQEEAKRVLARCLQVGVDLLRAGAPPLDVVEAGVRELETDPCFNSGRGSALTRAGTVEMEASIMDGRGRRCGAVSGVSTVKNPVSLARRVMDKSPHSYLAFDGAEDFAREQGLEVVDNSYFITEENVGMLKLAKEANTILFDYRIPLAGADTCSALAAAVEGHGSNGMVMNGLPISIYAPETVGCAVVDSNGFTAAATSTGGLMNKMTGRIGDSPLIGAGTYACGHCAVSCTGEGEAIIRSTLARDVA

SEQ ID NO: 9317 - protein, 267 aa, Burkholderia fungorum
MSITQRNNIRISGSGKRTMVLAHGFGCDQSMWRYLAPSFHGEYRTVLFDHVGSGSSDLSAYDTDKYDSLQGYADDLIEIIREVAEGPVVFVGHSVSAMIGLIASLDEPALFRAHIMVGPSPCYVNDGDYTGGFSREDIDDLLRTLESNYLGWSSTMAPAIMGAPEQPELGVELTNSFCRTDPEIARQFARVTFLSDHRAILSRATTPTLILQCSDDIIAPRVVGEYMHRMMPGSTLHLIENVGHCPHLSSPGASAAAMSAFLGPMSP

SEQ ID NO: 9318 - protein, 122 aa, Glycine max
  unsure (1)..(122): unsure at all Xaa locations
YGFYVLSPGALLLAMEYADEGGTSISCDPGPRGTSLSTGTPDAQRALNQALTMSDGLVLTPEEAEELTCIHDPILAGQEXLKRGIRTKWEHRKMGSKGSILITASSVARAPAFKVNAIDTEG

SEQ ID NO: 9319 - protein, 512 aa, Zea mays
MRIFELLDQKDRDRLFSEAGIPLQYTRNAGPTSSAEVTCNVCYDDVPPSGALEMDCGHSYCNDCWTEYFIVKINEGQSRRVRCMAPKCNAICDEAIIRKLVIARHPDIAERFERFLLESYIEDNDTVKWCPSTPHCGNAIRVKGDIYCEVECTCGCQFCFNCSLRAHSPCSCMMWELWIKKCRDESETVNWITVNTKPCPKCHKPVEKNGGCNLVACICGQAFCWLCGGATGRDHTWSTISGHSCGRFTDDQTKKTEQARRDLYRYMHYHNRYKAHTDSLKQEAKLKNEIQGKISISENKESKIKDYSWVINGLNRLFRSRRVLSYSYPFAFYMFGDEIFKDEMTPEERELKQNLFEDQQQQLEFNVERLSGFLEKDFQLFTDDEVMDTMKHVINLSNVVDRLCKQMYQCIENDLLYPLRTPHNIAPYKSKGIDRASELNISWDPGEQSSQSTKHSQDEHRNKQASNILGKRTHELHGSSSSNKRERVDANGGGGGGALFDLNVPAEVVDKI

SEQ ID NO: 9320 - protein, 260 aa, Thermoplasma acidophilum
MMERIMWYGSGKRLFKNLDQDYIRIFKDLREGRIPELDGMGEIPDLRKLLIEYGKERIREEFTPDQALIKVAAVRNAMDEIINKYYEKCLPFSIPYGISQSGDPCQFFRNGLSFPDISAIFRKGTEMCDFRSQMDDAIRTRIKEIMPNTADLVGPKLAMDLLERSRGLRRLALMPASSIQMLGAEKALFQSLGQGKKNPKYGVIFKFPGLSALNPKARGRIARIIANKVAITARADLLGTHVDSRSMREDIEEKIRKVKK

SEQ ID NO: 9321 - protein, 425 aa, Triticum aestivum
  unsure (1)..(425): unsure at all Xaa locations
IRERKIPTGTRRAAPGEQQVARGDGGAAPDAEIHTGAQNPQRNRADSARSGRESATDGDRRRWRWGRGWGRRGAGXSVLVTGGAGFIGTHTVLQLLEKGYAVTVVDNFHNSVPEALDRVRHIVGPALSARLQFIFGDLTIKDDLEKXVFAAKTYDAVIHFAGLKAVAESLAHPXMYNRNNIVGTVNLYDVMKKHGCNKLVFSSSATVYGQPEKVPCFEDSPLKALNPYGRTKLYLEEMLRDYQHANPEWRTILLRYFNPIGAHESGDIGEDPKGVPNNLLPYIQQVAVGRRPELNVYGHDYRTRDGTAVRDYIHVVDLADGHIAALEKLFATPDIGCVAYNLGTGRGTTVLEMVSAFEKAYGKKIPVKMCPRRPGDSEQVYASTAKAEEELGWRAKYGIEEMCRDQWNWAKKNPYGYCGNAENKD

SEQ ID NO: 9322 - protein, 239 aa, Triticum aestivum
MASLGLPGPSSYHDLCCYGAGIAGNIFAFVLFISPLPTFRRIVRNGSTEQFSATPYIYSLLNCLVCMWYALPFVSYGVVLVATVNTIGAAFQLAYTAVFIAYADAKKRLKVSVLLAGVFCVFGLIVYVSMALFDHKPRRTFVGYLSVASLIFMFASPLSIINLVIRTKSVEYMPFYLSLSMSLMSMSFFAYGALLDDFFIYVPNGIGTVLGVMQLLLYAYYSRKGSRDEARRPLLVTHT

SEQ ID NO: 9323 - protein, 397 aa, Zea mays
MDGGDAPAAGGGKVACAAWIRRREDKSAAAPARVFAAYGRAGAAGSPAALEVLGFDAKECSLSPSPLARAVIGDGGAGDAPRGIAVHPAGDELVCATAKGCRLFKLIFDEFTVRIIPRDAPLLESVGPQKCLAFSTDGAKFAIGGEDGHLRIFHWPSIKVLLDEPKAHKSFRDMDISLDSEFLVSTSIDGSARIWKIDEGAPLVNLTRSSDEKIECCRFSRDGMKPFLFCTVAKGPKVVTVVWNISDWERIGYKRLLGKPISTLSVSLDGKYLALGSHDGDFCAVDVKKMEVSHWSKKVHLGSPVTSIEFCPSERVVISTSHQWGAELTKLNVPADWKEWQVWLVLLALFLASAVLFYVFFERSDTFWNFPMGRHQPAKPWNVLKESPPVPEDQTPW

SEQ ID NO: 9324 - protein, 231 aa, Triticum aestivum
  unsure (1)..(231): unsure at all Xaa locations
MSRLAAAALRGALTASGARSCSILVAFSPASSRLFSTDASGAVTGSQVDSSYGEGPTYGSFYTKISGVGRLXKFMLKTDVIHYLDQFRLTMDDVMNGLEQVGLDAMGDLIXVIHKVYCHLESIETLKLMTWNVSWPARVSHDEWEXRISLNGKAVLLQGVPRNAQVDDIERFLCGTNYEPPPFENFIRAGVPEPVRMVLVKFGSRTDATNAFIAKNKGFCLNNPVTVRVIQ

SEQ ID NO: 9325 - protein, 341 aa, Salmonella enterica subsp. enterica serovar Typhi
MKVKAVFINKPGEVETRWVDYPHKKENEVLIKVDAAGICGSDIGAFRGTNPLVTYPRIIGHEVTGIVLQEGTGMPDNIKKGDRVIVDPYIYCGHCYPCSVGRTNCCENLNVIGVHIDGAMQEVVTHPAHLIHKIPDNVPSEMAPLAEPLTIALHALHRANVKAGEYVAIIGAGAIGLMAALSARHYKATPILIDIVEERLRYAQKLGVPYVLNAADDQVIDAIKNITHGTMAQVVIEASGANSAIRNTLDLASFAGRISFTGWPKQETSLPTNLITYKELDLRGSRTSAGEFDEALRMLSTLEINPQDVVSKVVNLDEIPDAVKELDRYPERYLKINAVFH

SEQ ID NO: 9326 - protein, 387 aa, Ceriporiopsis subvermispora
MAFTSLLALVALAAITRAAPTTICPDGTRVSNHVCCDFIPLAQALQSTLYMGDCGEDAHETIRLTFHDAIAISQSQGPSAGGGADGSMLIFPTVEPFFHANAGIDDSVNNLIPFLDKFPTITAGDLIQFAGTVALSNCPGAPQLEFLAGRPNATAPAVDGLIPEPQDNVTHILERFADAGGFTPFEVVSLLASHTVARADKVDLTIDAAPFDSTPFTFDTQIFLEVLLKGVGFPGTDNNTGEVESPLPLGNNKQGGNETGEMRLQSDFALARDDRTACFWQGFVNEQEYMMSSFKAAMSKLAILGHNRNDLIDCSEVVPTPKPPVGKPASFPATTGPQDLQLTCKSERFPSLTIDHGAQETLIPHCSNGGQDCPTVQFTGPAGEDDS

SEQ ID NO: 9327 - protein, 526 aa, Candida maltosa
MTSDSTIHELIQSYITKWYVIVPLAIIIYKVFDYFYVLSLRKRLGAAVPTNEETDGYFGFHLPFVLMSKKKDGTIIDFSIERYPELKHPETPTFEFPIFTVKLISTIDPENIKAILATQFSDFSLGTRHAHFAPLIGDGIFTLDGAGWKHSRAMLRPQFAREQVGHVKLLEPHVQVLFKHIRKNKGREFDLQELFFRFTVDSATEFLFGESVESLRDASIGMTSKSKDVDGIEDFTGAFNYSQNYLASRSIMQQFYWILNGKKFRECNAIVHKFADHYVQKALNLTEADLEKQAGYVFLYELVKQTRDPQVLRDQLLNILVAGRDTTAGLLSFVFFELARNPDVVAKLKDEIDTKFGLGEDARIEEITFESLKQCEYLKAVLNECLRLYPSVPQNFRVATKNTTLPRGGGKDGLSPILVRKGQTVMYSVYATHRMESVYGKDATTFRPERWFEPETRKLGWAFVPFNGGPRICLGQQFALTEASYVTVRLLQEFSTLTLDPNLEYPPKKMSHLTMSLFDGTNVQMY

SEQ ID NO: 9328 - protein, 502 aa, Ceratodon purpureus
  unsure (1)..(502): unsure at all Xaa locations
KSVGQSAESVPAGAVTAYLQRMQREGLIQNFGCMVAVEEPNFCVIAYSENASEFLDLIPQAVPSMGEMDVLGIGTDIRTLFTPSSSAALEKAAATQDISLLNPITVHCRRSGKPLYAIAHRIDIGIVIDFEAVKMIDVPVSAAAGALQSHKLAARAITRLQALPGGDIELLCDTIVEEVRELTGYDRVMAFKFHEDEHGEVVAEIRRMDLEPYMGLHYPATDIPQASRFLLMKNRVRLIADCYASPVKLIQDPDIRQPVSLAGSTLRAPHGCHAQYMGNMGSIASLVMAVIINDNEEYSRGAIQRGRKLWGLVVCQHTSPRTVPFPLRSVCEFLMQVFGMQLNLHVELAAQLREKHILRTQTLLCDMLLRDAPIGIVSQTPNIMDLVKCDGAALYYGKRVWLLGTTPTENQIKEIADWLLEHHNDSTGLSTDSLADANYPGAHLLGDAVCGMAAAKITAKDFLFLFRSHTATEVKWGGAKHDPDEKDDGRKMXPRSSFKAFL

SEQ ID NO: 9329 - protein, 186 aa, Nostoc sp. PCC 7120
MSINLQLETPRLLLREFQNSDKVAFAAYRSDPGTAKYQSWDTPYSEAQAEAFIESLQHLTSSILGEWYQLAIELKSTRQIIGDCAFCILAEDGKQGEIGFTLARKYQGNGYGTEAVIFLLNYLFNHLNLHRVRANCDPENLASIKLLERVGMRLEGRFIKSLWFKNNWVDEMWFAILQDEFTAVNV

SEQ ID NO: 9330 - protein, 345 aa, Oryza sativa (japonica cultivar-group)
MALIREKRFSQMNLSLHVPSRVPFQDAAAAARRQCPPPVAAASTSSTPASRASQFRLADFERVAVLGRGNGGTVYKVRHRETCALYALKVQHSAGGGELAGVEADILSRTASPFVVRCHAVLPASASASGDVALLLELVDGGSLASVAARAGAFPEAAVAEVAAQALSGLACLHARRVVHRDIKPGNLLVSVDGEVKIADFGIAKVVPPRRGGEHRAAYEYEGTAAYMSPERFDSELHGDGADPFAADVWGLGVTVLELLMARYPLLPAGQKPSWAALMCAICFGELPPLPDGAASPELRAFLAACLHKDHTKRPSAAHLLTHQFVAGRNVAASKLALRRLVAGA

SEQ ID NO: 9331 - protein, 2640 aa, Planktothrix agardhii
MFKHSISSGGQLKDNWRTLSAVLANAAKYENQGIPYIGNDVTEYFQTYQDLYNDALNILDGLDQRGIKLGDKVILQIAKNKDFIPALWACFLGGIIPVPLTVAPHYELENSAVKKLENVWKILEQPLILSDNELITEIQKLETQSHLKGLQVVSIDYLRSIESQSNSQPDKTSKKCYSLPDLTPENQALLLFTSGSTGMPKGVMLTHNNLLSMSAGTVAMNNFSQQEVTLNWMPLDHAGAIVFLGIMAVDLACDQIHVPMELILRQPLKWLELIQNHQATISWAPNFAFSLINQQSEQLNQSSYNLSSMKFLVNAGEQVSIKTIRLFLEILEKHQLPDRAIKPAFGMTESCSGITWSVGLSQDKLTEENIIISLGKPIPGATIRIVDQENNVLPEAEIGRLQIKGKSVTKEYYHNPELNQEVFQDEGWFTTGDLAYLLDGELFITGREKQEIIINGINYFAHEIETVIEELEGVNVSYTAAFALFDQIQETDLLIIIFSPESEHFEQWVKVVRKIRSHLTQKVGIAPAYVIPLETNLVPKTSIGKVQKSKLKKDFEQGLFAGRIQEINQYLESDRQKNRSLPQSENERQIATVWCEVLQLTSVGLNDNFFELGGHSLHLIRVHNQLEKLFNRQLPIAEMFKNSTVATLARFLSKESNSTPATQQKSRQRAENRSRRQQETHDIAIIGMAGRFPGANNLTTFWENLQNGVETISFFTEEELLESGVSPELFNQPNYIRARPIIDQVEYFDSEFFGYTNREAELLDPQQRLFLQSSWECLENAGYNPNSYQGAIGIFAGASMNTYLINNCYPNRGQLDSNDELQPFTLDSMGGFQTMVANDKDYLTTRISYKLNLRGPSINIQTACSTGLVVVHLACQSLINGESDMALAGAASINSPQKIGYLYQEGLILSNDGHCRAFDSQAQGTIFGSGVGVVLLKRLPDALADNDQIYAVIKGSAINNDGGTKLGFTAPGGEGQISVAAEALAFAGVDANTISFIEAHGTGTTLGDPIEVDALAKAYGAANQGECALCSGKTNIGHMPIASGCGLIKATLALKHQIIPPTLHFQNPNPQIDFSKTPFYINTEAIPWKTKQQNGQELPRRAGVNSLGIGGVNAHIILEEAPTIIPQQNQTKRPINLLTISARTPQALKDLANSYVEFWENHPESDISDVVFTANTGRVHFSNRLAVIGSENSDFITKLRQFGQLDQGLIIQGQVDEKQPPKIAFLFTGQGSQYAGMAHQLYQTQPTFRQTLEQGESIYQKLTGKSLLEIIFANSDEILTQTSYTQPALFIIEVALAQLWQSWGIEPIAILGHSLGEYAAACFAGVFDLESGLKLVINRGRLIGQFPDNQGAMAAIFLDQKSVLEQCQNQGIKIAIAAINTDQHTVISGDKKSIQQLCEHFNNTGIKVRQLKVSHAFHSPLIEPICEQFKTILQEITFAQPQIPLISNLTGEIADDSIITPEYWLQHLLHTVQFHQGVLSLQSLGCDTFIEIGPQPILLGIIQSSISSSNPLILPSLRSGFSDWEVLLESLGKLYVRGLDIDWFSFNKDYHCSRCSLPTYPFQQSRHWIPLKTQLPTVTQESSLVKMLSNKNTKSLMQTLLETGNYSETEKQTVSAIVQQLIQLHHQQTNNFDFENLLYQVKWFPDNLATQKSENLATIQADLDVYMEKQIQFASLTGVSLAFAEMEKLSVDFIIKALKDLELFQLNTLLSPDDSFSQAGIKAEYKLLWNHCFKILAETGILEKQDSGWKIINKPQQSHPDLTVENLINQYPNALIELTLFQRVAANLAAILTGKIAPLSILFSQNEKIGAAEFYKNTSWAKVLNLSISKAVELLLSNYSPSEPLRILEIGAGTGATTHQVLNACKSDQINYTFTDVSPFFLETARENFTQFPNINYQVLDIEKDPKSQGFSLNSYDLIIAANVLHSTRDLQAETLPHIQSLLRPGGQLLLLELTHQSKWIDLIFGITQGWWRFSDDHLRSHHPIISASTWQSILLKSGFAQAEFVSPDQKIGSALFQQSIIIAQNPRQASNISENWLIFTDSHPEKDHLPRFIQAQLSKNYGSCTIIYQGQNKIKLSQFEYSLNAHQPEQIKAWFAENPSPHRIIYLLNDNHQDQPESILLNRCHYLLNLLQAIQKIPNSPKLFVVTQGGQPFELKQPTFVTQSPLWALGRVISLENPELWGGMIDLDPSADITQNIADLLLGLTHSISEDHLLFRNGQAYLGRLVPSTSPPTKPLTIQAEATYLITGGIGHLGLALAGHLVDLGAKHLILTTRRPFPPSSEISTEFAKIMENLRILEQKGVSVEVCQADVGDFEQIQAIWAKIEKTAYPLRGVFHLAGVSGRQAQLSECTFADLEIVFQAKVRGSWNLHRLSLATKLDYFVLFSSAGAIWGAKAQGLYDAVSNSMDSLALMRHLQGLPATTLNWALLAGNGIVSPDYEDWLKQIGMKEIDLDRAFSVMDAIIESNQTQILVADVDWVRFKNIYEFQGDKPLLKKLGQSQNIIKSVQDSSSTRRLLEDIAPGERREHLFQYIGKQVGMILGIKQMPDPEQGFSEMGIDSLLSIELKNRLEKGLEVTLPASLVFDFPNIRRLVDYLIQQVLGWQVQTIVQTTVDSTEVQQDVDADLILRELSELEDFLSD

SEQ ID NO: 9332 - protein, 440 aa, Ferroplasma acidarmanus
MKDKKFISVPVATAVGLGAIIGAGIFVLSGTTIALAGANALIAFVLVGVLAIIIAMELGELGSIMPHAKGASFSYIYEAFGSEMGFITGILLYFSFSTAIAAIALGFGSYLGSLVGLHTGYYPIIFAIILIFVLAIVNIVGIKKAAKADFYLVMVKLAILTIFVIAAVILAYTTKSLNTSNFVTPVAKDNISAIFAASIAVFFAYSGFQSISTFTSDIKGGANKAAKAIILSVLISMVFYILVVLALILMVPASKYTISADPLAFALKYVHAPYSIYALVTIGALIATTSATLAMIMTSSRILYQIGDNKLLPKFFRKFNYKKDVSVNGVIISSLIGIVMLFSGNIYIIAAISNFGLLLSYLVASFAIIHFRRIKKFGSFKTPLYPFTIIAGIILLIVFILGMPREALDIGVVIILLLFMLYYFFIELRRDKVIKEELFK

SEQ ID NO: 9333 - protein, 301 aa, Solanum tuberosum
MNKGATGNQQLELPAGFRFHPTDDELVQHYLCRKCAGQPIAVSIITEIDLYKFDPWQLPEKALYGEKEWYFFSPRDRKYPNGSRPNRAAGTGYWKATGADKPVGKPKTLGIKKALVFYAGKAPRGIKTNWIMHEYRLANVDRSAGKNNNLRLDDWVLCRIYNKKGTLEKHYNVDNKETASFGEFDEEIKPKILPTQLAQMPPRPRSTPTNDYFHFESSESMTRMHTTNSSSGSEHVLSPCDKEVQSAPKWDEDHRNTLDFQLNYLDGLLNEPFETQMQQQSCNFDQFNNFQDMFFYMQKPY

SEQ ID NO: 9334 - protein, 256 aa, Chloroflexus aurantiacus
MDFQGKIAIVTGGAQGIGRATALALAREGAAVVIADRDEAATTALVSGINAWGGRALAVIADVSDEADAARIANETVLTFGGIDLLVNNAGIQQPGTIESTTVQLWQEIIAVNLTGVFLVSRFVMPELRRRGGGAIVNVASVYGLRAEAGWAAYSASKGGVIALTRAMALDGAADGIRVNCVCPGMIDTSLLRANAALLNAQRPDEALRSFARRVPLGRLGTPEEVASVILCLLSPTAGYLTGAVITADGGWEARL

SEQ ID NO: 9335 - protein, 363 aa, Vibrio cholerae
MTDRDYKIAVLPGDGIGPEVMAQAHKVLDAIEQKHGIRFSREEHDVGGIAIDNHGCPLPESTLRACEEADAVLFGSVGGPKWEHLPPNEQPERGALLPLRKHFQLFCNLRPAQIHQGLEAFSPLRADISARGFDIVVVRELTGGIYFGQPKGREGEGAHEKAFDTEVYHRFEIERIARIAFESARLRRKKVCSIDKANVLQSSILWREVVSEIAKEYPDVSLSHMYIDNATMQLIKDPAQFDVMLCSNIFGDILSDECAMITGSMGMLPSASMNESKFGLYEPAGGSAPDIAGKNIANPVAQILSAALMLRYSLGEEAAARDIENAVSQALAAGELTADLAGSKPALSTSAMGDKIASYILNS

SEQ ID NO: 9336 - protein, 360 aa, Cytophaga hutchinsonii
MEKKIAVLKGDGIGPEVTDQALKVLKAVEKTFGHKFHYTEALVGAVAIDATGNPFPEETLKVCQSSDAILFGAIGHPKYDNDPKAKVRPEQGLLAMRKALGLFANIRPVNTYKILENASPLRADLVQNVDFVVFRELTGGIYFGTRGRSEDGNMAFDTCTYTRDEILRISKLAFESARQRKNHVTLVDKANVLASSRLWREVVKEYHAANFADVTLDFMFVDNAAMKIIQQPAFFDVVLTENMFGDIITDEASVITGSMGMLPSASVGSVVGLYEPIHGSYPEGAGLNIANPNGAILSAALLLETSFGMVAEAKAIRAAVEKAMEDGILTIDIRREKPNSTTEVGDYVANLVAKGASVVA

SEQ ID NO: 9337 - protein, 358 aa, Lotus japonicus
MVDHRILFLLFVFFLFFSNVSSSDGVDPMICQVVDDEGLGAEHHFLEFKRRFGKVYATEEEHGYRFNVFKSNMHRARRHQLLDPSAVHGVTQFSDLTPMEFQHSVLGLRGVGLPSDADSAPILPTDNLPKDFDWRGHGAVTPVKNQGSCGSCWSFSATGALEGAHFLSTGELVSLSEQQLVDCDHQCDPEEAGSCGSGCNGGLMNSAFEYILNNGGVMREEDYPYSGTNGGTCKFDKAKIAASVANFSVVSRDEDQIAANLVKNGPLAVAINAVYMQTYVGGVSCPYVCSKKLNHGVLLVGYGSESYAPIRMKQKPYWIIKNSWGENWGENGYYKICRGRNICGVDSMVSTVAALHTT

SEQ ID NO: 9338 - protein, 417 aa, Bifidobacterium longum DJO10A
  unsure (1)..(417): unsure at all Xaa locations
MKALVLTGVKEFEIQDLPTPEIQPNEVLINTAYAGVCGTDHDLYAGRPGSAAAVPPIVLGHENSGVVAAIGSEVTGVKVGDRVAVDPNIYCGQCEYCLTQRPELCDHLSAVGVTRDGGLAEQFTAPATVVYKLPDNVSLKDAAAIEPISCAVHGVDLLKLRPYQKALVIGDGFMGQLFAQIVQAYGVHQVDLAGIFDEKLKRNQELFGVTNVYNTTREAIPAESYDVIIEAVGLPATQAQAVAAAKKGAQVLMFGVGPQEAHFEMNTYDIYKKQLTIQGSFINPLTFKDAISLLESGKMNVAPLISHELGLEEVQDFLDGKIQGXXXXXXXXXXXXXXXXXXXXXXXXXXXXXXXXXXXXXXXXXXXXXXXXXXXXXXXXXXXXXXXXXXXXXXXXXXXXXXXXXXXXXXXXXXXNP

SEQ ID NO: 9339 - protein, 350 aa, Bacteroides thetaiotaomicron VPI-5482
MLAYTYIEHGKFELREKPEPKITDARDAIVRVTLGSICTSDLHIKHGSVPRAVPGITVGHEMVGVVEEVGAEVTSVRPGDRVTVNVETFCGECFFCHHGYVNNCTDPNGGWALGCRIDGGQAEYVRVPYADQGLNRIPDTVSDEQALFVGDVLATGFWATRISEITEKDTILLIGAGPTGICTLLCSMLKNPKRIIVCEKSPERIQFVREHYPDVLITTPENCKEFVLQNSDHSGADVVLEVAGTEDSFRMAWDCARPNAIVTIVALYDKPLLFPLPEMYGKNLTFKTGGVDGCDCAEILSLIEEGKIDTTPLITHRCSLNEIEEAYRIFENKLDGVIKVAIVCQTESNK

SEQ ID NO: 9340 - protein, 376 aa, Coix aquatica
ALSIAGAVQSQKLAVRAISRLQALPGGDVKLLCDTVVEHVRELTGYDRVMVYRFHEDEHGEVVAESRRDNLEPYLGLHYPATDIPQASRFLFRQNRVRMIADCHATPVRVIQDPGLSQPLCLVGSTLRSPHGCHAQYMANMGSIASLVMAVIISSGGDDEQTSRGGISSAMKLWGLVVCHHTSPRCIPFPLRYACEFLMQAFGLQLNMELQLAHQLSEKHILRTQTLLCDMLLRDSPTGIVTQSPSIMDLVKCDGAALYYHGKYYPLGVTPTESQIKDIIEWLTVCHGDSTGLSTDSLADAGYLGAAALGDAVCGMAVAYITPNDYLFWFRSHTAKEIKWGGAKHHPEDKDDGQRMHPRSSFKAFLEVVKSRSLPW

SEQ ID NO: 9341 - protein, 698 aa, Candida albicans
MTSLQQQQQQQRVKYGPPHHIKRRPYHPILESLEFQTNQHLIQEYSLDIVNTLSQLESLTLVNPAMIDLQPEIQWFMRPFLLDFLIELHSSFKLQPTTLFLCLNIIDRYCAKRIVFKRHYQLVGCTALWIASKYEDKKLRVPTLKELTIMCRNAYDEEMFVQMEMHILSTLDWSIGHPTLEDCLQLAIDLNNLSNNTTNDIENKSVRPNRKSSISSAVTAVARFLCELSLYDKYFLSVPPSLIAITANLLSCSMLQIPHASITLKNLIEQEIINPQQKKQKKAFSSNSSRTTTASYTHQNQLDVRHSSFDEDIDLDSGDEGDDDEDYIDEFYETNNYDDTNATTFDESINKSTTINDENQPPQIHTPFLSGLDEDSILSIKKICLMLIIQLSKVTEVLSKKYENLGVIQVINNFHSNYKFIIQSIYENQELLLNTINDSTNNNEIDYKLIQSSEILLQFPKFDEYLTEDEDENVSTDDEANSQPQGYDGSGSDGNNQLFTPKSPNAFSSNSSLTLNNHPQSMVPVTPPSATSQYSLFSNKNNRTHESTSGLNSTCNTPTHISISSFAPPQPPPGSILKPKLTSINSTNSLKIKKLTSNSNSSNINIHHGHHNTKQEKRYSHISIGSNSSSKYDGFSPIKSISTNGSLITNNGSFTNIVNNTNSSSPLMNQQQQYYHQQQHQQQVTQSSLYQHHHQYHQ

SEQ ID NO: 9342 - protein, 270 aa, Triticum aestivum
MVLCQGLSAGQGQLLAFPAAKPPLLRRSCIRIPAGSPGLKSARLSSKRKKLSVQAVRAGTGFLHHDMLTSSLMEGSIKGIPSLLTRQNQRRRSEVGCRASSLASFSYPELTSKPRWWWRTLACVPYLLPLHNMWSYADVIYQLHTYLQGFSLVYTFIDTMTLLPGWLLLVIFMTVYFFVVRRKWSPHFMRFHVILAILLDTGSQAVATMCTWMPSFVYQGKPMQYFWMAVAFMQIFTVLECMRCALCGMYPNVPFISHTAFIHSDLNLFR

SEQ ID NO: 9343 - protein, 499 aa, Solanum melongena
IFTAFSLLFSLFIFLLTRKPKSKTPNLPPGPPGWPIVGNLFQVAGSGKQFFEYIRDLKPKYGSIFTLKMGSRTMIIVASAELAHEALIQKGQIFASRPRENPTRTIFSCNKFSVNAAVYGPVWRSLRRNMVQNMLSPSRLKEFREFREIAMDKLIERIRVDAKENNDVVWALKNARFAVFYILVAMCFGVEMDNEEMIERVDQMMKDVLIVLDPRIDDFLPILRLFVGYKQRKRVNEVRKRQIETLVPLIEKRRSVVQNPGSDKTAASFSYLDTLFDVKVEGRKSGPTNAELVTLCSEFLNGGTDTTATALEWGIGRLMENPTIQNQLYQEIKTIVGDKKVDENDIEKMPYLNAVVKELLRKHPPTYFTLTHSVTEPVKLAGYDIPMDTNVEFFVHGISHDPNVWSDPEKFDPDRFLSGREDADITGVKEVKMMPFGVGRRICPGLGMATVHVNLMLARMVQEFEWFAYPGNNKVDFSEKLEFTVVMKNPLRAKVKLRI

SEQ ID NO: 9344 - protein, 465 aa, Phaseolus vulgaris
MATIHRLPSLVFLVLLALGVCSARRALLTLDAGYGLGHGTGGGYGGAAGSYGGGGGGGSGGGGGYAGEHGVVGYGGGSGGGQGGGVGYGGDQGAGYGGGGGSGGGGGVAYGGGGERGGYGGGQGGGAGGGYGAGGEHGIGYGGGGGSGAGGGGGYNAGGAQGGGYGTGGGAGGGGGGGGDHGGGYGGGQGAGGGAGGGYGGGGEHGGGGGGGQGGGAGGGYGAGGEHGGGAGGGQGGGAGGGYGAGGEHGGGAGGGQGGGAGGGYGAGGEHGGGAGGGQGGGAGGGYGAGGEHGGGAGGGQGGGAGGGYGAGGEHGGGGGGGQGGGAGGGYAAVGEHGGGYGGGQGGGDGGGYGTGGEHGGGYGGGQGGGAGGGYGTGGEHGGGYGGGQGGGGGYGAGGDHGAAGYGGGEGGGGGSGGGYGDGGAHGGGYGGGAGGGGGYGAGGAHGGGYGGGGGIGGGHGGNVP

SEQ ID NO: 9345 - protein, 317 aa, Zea mays
  unsure (1)..(317): unsure at all Xaa locations
MTRRCSHCSHNGHNSRTCPNRGVKIFGVRLTDGSAIRKSASMGNLSLLSAGSTSGGASPADGPDXPTAGGGYASDDFVQGSSSASRERKKGVPWTEEEHRRFLLGLQKLGKGDWRGISRNFVVSRTPTQVASHAQKYFIRQSNMSRRKRRSSLFDMVPDESMDLPPLPGSQEPETSVLNQPPLPPPVEEEEEVESMESDTSAVAESSAASALMPESLQPTYPMIVPAYFSPFLQFSVPFWPNQEDGGDLPQETHEIVKPVAVHSKNPINVDELVSMSKLSIGEPGQETVSTSLSLNLLVGQNRQSAFHANPQTRAQA

SEQ ID NO: 9346 - protein, 270 aa, Azoarcus evansii
MTTTLDPKRERTAAPLAGRHALVTGAGSGIGRACALELARLGATLTLVGRRGAALEATCAELEGDGHGLAVADITDFAAVRAAFDAAVAARGPIAILVNNAGAAKSAPFGRTDPELWSEMLAVNLTGTYHCTHAVLAGMQAAGWGRIVNVASTAGLVGYAYVAAYCAAKHGVVGLTRALALEVAKQGITVNAVCPGYTDTPLIEGAVDNIVAKTGRSTDDAKAALAARNPQGRLVQPEDVAATVGWLCLPSSDAIHGQSIAVAGGEVMCG

SEQ ID NO: 9347 - protein, 405 aa, Salmonella typhimurium LT2
MATEQTAITRATFDEVILPVYAPADFIPVKGKGSRVWDQQGKEYIDFAGGIAVTALGHCHPALVEALKSQGETLWHTSNVFTNEPALRLGRKLIDATFAERVLFMNSGTEANETAFKLARHYACVRHSPFKTKIIAFHNAFHGRSLFTVSVGGQPKYSDGFGPKPADIIHVPFNDLHAVKAVMDDHTCAVVVEPIQGEGGVQAATPEFLKGLRDLCDEHQALLVFDEVQCGMGRTGDLFAYMHYGVTPDILTSAKALGGGFPVSAMLTTQEIASAFHVGSHGSTYGGNPLACAVAGAAFDIINTPEVLQGIHTKRQQFVQHLQAIDEQFDIFSDIRGMGLLIGAELKPKYKGRARDFLYAGAEAGVMVLNAGADVMRFAPSLVVEEADIHEGMQRFAQAVGKVVA

SEQ ID NO: 9348 - protein, 203 aa, Catharanthus roseus
MSEEIISVSDRFLLSLIEEHLLSDNSDDSSSELTSTEENWEEIFADFLNWSGSEIQKRGSPSSESCQSNSMAESCQEDSVVGTPPEAAAGGGCSKDWNRYKGVRRRPWGKFAAEIRDPKKKGSRIWLGTYETPEDAALAYDAAAFNMRGAKARLNFPHLIGSNISGPVRVNPRKRFPAEPSTTSSSSSSSSSENSGGRKKRRY

SEQ ID NO: 9349 - protein, 452 aa, Mesorhizobium loti
MKTRVAVIGAGPSGLAQLRAFKSAADKGADIPEIVCFEKQSDWGGLWNYTWRTGLDEHGDPVHGSMYRYLWSNGPKECLEFADYTFEEHFGRPIGSYPPRAVLWDYIKGRVEKSGLRKWVRFNSPVRMVTFSDETKKFTVTAHDRTNDVTYSEEFDNVVVASGHFSVPNVPYFEGFATFNGRILHSHDFRDAMEFKGKDILIIGRSYSAEDIGSQCYKYGAKSITSSYRSKPMGFKWPDNWKEVPLLQKVVGKTAHFKDGTSKDVDAIILCTGYLHSFPFLTDDLKLKTANRMWPLDLYEGVVWEKNPKLSYIGMQDQFYTFNMFDAQAWFARDVIMGRIKLPSAKAMAEHSAKWRAREETLEDAEQMIWFQGDYTKELMDQTDYPGFDVEAVNQTFMEWEHHKAEDIMGFRDHAYRSLMTGTMAPLHHTPWLQALDDSMESYLEVKGVAAE

SEQ ID NO: 9350 - protein, 287 aa, Zea mays
MILRSAPRRLHLLRPHHLRLLSAAALASAVPVPAPAQSPIEWAEAPLASVRPATADASLFHVSLDLSAHRGLLASHTAAGQFLRFRLPASSYHIFLAIASPPPPPALETLALAGPPSCFEFLVKRLPGTPSARLCDLRPGDLVHVGASVVGRGFDVARISDARDVLVFATGSGISPIRSLIESGFAENKKTDVRLFYGVRNLQRMAYQERFEDWESRGVKIVPVLSRPDSQWTGERGYIQNVFSRMKNTVNPPSVGVILCGHKQMSEEITRVLVADGLSKDRILTNF

SEQ ID NO: 9351 - protein, 235 aa, Glycine max
HEGNPCSCLEKLFRSLDTVTRMLRFTAPFPLLAFPVYLFSRSPGKTGSHFDPSSDLFVPNERKDVITSTACWAAMLGLLVGLGFVMGPIQLLKLYGVPYVIFVMWLDLVTYLHHHGHEDKLPWYRGKEWSYLRGGLTTLDRDYGWINNIAHDIGTHVIHHLFPPIPHYHLVEATEAGKPVFGKYYREPKKSAAPFPFHLIGEIIRSFKTDPFVSDTGDVVFYQTDFKINGSSQLE

SEQ ID NO: 9352 - protein, 519 aa, Candida apicola
MNINFSDALMLGGISLSFLLASQAIYFYFIYSPRAKKLGCAPPPIFFSFPLGIPDLIRLVNAWFHDDLLEWFTHRFEEFGRRTAFQSVAGQLWIGTIEPENIKTMLATSFKDYSLGFRYNAMYGLLGNGIFTLSGDGWKNSRALLRPQFSREQVSHLESMRTHINMMINNHFKGGQVVDAQVLYHNLTIDTATEFLFGESTNTLDPALAQQGLPGPKGLVTGEQFAEAFTSALELLSVRVMAGAAWFLVWTPKFWRSCKVCHNFIDYFVYKALATPMEKGQDADRYVFIRELTKETSDPRVIRDQALNILLAGRDTTAALLSFTTYYLGAYPEVYDELREAVIADFGSADAEPPTFEQLKQCKVLQNVIREVLRLHPNVPLNFREAIADTTFPTGGGPNGDQPIFVPKGQKVFYATYVMQRNAGIWGPDSTSFRPDRWNEPREALASGWDYIPFNGGPRICLGQQFALTEASYTLVRICQEFSRIEVLHPDVITARNVMKQRMRLPNSSSGGVITRFIR

SEQ ID NO: 9353 - protein, 366 aa, Ipomoea batatas
MAFRFSLLFLCTLLATTYLVFAAEDDGDDILIRQVVGDGGDLLNADHHFTVFKRRFGKVYASDEEHDYRLSVFKANMRRAKQHQELDPAAVHGVTQFSDLTPTEFRRKFLGLNRRLKFPADAKTAPILPTDELPSDFDWRDHGAVTPVKNQGTCGSCWSFSTTGALEGANFLATGKLVSLSEQQLVDCDHECDPEEAGSCDSGCNGGLMNSAFEYTLKAGGLMREEDYPYTGNDLQVCRFDKTKIAAKVANFSVVSLDEDQIAANLVKNGPLAVAINAVFVQTYIGGVSCPYICSKRLDHGVLLVGYGSAGYAPIRMKEKPYWIIKNSWGESWGENGYYKICRGRNVCGVDSMVSTVAAVSTTTSD

SEQ ID NO: 9354 - protein, 309 aa, Listeria innocua
MSLTEMLQIKYPILQGAMAQIATYELASAVSNAGGLGIIASGGMSADTLREQIRLCKEKTTKPFAVNIMLMMPNCPELVDVIIEEDVRVVTTGAGTPKPFMEKFKAAGIKVIAVIPSVKIAQKMEEIGVDAVVAEGTEAGGHVGETTTMALVRQVVSAVNIPVIAAGGIADGHGMAAVYALGASGVQIGTLFLVAEECPVPASFKQAVLDATDTSTTVTGRRNGAPVRSIKNPMIKKYVELENENASRDKLEELTLGSLRKAVHEGDVENGSVMAGQICGMLTEIRSTSDIIENLMKESKQVASNLVIQ

SEQ ID NO: 9355 - protein, 226 aa, Glycine max
  unsure (1)..(226): unsure at all Xaa locations
ITRPPTRPPTRASTRPVNGDGGRDVNLGDSNYSFGEAEALSDEMEEESRYVAEILRIRDVLLNPEDESEAVLFDSLRRLQLMELTVDCLKATEIGKAVNPLRKHGSKDIRQLSRTLIDGWKEMVDEWVKATTTTAITGSEEGTPDSVNPSVVDDDEEEGLPSPPLDEGAFFVTQAGSMEXSQFFDGMDDDGNPRPTGPFSKNRENGRKPVFDSHVVEKRKSQASHD

SEQ ID NO: 9356 - protein, 197 aa, Oryza sativa
MAAPDVEYRCFVGGLAWATDDRSLEAAFSTYGEILESKVRWIPSSLCFFLMRFGGGVRQIWLRKSDYGGGYAVQIINDRETGRSRGFGFVTFSNEQAMRDAIQGMNGKELDGRNITVNEAQSRRSRSGSGGGYCHPGGSGSYRGGGYGGGGGGGGYGQRRESGYRGGGGYGGGRGGGGYGGGYGSRGGGNSDGNWRN

SEQ ID NO: 9357 - protein, 752 aa, Geobacillus stearothermophilus
MENQNRQNAAQCPFHGSVTNQSSNRTTNKDWWPNQLNLSILHQHDRKTNPHDEEFNYAEEFQKLDYWALKEDLRKLMTESQDWWPADYGHYGPLFIRMAWHSAGTYRIGDGRGGASTGTQRFAPLNSWPDNANLDKARRLLWPIKKKYGNKISWADLFILAGNVAIESMGGKTIGFGGGRVDVWHPEEDVYWGSEKEWLASERYSGDRELENPLAAVQMGLIYVNPEGPDGKPDPKAAARDIRETFRRMGMNDEETVALIAGGHTFGKAHGAGPATHVGPEPEAAPIEAQGLGWISSYGKGKGSDTITSGIEGAWTPTPTQWDTSYFDMLFGYDWWLTKSPAGAWQWMAVDPDEKDLAPDAEDPSKKVPTMMMTTDLALRFDPEYEKIARRFHQNPEEFAEAFARAWFKLTHRDMGPKTRYLGPEVPKEDFIWQDPIPEVDYELTEAEIEEIKAKILNSGLTVSELVKTAWASASTFRNSDKRGGANGARIRLAPQKDWEVNEPERLAKVLSVYEDIQRELPKKVSIADLIVLGGSAAVEKAARDAGFDVKVPFFPGRGDATQEQTDVESFAVLEPFADGFRNYQKQEYSVPPEELLVDKAQLLGLTAPEMTVLVGGLRVLGANYRDLPHGVFTDRIGVLTNDFFVNLLDMNYEWVPTDSGIYEIRDRKTGEVRWTATRVDLIFGSNSILRSYAEFYAQDDNQEKFVRDFINAWVKVMNADRFDLVKKARESVTALQTGALPDLLLIINCSK

SEQ ID NO: 9358 - protein, 480 aa, Zea mays
MSFRSIVRDVRDGFGSLSRRSFEVTLASIYGLTGHHKGKTQSSSHVLDDSPSIIRESRWANLPPELIRDIIRRLEADESTWPARKHVVCFAAVCRTWREMCKEIVLSPEFCGKLTFPVSLKQPGPRDGNTMVQCFIKRNKSKSTYHLYLCLSNVVTSESGKFLLSAKRHRKTTCTEYTISMDSGNISRSKRTYIGKIRSNFLGTRFLIYDTQPPYNGAVVPPAGRTSRRFNSTKVSPKLPSVSYNIAQVSYELNVLGTRGPRRMRCIMHSIPASSVEPGGTVPGQPEQIVPRALEDSFRSTASFSQSFRSTASFSKSIMDSSMDFNSARFSDIAGSSARFTGVPGSSARFAGVPGSSARFSGIAGARLDNDEESETKERPLVLRNKPPRWHEQLQCWCLNFRGRVTIASVKNFQLIAAATPPPAGAPTPSQPAPSDPDKVILQFGKVARDMFTMDYRYPLSAFQAFAICLSSFDTKLACE

SEQ ID NO: 9359 - protein, 435 aa, Lycopersicon esculentum
MASWVLSECGLRPLPKIYPKPTIGFSSSVSVSATSLNLRRISPSPIRTDRNCWALRVSAPLRIQIAGEEEEQTTNNGDEFFDPGAPPPFKLSDIKAAIPKHCWVKNPWTSMSYVVRDVAIVFGLAAAAAYFNNWLVWPLYWFAQSTMFWALFVLGHDCGHGSFSNNHSLNSVAGHILHSSILVPYHGWRISHRTHHQNHGHVENDESWHPLSEKLYNSLDDITKKFRFTLPFPLLAYPFYLWGRSPGKKGSHFDPNSDLFVASEKKDVITSTVCWTAMAALLVGLSFVMGPLQMLKLYGIPYWGFVIWLDLVTYLHHHGHEDKVPWYRGEEWSYLRGGLTTLDRDYGWINNIHHDIGTHVIHHLFPQIPHYHLVEATEAAKPVLGKYYKEPKKSGPLPFYLLGYLIRSMKEDHFVSDTGNVVYYETDPNLYGSKK

SEQ ID NO: 9360 - protein, 384 aa, Brassica carinata
MGAGGRMQVSPSPKKSETDTIKRVPCETPPFTVGELKKAIPPHCFKRSIPRSFSYLIWDIIVASCFYYVATTYFPLLPHPLSYIAWPLYWACQGCVLTGVWVIAHECGHHAFSDYQWLDDTVGLIFHSFLLVPYFSWKYSHRRHHSNTGSLERDEVFVPKKKSDIKWYGKYLNNPLGRTVMLTVQFTLGWPLYLAFNVSGRPYPEGFACHFHPNAPIYNDRERLQIYVSDAGILAVCYGLYRYAAAQGVASMVCLYGVPLLIVNAFLVLITYLQHTHPSLPHYDSSEWDWLRGALATVDRDYGILNKVFHNITDTHVAHHLFSTMPHYHAMEATKAIKPILGDYYQFDGTPWVKAMWREAKECIYVEPDRQGEKKGVFWYNNKL

SEQ ID NO: 9361 - protein, 343 aa, Oryza sativa
MSDSALKDLNLAQSAELEKTKDSSAKSCITKPVLNGNKCNNTEENAPPVLPDAVTNGCEAGNADVEYIDSESLTDLEDAGATLSTLVARVDSKDWVMTCEALNNVRQLAIFHKDRLQELLEPLVPLIVKSVKNPRSAVCKTALMTCADIFKAYGDLMVDSIDPLLVQLFLKSSQDKRFVCEAAEAALISMTSWIAPSALLPKMQPYLKNRNPRIRAKASMCFSKSVPRLGVEGIKEYGMDKLVQIAATQLSDQLPESREAARKLALELQAFYEKSQASSSGEVAATSPDADADAGAESWEAFCQSKLSPLSAQAILRVTSTTKEGVAVGVTSTPPKEGVTVGC

SEQ ID NO: 9362 - protein, 427 aa, Brassica napus
DNSYTLSFLLVFFVLILFRRAFSVNTLSSTESLTISNNRTLVSPGDVFELGFFRTNSSSPWYLGIWYKKLSERTYVWVANRDNPLSNSIGSLKILGNNLVLLGHSNKSVWSTNVSRGYERSPVVAELLANGNFVMRDSNNNNASQFLWQSFNYPTDTLLPEMKLGYDLKTGLNRFLTSWRSYDDPSSGDFLYKLETRRLPEFYLMQGDVREHRSGPWNGIRFSGIPEDQKLSYMVYNFTENSEEVAYTFLMTNNSFYSRLTINSEGYLERLTWTPSSVVWNVFWSSPIHQCDMYRMCGTYSYCDVNTSPVCNCIQGFRPQNRQQWDLRIPTSGCIRRTRLGCSGDGFTRMKNMKLPETTMAIVDRSIGLKECEKRCLSDCNCTAFANADIRNRGTGCVIWTGELEDIRTYFADGQDLYVRLAAADLV

SEQ ID NO: 9363 - protein, 283 aa, Rhodococcus equi
MRLLVTGGAGYVGSVCTTVLLERGHEVVVVDDLSTGNADAVPAGAEFIEGDIAAVAGSVLGSGNSTPRFDGVLHFAAQSLVGESVERPEQYWQGNVVTTLALLEAMRLSGTPRLVFSSTAATYGEPERTPITEDAPTRPTNPYGATKLAIDHAITSYANAHSLAATSLRYFNVAGAYRGAGENRVVETHLIPLVLQVALGQREKISVFGTDWPTKDGTAVRDYIHVLDLADAHLLALESSVPGHHRIYNLGSGAGFHCPRSHFGLRAGDRPAHRRRGRPPTRG

SEQ ID NO: 9364 - protein, 343 aa, Artemisia annua
MSSTDLKSKFLKVYDTLKSELINDPAFEFDDDSRQWIEKMLDYNVPGGKLNRGLSVVDSYQLLKGGELSDDEIFLSSALGWCIEWLQAYFLVLDDIMDESHTRRGQPCWFRLPKVGMIAANDGILLRNHVPRILKKHFRGKPYYVDLVDLFNEVEFQTASGQMIDLITTLVGEKDLSKYSLSIHRRIVQYKTAYYSFYLPVACALLMFGEDLDKHVEVKNVLVEMGTYFQVQDDYLDCFGAPEVIGKIGTDIEDFKCSWLVVKALELPNEEQKKTLHENYGKKDPASVAKVKEVYHTLNLQAVFEDYEATSYKKLITSIENHPSKAVQAVLKSFLGKIYKRQK

SEQ ID NO: 9365 - protein, 408 aa, Saccharomyces cerevisiae
MSNDEGETFATEQTTQQVFQKLGSNMENRVCFDCGNKNPTWTSVPFGVMLCIQCSAVHRNMGVHITFVKSSTLDKWTINNLRRFKLGGNHKARDFFLKNNGKQLLNTANVDAKTKYTSPVAKKYKIHLDKKVQKDMELYPSELVLNGQDSSDSPLDTDSDASRSTSKENSVDDFFSNWQKPSSNSSSKLNVNTGSLAPKNNTTGSTPKTTVTKTRSSILTACRKKPVLNSQDKKKHSILSSSRKPTRLTAKKVDKSQAEDLFDQFKKEAQQEKEDEFTNSSSSTKIRQNDYDSQFMNNSKGNNNNSIDDINTQPDEFNDFLNDTSNSFDTTRKEQQDTLTPKFAKLGFGMTMNDANDLAKQQKESQKIAQGPRYTGRIAERYGTQKAISSDQLFGRGSFDEAANRGSA

SEQ ID NO: 9366 - protein, 487 aa, Rhodopseudomonas palustris
MGSAGAFSLPVSHTTFVEQQRGSGFEVSIAAIDDRPASRAPLIPPTPPRAPENLSALGRLAAIRHNAIASWGDRAYQDDVVRGRFFAHSSYILNTPDAIRHVLVDNTDNYRRTATGIRVLRPMLGEGLLLAEGRAWKHQRRTLAPAFTPRAVATLVPHMASATDEVVEGLRRKTGVPLDLRETMQHLALEIAGRTMFSFEMGTHGQALRGFVIDYGTRLASPRFLDLLLPLGWPTPQDVSRALFRRRWTRFIGELIAARRAAGKAEGAPPRDLFELMLAARDPETGEAFSDAQLGDQVATMILAGHETTATALFWALYLLALDPDAQERLANEVRRVGFGGTEIERLPFTRAVLDETLRLYPPAFLIVREAAGPDRVAGFAVRKHDVMLIAPWLLHRHDKLWSDPNAFVPERFLPGVPSPDRFAYLPFGVGPRVCIGAHFALVEATLALAKIVGTFRIELIDTEPVIPIGVVTTQPDRSPLFRLTPR

SEQ ID NO: 9367 - protein, 235 aa, Oryza sativa (japonica cultivar-group)
MAAAAAAATSPRNYTDFVPPHQLVEEAGKKFDFRGFSSHSVFQHQLLDRIQIVFYCSVHAMQGFKKEQLRVQIDNHGKLRISGERQVSGNRWSRFHKDFQVPDDCNAGDVRARFDSRDRVLHITMPKLSPAEEEPKAAAAAAPADHGAAQAQQTAAPADQEKEDKEEEDDDGAANDGAAAGGTALVTGRRKTPWRVVLAVVLALVAAAGFYAKYRLMMDPSAADGGHGLIGFSDH

SEQ ID NO: 9368 - protein, 449 aa, Glycine max
  unsure (1)..(449): unsure at all Xaa locations
PARANYRRVKEQAAVDYLELRSVAQGVSRQREFDLCGKERENFVPCYNVSASLLAGFKDGEEFDRHCELLVEAERCLVRPPKEYKIPLQWPTARDVIWSGNVKITKNQFLSSGSMTKRLMLLEENQIAFHSEDGLIYDGMKDYSRQLAEMIGLGSDYELPQAGVRTILDINCGFGSFAAHLASLKIMTVCIAPYEATGSQVQLALERGLPAVIGNFVARQLSYPSLSYDMVHCAQCGIICDGKDGRFLIEVDRVLKPGGYFVLTSPTSRSQGSSSQMKRRNMLMPMEQLTQKLCWTPLAQQDETFIWQKTADVNCYESRKKHAIPLCKEDDDAQSYYRPLQPCISGTSSKRWIAIQNRSSGYELSSAELKMNGVQPEDFFEDLQFWRSALKNYWSLLTPLIFSDHPKRPGDEDPLPPFNMMRNVMDMSTKYXGLNTALLEENKSVWVMN

SEQ ID NO: 9369 - protein, 388 aa, Glycine max; identical to SEQ ID NO: 5010

SEQ ID NO: 9370 - protein, 837 aa, Pirellula sp.
MDQMIPASLAERRRWVVAPNQTDHPPGEMVLYWMHNALRGHENPALDAAIWMAHKTGLPLLVYHGLSEKYPYASDRHHAFIMQGARDVQRELQARGITYAFHLERHGQRGPHLRDLCRRAAVLVSEEMPVAPIACWVERLRSLVTTPIMLVDTSCIVPSQSVDAVPTRAFEFRRLIQSELENRLSRPYEELPANLLPAKFTGPLGFAPIDLQDVDLAELISQCKVDHSVGPVADTPGGMRAGYARWDRFREKSLTQYSRQRNHPDDPLGVSRLSGYLHYGMISPFRIAREAAAMGARKYVDELVVWREMVFRFCLEHVEDLDTMAVLPKWSRETLEKHAEDSRDEVLDWETLARGKSSQSLWNLAQRSLLRHGELHHNLRMTWGKAFLAMTSQPCQALAQCIDLNHRYAIDGRSPISYSGILWSFGQFDRPSEPEQPIYGKVRSRTIEEQGKRIDQPQVAEWINRPVAAGLPRVAIVGAGLAGLVAARTLQDHGLDVQVFEKSRGVGGRLATRRSDSGGGFDHGAQYFTVRDDRFARHVRSWIQQGLVEPWLQPIVELQPGGKVVEEKCGTPRYVGVPGMSAIGKHLAADLDVRLQTTVGSLHQVGERWKLQIENAGGNSSGAQANEVDSGEFDRVIMNCPPAQAASLLAGHSDLEATAKQVEMLPCWSVMVRGEGLSDLGYVGAFINEGPLSWIARNDAKPGRTRTDEPLSSWVLHASTDWSQEHLQRPADWVAKELLLALEQATGQRFHRVIESQAHRWRYANPVSPLGNDCLWDRTTGLGACGDWCGGPRVEGAFLSGMAMAGAILRHATIDRAAADRNGLVRAPTPKQTVDVV

SEQ ID NO: 9371 - protein, 374 aa, Tripterygium regelii
ALSIAGAVQSQKLAVLAISQLQSLQGGDIKLLCDTVVESVRDLTGYDRVMVYKFHEDEHGEVVAESKRPDLEPYIGLHYPATDIPQASRFLFKQNRVRTIVDCHALPVRVIQDDGLMQPLCLVGSTLRAPHGCHAQYMKNMGSMASLAMAVVINGNDEEVIGERNTTRLWALVVCHHTSARCIPFPFRYACEFLMQAFGLQLNMELQLAAQLMEKHVLKTRTLLCDMLLRDPPTGIVTQSPSIMDLVKCDGAALHYQGNYYPLGVTPTEAQIKDIVGWLLDFHGDSTGLSTDSLADAGYPEAALLGDAVCGMAVAYITNRDFLFWFRSHTAKEIKWGGAKHHPEDKDDGQRMHPRSSFKAFLEVVKSRSLPWEN

SEQ ID NO: 9372 - protein, 200 aa, Pseudomonas aeruginosa UCBPP-PA14
MESPFVQVFDMVGIPYAADLMNFVILTAILSVGNSGLYASTRILWAMSRTGMAPRGLSKLSARGVPLYALLITLCFALLSLLTSVIAADTLFMVLMAVSGMSGTVTWIVIAYAQYRFRREHMASGGTVAELKYAAPLFPLVPLACIAVCCSLFVFLALDPTQRPSLYWGFGFIAACYLAYYVVRRRQPQGLGDPALGRAG

SEQ ID NO: 9373 - protein, 170 aa, Glycine max
PWTCPGDDVFYNASIIWGVVGPKRMFTKDGVYPGMNWFFLIGLLAPLPVWLLSKKFPNHKWIQLINFPIIIAGASNIPPFRSVNYITWGIVGIFFNFYVYRKFKAWWARHTYILSAALDAGVAFMGVALYFALQSNGIFGPTWWGLDADHCHLAKCPTAPDVHAKGCPLL

SEQ ID NO: 9374 - protein, 215 aa, Tabernaemontana divaricata
LPSFVDWRSKGAVNSIKNQKQCGSCWAFSAVAAVESINKIRTGQLISLSEQELVDCDTASHGCNGGWMNNAFQYIITNGGIDTQQNYPYSAVQGSCKPYRLRVVSINGFQRVTRNNESALQSAVASQPVSVTVEAAGAPFQHYSSGIFTGPCGTAQNHGVVIVGYGTQSGKNYWIVRNSWGQNWGNQGYIWMERNVASSAGLCGIAQLPSYPTKA

SEQ ID NO: 9375 - protein, 377 aa, Solanum tuberosum
MDSSNPKVITCKAAVVGKEGEMIKIEEIQVDPPKSNEVRIKMLFASLCHTDILASNGYPYSLFPRVLGHEGVGMIESVGENVTNLKEGDIVMPLYLGECKECPNCKSGKSNLCHKYHLTFSGLMLDDTSRISIHGGQVLYHSFSCSTWSEYIVINANYVIKVDPQKIPLQHASLLCCGFTTGYGATWREVHVEKGSTVAVLGLGVVGLGAIEGARSQGASKIIGVDINESKQGKGELFGMTDFINPKESMTSVSEMIKDVTEGLGVDYVFECTGIPSMLNEAIEASKLGIGTIVVIGAGHGLTREFNLVPLLCGRTLKGSIYGGIRLHSDLPAILHRCATKEIQLNELITHQISLTEINQSFELLKDPHCVKIIIKF

SEQ ID NO: 9376 - protein, 333 aa, Trichodesmium erythraeum IMS101
MSQTKPTILVSGGAGYIGSHAVQALQNAGYDIVILDNLVYGHRDIVENVLKVEMIVGDTSDRSLLDKIFATHNIAAVMHFAAYIFVGESVKDPQKYYHNNVVGTLTLLEAMLKASIKKFVFSSTAAIYGKPQTIPIPEDHPKNPINPYGASKRMIEQILADFEIAYDFKSVCFRYFNAAGAHPNGLTGEDHNPETHLIPLVLFAALGKRDSISIFGTNYKTPDGTCIRDYIHVCDLADAHVLGLEYLLNGGESNIFNLGNGNGFSVREVIETVKQVTGREFKVEERDRRPGDPPILVGSSEKARKVLGWSPKYPEVKEIVSHAWQWHQKRHGK

SEQ ID NO: 9377 - protein, 468 aa, Pseudomonas fluorescens PfO-1
MNSLNSKDLNGQLAQGFKPRHVTMLSIAGIIGAGLFVGSGHAIAAAGPAVLLAYLFSGLLVVLVMRMLGEMAVAHPDTGSFSTYADQAIGRWAGFTIGWLYWWFWVLVIPIEALAAGHVLNQWFPQVDAWLFALLSIILLVVTNLFSVSKYGEFEFWFAMAKVVAIIGFIGLGFAVLMGWIPGREASGLSRLMEEHGGFAPNGLSAVVGAFITIMFSFIGTEAVTIAAAESSNPAQNIAKATRSVIWRIGVFYLLSIFVVISVVPWNDPLLASVGSYQRALELMNIPNAKFLVDVVVLIAVASCMNSSIYISSRMLFSLGRRGDAPQPLKVTSAAGVPRAAVIASTVIGAGVTLFSYFMPGGLFQFLLASSGAIALLVYLVIAISQLRMRRMLRRQNVELTFRMWLFPWLTWLVIAFICAALAVMMVTPEHRLEVTSTIGLALTISFIGLVTTRQHGQMRAVVSAGKA

SEQ ID NO: 9378 - protein, 177 aa, Neisseria meningitidis MC58
MGIYDFQMKDAEGNAVDLSGYRGKVLLIVNTATRCGLTPQYEALQKLYAQYTAEGLEILDFPCNQFREQAPESSGEIAQVCMMKFGTKFKIFDKIEVNGANTAPLYAYLKSVKPQDKGNHLFKDFVLKLAALGEKRDEGDIKWNFTKFLVNRDGEVVERFAPSVTPEEIEADIRALL

SEQ ID NO: 9379 - protein, 149 aa, Zea mays
  unsure (1)..(149): unsure at all Xaa locations
MASEGDNKRMITLRSSDLEEFEVEEAVAMESQTLRLMIEDDCADNGIPLPNVNSRILSKVIEYCNPLTPXLKSWDAKFVKVDQATLFDLILAANYLNIKGLLDLTCQTVADMIKGKTPEEIRKTFSIKNDXFTQEEEDEIRMENQWAFE

SEQ ID NO: 9380 - protein, 338 aa, Bacillus anthracis str. Ames
MAILITGGAGYIGSHTCVELLNNNYKIIVVDNLSNSSIESLNRVKEITGKQFEFYKENVLNREKMNEIFLENNIEAVIHFAGFKAVGESTTTPLAYYYNNIISAIVLCDVMQKHNVKNFIFSSSATVYGIPKTLPITEEFPLSVTNPYGQTKLMIEQIMRDVAKADDEWSIALLRYFNPFGAHQSGRIGEDPNGIPNNLMPYVTQVAVGKLKELNIFGNDYPTKDGTGVRDYIHVVDLAKGHVKALEKVLKTKGIEAYNLGTGKGYSVLEMVKAFEKVSGKKIPYKVIGRRPGDVAICFADVSKAKRELGWEAEYGLEEMCVDSWRWQVNNKNGYQMI

SEQ ID NO: 9381 - protein, 152 aa, Oryza sativa
MVKAVAVLASSEGVKGTIFFSQEGDGPTSVTGSVSGLKPGLHGFHVHALGDTTNGCMSTGPHFNPTGKEHGAPQDENRHAGDLGNITAGADGVANVNVSDSQIPLTGAHSIIGRAVVVHADPDDLGKGGHELSKTTGNAGGRVACGIIGLQG

SEQ ID NO: 9382 - protein, 214 aa, Lactococcus lactis
MALTAGIVGLPNVGKSTLFNAITKAGAEAANYPFATIDPNVGMVEVPDERLNKLTELIKPKKTVPTTFEFTDIAGIVKGASRGEGLGNKFLANIREVDAIIHVVRAFDDENVMRENNREDAFIDPMADIETINLELILADLESVNKRYARVEKIARTAKDKDAVAEFNVLKKLKPVLEDGKSARTIDFDEDETKVLKSLFLLTSKPVLYVANVS

SEQ ID NO: 9383 - protein, 98 aa, Buchnera aphidicola
  unsure (1)..(98): unsure at all Xaa locations
LPSASLNDSXXGLYEPAGGSAPDIAGKNIANPIAQILSIAMLVRYTMKLPIISDQIESAVIDTLKKGYRTLDIANDKEKCESTNDIGDIISYILKKRI

SEQ ID NO: 9384 - protein, 297 aa, Rhizobium sp. USDA 1944
  unsure (1)..(297): unsure at all Xaa locations
RGKTQIKEFDAFPTLEQLPLWGFDGSSTQQAEGRSSDCVLKPVAVYPDPVRTNGALVMCEVMMPDGKTPHPSNTRATVLDDESAWFGFEQEYFFYKNGRPLGFPEQGYPAPQGPYYTGVGYKNVGDIARQIVEEHLDICLAAGINHEGINAEVAKGQWEFQVFGKGSKKAADEVWLARYLLLRLTEKYGIDVEFHCKPLGDTDWNGSGMHANFSTAYLREVGGKDYFEALMAAFEKNLHDHINVYGPDNHLRLTGKHETAPWDKFSYGVADRGASIRVPHSXVNNGYRGYLEDRRPN

SEQ ID NO: 9385 - protein, 463 aa, Triticum aestivum
  unsure (1)..(463): unsure at all Xaa locations
FLRRRDRIAERLFNALLARPSCHGCTASTGSVPPATPAVAEDKGSVRRVPEKESKVDSSSLGAPGGGALGGGISEDEDSDSEDDERLRRAAASNYGHNYDDDNDVEEEQDAAAPAEEDHHAEDDDPEAEELEALTNEIDEESQIVGEVLRIKELLLHKQDHSDATLFDSLRRLQLMQLSVSTLKATEIGRAVNGLRKHSSQQIRHLALALIQDWKILVDEWVSTTNVALADNSPGTSNPSVVDDDEEEEGLPSPPLDEGAFFAPETTAIQLSEFFDEMDEDGNLRHNNDERLGSERKKMRRMPAKQTTPHGMLNKFSRPLRTXIWICNPNEGSLIPGSMRPMKAATQQKPIGEMKYKQTQEHFGVERKPTMGHVDKSRLRAQPSSGVRLESARPKTQDGLESNVRLEAAKRRLQERYQEAENAKKQRTIQVMELGDIPKPKSNTRQPMVKSRNNIRSRVLGRR

SEQ ID NO: 9386 - protein, 751 aa, Geobacillus stearothermophilus
MENQNRQNAAQCPFHGSVTNQSSNRTTNKDWWPNQLNLSILHQHDRKTNPHDEEFNYAEEFQKLDYWALKEDLRKLMTESQDWWPADYGHYGPLFIRMAWHSAGTYRIGDGRGGASTGTQRFAPLNSWPDNANLDKARRLLWPIKKKYGNKISWADLFILAGNVAIESMGGKTIGFGGGRVDVWHPEEDVYWGSEKEWLASERYSGDRELENPLAAVQMGLIYVNPEGPDGKPDPKAAARDIRETFRRMGMNDEETVALIAGGHTFGKAHGAGPATHVGPEPEAAPIEAQGLGWISSYGKGKGSDTITSGIEGAWTPTPTQWDTSYFDMLFGYDWWLTKSPAGAWQWMAVDPDEKDLAPDAEDPSKKVPTMMMTTDLALRFDPEYEKIARRFHQNPEEFAEAFARAWFKLTHRDMGPKTRYLGPEVPKEDFIWQDPIPEVDYELTEAEIEEIKAKILNSGLTVSELVKTAWASASTFRNSDKRGGANGARIRLAPQKDWEVNEPERLAKVLSVYEDIQRELPKKVSIADLIVLGGSAAVEKAARDAGFDVKVPFFPGRGDATQEQTDVESFAVLEPFADGFRNYQKQEYSVPPEELLVDKAQLLGLTAPEMTVLVGGLRVLGANYRDLPHGVFTDRIGVLTNDFFVNLLDMNYEWVPTDSGIYEIRDRKTGEVRWTATRVDLIFGSNSILRSYAEFYAQDDNQEKFVRDFINAWVKVMNADRFDLVKKARESVTALQVSAATRSVGGRNLQ

SEQ ID NO: 9387 - protein, 338 aa, Glycine max
  unsure (1)..(338): unsure at all Xaa locations
MSSGATHWCHACRQXVVLDGRDAVCPYCDGGFVQEIDELXEVAPHHTFCSQSGVVSIKCLTFLMLYLLLWVSEGFLTRDRGLWMMLFDNFMRHSMARRNSNFDVXRLSGFRRGPELSCGVFSSCPYLIFHGQDPISTWSAGSPKXGCRHVDFGAYFMGXGLEELIEQLTMNXRRGPPPAARSSIDAMPTXIKITQAHLRSDSHCPVCKEKFELGTEAREMPCNHIYHSDCIVPWLVQHNSCPVCRVELPPQGQASSRGTQNWGGRNDSNTSSSGSNDSSRGRENSRQNHGRRNPSSFLWPFRSSNSNNNHHSDTGGSSSSXTPDQNNGTSYSGWPFDC

SEQ ID NO: 9388 - protein, 320 aa, Zea mays
  unsure (1)..(320): unsure at all Xaa locations
RSSLPEAVTPSRSLSRQPPPPPGGPPRRASPRPPPRRSSSSSXPPLAELERVRRVGSGAGGTVWMVRHRGTGRPYALKVLYGNHDDAVRRQITREIAILRTAEHPAVVRCHGMYEQAGELQILLEYMDQGSLESHRIADERFLAHVARQVLSGIAYLHRRHIVHRDIKPSNLLIDSGRRVKIADFGVGRILNQTMDPCNSSVGTIAYMSPERINTDLNDGTYDGYAGDIWSFGLSILEFYLGRFPFGENLGRQGDWAALMCAICYNDPPEPPPTASREFRGFIACCLQKNPAKRLTAAQLLQHPFVAGPHPQPLAAPPPS

SEQ ID NO: 9389 - protein, 251 aa, Zea mays
MANAGGGAAGEGEWLKVAQLRALVQEDHRAKEVDNLTLRRFLRARGHNVDKAAAMLLKFLRWRAEAAPGGGTVREEQVRGELEQDKIYMGGVDRTGRPIIVGLLAKHYSANRDMAEFKSFVVYFFDKICARIPRGQEKFLAIMDLKGWGFANCDVRAYIAAIEIMQNYYPERLGKALMINVPYIFLKVWKTMIYPFIDANTRDKFVFVDDKSLRETLRREIDETQLPEFLGGKMPLVSLKDYAQQPQPVCE

SEQ ID NO: 9390 - protein, 214 aa, Brassica napus
MTSFSTFSEMLGSEYESPVTLGGEYCPKLAASCPKKPAGRKKFRETRHPVYRGVRLRNSGKWVCEVREPNKKSRIWLGTFLTAEIAARAHDVAAIALRGKSACLNFADSAWRLRIPETTCPKEIQKAAAEAALAFQAEINNTTTDHGLDMEETIVEAIFTEENNDVFYMDEESMLEMPALLASMAEGMLLPPPSVHFGHNYDFDGDADVSLWSY

SEQ ID NO: 9391 - protein, 172 aa, Brassica rapa
FILVPYHGWRISHRTHHQNHGHVENDESWVPLPEKLYKNLSHSTRMLRYTVPLPMLAYPLYLWYRSPGKEGSHYNPYSSLFAPSERKLIATSTTCWSIMLATLVYLSFLVGPVTVLKVYGVPYIIFVMWLDAVTYLHHHGHDDKLPWYRGKEWSYLRGGLTTIDRDYGIFNN

SEQ ID NO: 9392 - protein, 129 aa, Glycine max
MSTKKIVLKSSDNESFEVDEAVARESQTLAHMVEDDCTDNGIPLPNVTGKILAKVIEYCKKHVDAAAAKTEAAADGGASSDDDLKAWDAEFMKIDQATLFELILAANYLNIKNLLDLTCQTVADMIKGK

SEQ ID NO: 9393 - protein, 799 aa, Zea mays
MKMQLVEPEGSKGMGSPGCSEIVELVDEPKDARSCGLTHLRVRVKPVGQELGARSCSVEDDLDQLIRSINVRTSARASGQTSTDRRLIALGKSPVSSSEIVESVSLKQALRKMCISQASEMAAMKRLSKPTGVSTPSDSGAIKKLHGSVAVQTNEEQDDKSKAGKVSVKPEKSAGSSVGKPSEISKGQSKSSAKKNLRSASPTTGNVHKTRIQDVISNKSSEGVEGISVEVTLPKQRKGKSMKTSSPRAVPVGGSRLVRPMFRNKTSTKKKVKPEPAIVPASHKHCETKGPKSHTSKHQESLQDEPRTPAPTDKKAAVSSTTVDGADFGTKGCGVGVIHGSKVGELLRSKEKGECSQSSKSSIGDYSTSTSISEDSYGSFSANRSRPHMSKDVRWGAIRRMAIQQGSLGLKNFKLLKQLGCGDIGTVYLAELVGSDCMFALKVMDIEYLISRKKMLRAQTEREILQMLDHPFLPTLYSHFTTDNLSCLVMEFCPGGDLHVLRQKQPTKTFSEAAARFYVAEVLLALEYLHMLGVIYRDLKPENILVREDGHIMLSDFDLSLRCSVSPMLVRTSSVDRDEPSRPSGPCAQSCIDPLCIQPSWSNSSCFTPSLVSSTPSRTRRTRAEPLKKPSLPQLVVEPTEARSNSFVGTHEYLAPEIIRGDGHGSSVDWWTLGIFLYELLYGKTPFRGPDNDETLSNVISQGLKFPDSPALSFHARDLIRGLLVKEPEYRLGSSRGAAEIKRHPFFEGLNWALIRWTSPPETPKNIDTAATLAGTRKKKEGKCLEFRLNGDDIEFELF

SEQ ID NO: 9394 - protein, 363 aa, Bacillus cereus ATCC 14579
MMITSRVTDILKIEYPVVQAGMAGAITTPELVAAVSNSGGLGTLGAGYMSPEQIREAIYRIRELTDKPFGVNLLVTKEIEIEEEKVDEAKVLLSGVNRELGIEVEGTLKLPKSYKEQLQVLLDEKVPVVSFAFQTLEKEEINDLKRSGIKVIGTATHVKEAKVLAELGVDIIIGQGSEAGGHRGTFIGKERDAMIGTFALIPQLVGAVPHIPIVAAGGVMNGQGLVAALALGAEGVQMGSAFLTSEESITHDVYKEAVLHSTDTSTTVTRAFSGKYARGIRNEFIERHEGKEEGLPVYPVQNVLTSKIRQEAAQQNKEEYMSLWAGQAASLARIESAQHVVERVMKEAANAIEQLQNIYKKTT

SEQ ID NO: 9395 - protein, 118 aa, Glycine max
SARAYISWIYLRYWQRKPETKHRGDLSEDFAFSTFFPEFLRPVIDPIASIFHRMLCGRYDASNDGQGNSLESEPLPGSDSIEASRRRERGARALEERLAAERLAVARRELQREAEENV

SEQ ID NO: 9396 - protein, 197 aa, Oryza meyeriana
GQTPVFPRILGHEAGGIVESVGEGVTELVPGDHVLPVFTGECKECAHCKSEESNMCDLLRINVDRGVMIGDGQSRFTINGKPIFHFVGTSTFSEYTVIHVGCLAKINPEAPLDKVCILSCGISTGLGATLNVAKPKKGQTVAIFGLGAVGLAAMEGARLPGASRIIGVDLNPAKYEQAKKFGCTDFVNPKDHSKPVQ

SEQ ID NO: 9397 - protein, 743 aa, Geobacillus stearothermophilus
MENQNRQNAAQCPFHGSVTNQSSNRTTNKDWWPNQLNLSILHQHDRKTNPHDEEFNYAEEFQKLDYWALKEDLRKLMTESQDWWPADYGHYGPLFIRMAWHSAGTYRIGDGRGGASTGTQRFAPLNSWPDNANLDKARRLLWPIKKKYGNKISWADLFILAGNVAIESMGGKTIGFGGGRVDVWHPEEDVYWGSEKEWLASERYSGDRELENPLAAVQMGLIYVNPEGPDGKPDPKAAARDIRETFRRMGMNDEETVALIAGGHTFGKAHGAGPATHVGPEPEAAPIEAQGLGWISSYGKGKGSDTITSGIEGAWTPTPTQWDTSYFDMLFGYDWWLTKSPAGAWQWMAVDPDEKDLAPDAEDPSKKVPTMMMTTDLALRFDPEYEKIARRFHQNPEEFAEAFARAWFKLTHRDMGPKTRYLGPEVPKEDFIWQDPIPEVDYELTEAEIEEIKAKILNSGLTVSELVKTAWASASTFRNSDKRGGANGARIRLAPQKDWEVNEPERLAKVLSVYEDIQRELPKKVSIADLIVLGGSAAVEKAARDAGFDVKVPFFPGRGDATQEQTDVESFAVLEPFADGFRNYQKQEYSVPPEELLVDKAQLLGLTAPEMTVLVGGLRVLGANYRDLPHGVFTDRIGVLTNDFFVNLLDMNYEWVPTDSGIYEIRDRKTGEVRWTATRVDLIFGSNSILRSYAEFYAQDDNQEKFVRDFINAWVKVMNADRFDLVKKARESVTALQDTTGNR

SEQ ID NO: 9398 - protein, 218 aa, Gracilaria gracilis
SQTRILLAGAVGALVAATCRIPQEVLKQPLQAEIYPNVFVALKETVGKNGIGALYKGSIATISRDIPWNALSFMFHGQGKKMFKSTKGRDPANDENLVIAGVAGALAAIIMTPIDVVKTRIMTQRVGSTVYSGVIGTFSKIVREEGAGTLMKGVIPRIVFLAPLAGITFSVYEAVAANIKKRKTVAEPVAYNSLQEAFMTHLQPGLKERTRTTTLALR

SEQ ID NO: 9399 - protein, 322 aa, Streptomyces coelicolor A3(2)
MQYVKLGSTGLDVSRICLGCMTYGVPDRGTHEWTLDEAASRPLIRQALEAGVTFFDTANVYSDGTSEEIVGKALADFARRDDIVLATKVNGRMRPGPNGAGLSRKAVMTEIDHSLRRLGTDYVDLYQIHRFDPHTPVEETMEALHDLVKAGKVRYIGASSMYAWQFSKMQYTAERHGWTKFVSMQNHYNLVYREEEREMLPLCADQGVGVLPWSPLARGRLTRDWDTATGRSATDTFGSTLYQEGDRAVVEAVTRIAGERGVPRARVALAWLLHQDTVTAPIVGASRPGHLEDAVAAVELTLSETEIEELERPYAPHPIAGH

SEQ ID NO: 9400 - protein, 363 aa, Neurospora crassa
MASSASKTNIGVFTNPQHDLWISEASPSLESVQKGEELKEGEVTVAVRSTGICGSDVHFWKHGCIGPMIVECDHVLGHESAGEVIAVHPSVKSIKVGDRVAIEPQVICNACEPCLTGRYNGCERVDFLSTPPVPGLLRRYVNHPAVWCHKIGNMSYENGAMLEPLSVALAGLQRAGVRLGDPVLICGAGPIGLITMLCAKAAGACPLVITDIDEGRLKFAKEICPEVVTHKVERLSAEESAKKIVESFGGIEPAVALECTGVESSIAAAIWAVKFGGKVFVIGVGKNEIQIPFMRASVREVDLQFQYRYCNTWPRAIRLVENGLVDLTRLVTHRFPLEDALKAFETASDPKTGAIKVQIQSLE

SEQ ID NO: 9401 - protein, 520 aa, Oryza sativa; identical to SEQ ID NO: 1803

SEQ ID NO: 9402 - protein, 340 aa, Bifidobacterium longum NCC2705
MTTVLVTGGAGFIATHTDIELLDKGYDVISVDNYGNSSPVALERVEQITGKPVKRYDGDVRDEALMERVFTENDIDWVIHFAGLKAVGESVAKPIEYYDNNLYSTLVLLKTMRKHGVKKIIFSSSATVYGSPKELPITEETPTGGTTNPYGTSKLFQEQILRDVHVADPSWTIVLLRYFNPVGAHESGLLGEDPKGIPANLTPYVAKVAVGELKEVQVYGDDYDTPDGTGVRDYIHVVDLAKGHVAVIDHIDKEGVFVYNLGTGHGYSVLEVIKAYEKAAGHPIPYTIKPRRPGDIAACYADASKAEKELGWKAELTIDDMAASSLNWQTKNPNGFRDAE

SEQ ID NO: 9403 - protein, 233 aa, Streptococcus pneumoniae R6
MTKTILVTGGTSYIGSHTVKALLNAGYQVHILDNLSTGNRAAVDSRASFKELDVYDASALKAYLEENQIDAVLHYTGEIVVSESIENPSKYFTANVAGMNQVLKVLSEVGIQKIMFSSTASLYGNNCIDKPVTEDTLLDPVNPYAETKLMGERMIYWMANRYDWKYVIFRYFNVAGAEMDASNGLRVKNPTHIIPNINKTALGQNDSLKIFGDDYDTRDGSCIRDYIYVLDLA

SEQ ID NO: 9404 - protein, 1122 aa, Arabidopsis thaliana
MSGSRPTQSSEGSRRSRHSARIIAQTTVDAKLHADFEESGSSFDYSTSVRVTGPVVENQPPRSDKVTTTYLHHIQKGKLIQPFGCLLALDEKTFKVIAYSENASELLTMASHAVPSVGEHPVLGIGTDIRSLFTAPSASALQKALGFGDVSLLNPILVHCRTSAKPFYAIIHRVTGSIIIDFEPVKPYEVPMTAAGALQSYKLAAKAITRLQSLPSGSMERLCDTMVQEVFELTGYDRVMAYKFHEDDHGEVVSEVTKPGLEPYLGLHYPATDIPQAARFLFMKNKVRMIVDCNAKHARVLQDEKLSFDLTLCGSTLRAPHSCHLQYMANMDSIASLVMAVVVNEEDGEGDAPDATTQPQKRKRLWGLVVCHNTTPRFVPFPLRYACEFLAQVFAIHVNKEVELDNQMVEKNILRTQTLLCDMLMRDAPLGIVSQSPNIMDLVKCDGAALLYKDKIWKLGTTPSEFHLQEIASWLCEYHMDSTGLSTDSLHDAGFPRALSLGDSVCGMAAVRISSKDMIFWFRSHTAGEVRWGGAKHDPDDRDDARRMHPRSSFKAFLEVVKTRSLPWKDYEMDAIHSLQLILRNAFKDSETTDVNTKVIYSKLNDLKIDGIQELEAVTSEMVRLIETATVPILAVDSDGLVNGWNTKIAELTGLSVDEAIGKHFLTLVEDSSVEIVKRMLENALEGTEEQNVQFEIKTHLSRADAGPISLVVNACASRDLHENVVGVCFVAHDLTGQKTVMDKFTRIEGDYKAIIQNPNPLIPPIFGTDEFGWCTEWNPAMSKLTGLKREEVIDKMLLGEVFGTQKSCCRLKNQEAFVNLGIVLNNAVTSQDPEKVSFAFFTRGGKYVECLLCVSKKLDREGVVTGVFCFLQLASHELQQALHVQRLAERTAVKRLKALAYIKRQIRNPLSGIMFTRKMIEGTELGPEQRRILQTSALCQKQLSKILDDSDLESIIEGCLDLEMKEFTLNEVLTASTSQVMMKSNGKSVRITNETGEEVMSDTLYGDSIRLQQVLADFMLMAVNFTPSGGQLTVSASLRKDQLGRSVHLANLEIRLTHTGAGIPEFLLNQMFGTEEDVSEEGLSLMVSRKLVKLMNGDVQYLRQAGKSSFIITAELAAANK

SEQ ID NO: 9405 - protein, 466 aa, Arthrobacter sp.
MNQEGKLQKGLKIRHLTMIAFGGSIGAGLFVGSGAIIQMTGPAAVFTALMAGILVILIMRMLGEMVVAKPSLGSFSDYAREALGNWAGFTVSWLYWYFWVIVIAVEAIAGAAILKDWLFPNVSLWVLNLILLIALTITNIFSVKAYGEFEYWFSLIKIVAITLFLTLGGAYIFGLFPGIPMHLSNLTAHGGFIPNGAGIVFIAVATIIFSFVGSEIVTIAAAESAESEKAVVRAVNSVIVRIMTFYVGSVFIIVAVVPWNDAKALTNPYVSALKLMGMPGADMIMNLVVVTAVLSCLNSGIYTASRMLFALGDKGDAPKWMMHVTKTGVPLKAILTCTIFGFISVIMAFVSPETVFQFLLNSSGAIALFVYLLIAVSQLKLRKTIERETPERLKLRMWAYPYLTIATIIAMLMIITTMAFNASTRSQFILSLLSSAIVVAIYFIKTNLSKKQSLDTSIVNPENIKS

SEQ ID NO: 9406 - protein, 137 aa, Catharanthus roseus
MASADVEFRCFVGGLAWATTDQSLSEAFSQYGEVLESKIINDRETGRSRGFGFVTFGDEKSMKDAIEGMNGQTLDGRNVTVNEAQSRGSGGGGGGGGFRGPRREGGGCYGGGGRRNGGYGGNGGGYGGGRRDGGRRW

SEQ ID NO: 9407 - protein, 159 aa, Oryza sativa (japonica cultivar-group)
MGAAESSSKLAGSIHEFTVKDARGSDVELSRYKGKVVLIVNAASRCGLTNYNYTELGQLYGKYKETGATEPGSNEQVVEFACTRFKAEYPILGKVDVNGGNAAPLYKFLKSERGGLFGERIKWNFTKFLVDKEGHVVNRYAPTSSPLSIENDIKNLLGA

SEQ ID NO: 9408 - protein, 490 aa, Zea mays
  unsure (1)..(490): unsure at all Xaa locations
MRRQSLATVLLLLVAAAALAAPAAGHSESSCPFYDHGGHGEPHERHGHGHSCGGGADHEHHHHHHHGHGHGEIQRLLPEEMAEEADLELESFGYEDHDHGHHHHHHHHHHHSHGDMETSPMGVWLSAMGCSLLVSMASLVCLVLLPVIFFKGKPSKAIVDSLAVFGAGAMLGDSFLHQLPHAFGGGHSHSHDHEGHDHAHAHEHAHAHSLQDLSVGLSVLFGIVLFFIVEKIVRYVEDNSQNGAHSMGHGHHHHNHKRHDSSDKAKLNYQKSDTDGKDIDHAEEEPSVXDTTGKISDGHESEATIRKRSSSKATDGEATNSGSDPAPEKAPSNEGSSISNSNLVFGYLNLFSDGVHNFTDGMALGSAFLLHGSVGGWSRTLFLLAHELPQEVGDFGILVRSGFTVSKALFFNFLSALVALAGTALALSLGKDPGHSSLIEGFTAGGFIYIAVAGVLPQMNDQKTTLKSSVAQLISLAMGMLVALGISLVE

SEQ ID NO: 9409 - protein, 226 aa, Zea mays
  unsure (1)..(226): unsure at all Xaa locations
LLWAIGFLEAGREKKNPQYIPHLFDSFLEQLRCLVLDPIRRVHTTLSPLRSNRWPAEGEKKMITLKSSDGEEFEVEEAVAMESQTIRHMIEDDCADNGIPLPNVNXKILSKVIEYCNKHVHAAAAAAAASKAGSDARGTRRAPGEDLKNWDADFVKVDQXATLFDLILAANYLNIKXCSTLTCQXVADMIKGKTPEEIRKTFNIKNDFTPEEXEEEIRRENQWAFE

SEQ ID NO: 9410 - protein, 501 aa, Asparagus officinalis
MTVSITAAVQLFLLLLLLLPLLFVHHKTKPKTKCRSPPGPPPLPVIGNLHQLSLLLHQSLYRLSKIHGPIFKLSLGRVPVLVISSPSLAKQVLKTHDLACCSRASTVSFKEYTYDGCDVAGAPYGDSWRNLRKIFVLKLLSSKKLTSFRLVQEEEIEGMISSIRTRSDTNATVNITEFVVRLANNITFRVAFGYRSEGEYGEKSRFQRLLESGNDTVASFYVGDYFPGLGWLDKMTGKLGKMKRNARDLDEFYQEVIDAHMKDGRKEDGKEDIVDVLLRLREEGQLTMDHIKGALMNIFVGGTDTSAASIAWAMAELARKPKVMKKAQEEVRKAASKKGKVEENDLAQLQYIKCVVNETLRLHLPLPLLVPRETIQHCEINGYDVSAKTRVLVNAWAIGRDEDAWENPEEFNPDRFVGSSLDYKGQDFQFIPFGAGRRICPGIQFGVETVELALANLLYAFNWELPPGVERENIDMHEAPGLVTRRATDLRLVATNYEEAN

SEQ ID NO: 9411 - protein, 99 aa, Glycine max
  unsure (1)..(99): unsure at all Xaa locations
RLMKSTRLFEHLVSXGSEELMQNHYSLLEDAHLIXRRRSALAAIDDMRADGYEPSKEMLKKVRQPCTREMDNERDAREHSVNNSLNYQQGADNRRDISV

SEQ ID NO: 9412 - protein, 374 aa, Oryza sativa
MAAASSLHAAPRVGSSSSFSSSSSAGRRSASAARSSKAESPASAASSKSDGHEVLLFEALREALIEEMKEDPTVCVFGEDVGHYGGSYKVTKGLAEMFGDLRVLDTPIAENSFTGMGVGAAMKGLRPVVEGMNMGFLLLAYNQISNNCGMLHYTSGGQFKIPIVIRGPGGVGRQLGAEHSQRLESYFQSIPGLQMVACSTPYNAKGLMKAAIRSENPVVLFEHVLLYNLKEKIPDEEYVLCLEEAEMVRPGEHVTILTYSRMRYHVMQAAKTLVNKGYDPEVIDIRSLKPFDLHTIGNSIKKTHRVLIVEECMRTGGIGASLRSAIIDNFWDYLDAPIMCLSSQDVPTPYAAPLEDATVVQPAQIVAAVEQICQ

SEQ ID NO: 9413 - protein, 188 aa, Joinvillea ascendens
VIHVGCVAKINPEAPLDKVCVLSCGISTGLGATLNVAKPPKGSTVAIFGLGAVGLAAAEGARLAGASRIIGIDLNPNRFEQAKNFGCTEFVNPKDHNKPVQEVLAEVTNGGVDRSVECTGHIDAMVSAFECVHVGWGVGVLVGVPHKDAVFKTNPMNLLNERTLKGTFFGNYKPRSDLPSVVEMYMNK

SEQ ID NO: 9414 - protein, 250 aa, Fragaria x ananassa
MGKCYPTVTEEYKKAIDKAKRKLRGLIAEKNCAPLMLRLAWHSAGTYDVKTKTGGPFGTMKQSAELAHGANNGLDIAVRLLEPIKEQFPILSYADFYQLAGVVAVEVTGGPDVPFHPGREDKPEPPPEGRLPDAGKGSDHLREVFGKTMGLSDQDIVALSGGHTLGRAHKERSGFEGPWTPNPLIFDNSYFTVLLSGEKEGLLQLPTDKALLSDPVFRPLVEKYAADEDAFFSDYALAHQRLSELGFAEA

SEQ ID NO: 9415 - protein, 216 aa, Ophioglossum pedunculosum
SKRRNGLLKKAYELSVLCDAEVAVIVFSGTGKLSEFASSSMMRRILEKHRQVVEGSQSIKPTSQDVVEYWRHEATRLKHQLGVVQETQRHMLGESLETLTYRDLQKLESKLNGALNQVRGRKNQIISERLVYLQEKEDLLNAENIMMRAKLAEIMAGGVPLMSQSMQDPAARESFLNESSTQPNPPIMKNQNGEETNLQLGLELFPTTSFGDGAST

SEQ ID NO: 9416 - protein, 305 aa, Pichia jadinii
MATEKKQSTFLIDFLMGGVSAAISKTAAAPIERVKLLIQNQDEMIKQGRLAKRYDGIADCFRRTAGDEGVVSFWRGNTANVIRYFPTQALNFAFKDKFKAMFGFKKEEGYWKWFAGNLASGGLAGGSLFGSVYSLDYARTRLANDAKSAKGTGERDSTGLLDVYKKTLASDGIAGLYRGFLPSVVGIVVYRGLYFGLYDSLKPVLLTGSLENNSWAAFLLGWVVTTGASTASYPLDTVRRRMMMTSGQAVKYDGAFDAFRKIVAAEGVKSLFKGCGANILRGVAGAGVISLYDQLQVILFGKKFK

SEQ ID NO: 9417 - protein, 332 aa, Zea mays
  unsure (1)..(332): unsure at all Xaa locations
MAPGSKAERKAALDAGAWMFNVVTSVGIIMVNKALMATHGFSFATTLTGLHFAMTTLMTLVMKWLGYIQPSYLPLPELVKFAFFANLSIVGMNVSLMWNSVGFYQIAKLCIIPVLCILEIMFDKVRYSRDTKLSIVLVLVGVAVCTVTDVSVXNSQGLLAAAIAVWSTALQQHYVHHLQWKYSLGSFNLLGHTAPAQAASLLVLGPFVDFWLTXKRVDAFNYTSIVTFFIVLSCIIAVGTNLSQFICIGRFTAVSFQVLGHMKTVLVLTLGFFFFGKEGLNFHVALGMFLAVIGMIWYGNASSKPGGKERQVYSTPSEKTREAWGAVIPIRA

SEQ ID NO: 9418 - protein, 364 aa, Saccharomyces cerevisiae
MSAPKKIVVLPGDHVGQEITAEAIKVLKAISDVRSNVKFDFENHLIGGAAIDATGVPLPDEALEASKKVDAVLLGAVGGPKWGTGSVRPEQGLLKIRKELQLYANLRPCNFASDSLLDLSPIKPQFAKGTDFVVVRELVGGIYFGKRKEDDGDGVAWDSEQYTVPEVQRITRMAAFMALQHEPPLPIWSLDKANVLASSRLWRKTVEETIKNEFPTLKVQHQLIDSAAMILVKNPTHLNGIIITSNMFGDIISDEASVIPGSLGLLPSASLASLPDKNTAFGLYEPCHGSAPDLPKNKVDPIATILSAAMMLKLSLNLPEEGKAIEDAVKKVLDAGIRTGDLGGSNSTTEVGDAVAEEVKKILA

SEQ ID NO: 9419 - protein, 231 aa, Yersinia pestis CO92
MISNLWWSLPLTLIVFFGARQLSRWAKIPLLNPLLISMVVIIPLLLVTHMPYANYFAGSKILNDLLQPAVVALAFPLYEQLHQIRASWKSIIAICFIGSITAMVSGTAIALWMGATPEIAASILPKSVTTPIAMAVAESLHGLPAISAVCVIFAGILGAVFGHSLLNLLKITTKASRGLAMGTASHALGTARCAELDFKEGAFSSLALVICGIITSLLAPFLFPVLLHLFG

SEQ ID NO: 9420 - protein, 615 aa, Legionella pneumophila
MKSTDPIKIAVLPGDGIGIEVTEATLPVFEVLDVPVILNYGDIGWEFWKKEGAAIPSRTWQLIASSDTVLLGAITSKPQREAKQELSNALKKSNPYYVSPVIQLRQGLDLFANVRPCFSIDDQSKPFNFCIIRENSEGLYCGFDYFPLPKAIHSLLAESQHWQTIPADEASCALRLQSKSGLTRLFDFAFKHAMQTGMPRVTLADKPNVLRESGEFTRKIFESTAQRYPKIQADILNVDAVALWLIKSPEKFGVIVAENMFGDILSDVGAGVMGGLGLAPSANIGDKGSYFEPVHGSGPRIRKNCANPSAMFLTISMLLNHFGYPDRAKKIVNAVMQVIKEKRFITYDLGGHATTTDMANAVIEHCARLNASCLSKDFNPTPKENLIESDTMPNLLQQLINCNSAEISDALDACGIEGGLLSIKPLSQGMKIIGPAYTIQYLPREKKGTAFHNAANYIDKVPKHSVIVIDNNGQIDCTVWGDLLTHTALRNNIMGTVVHGAVRDVESIRSTNYPVFCTGIYMCSGKNRVYKANEQCPLSINGVTINPGDIIFADDNGVLVIPNDRLQEVVNKTIAIRLTEERIKTAIASGSTLEQAREDYCYEQPWLGINKKRES

SEQ ID NO: 9421 - protein, 276 aa, Mycobacterium leprae
MFAYAAVELVGTAAGETVEPKKIMPRAINSVIARIAIFYVGSVILLALLLPYSAFKASESPFVTFFSKVGFYGAGDLMNIVVLTAALSSLNAGLYATGRVMHSIAINGSGPKFTARMSKNGVPYGGILLAAVICLCGVALNAFNPGQAFEIVLSVAALGIIAGWGTIVLCQLRLHKMAKAGIMRRPRFRMPLAPYSGYLTLAFLFAVLVVMAFDKPIGTWTVASLIVIVPALIAGWYSIRKRVMTIARERMGYTGPFPAIANPPVQPSERSHSQNP

SEQ ID NO: 9422 - protein, 247 aa, Helicobacter pylori J99
MQFTGKNVLITGASKGIGAEIAKTLASMGLKVWINYRSNAEVADALKNGLEEKGYKAAVIKFDAASESDFVEAIQTIVQSDGGLSYLVNNAGVVRDKLAIKMKTEDFHHVIENNLTSAFIGCREALKVMSKSRFGSVVNVASIIGERGNMGQTNYSASKGGMIAMSKSFAYEGALRNIRFNSVTPGFIETDMNANLKDELKADYVKNIPLNRLGSAKEVAEAVAFLLSDHSSYITGETLKVNGGLYM

SEQ ID NO: 9423 - protein, 175 aa, Pseudomonas aeruginosa UCBPP-PA14
MGSVAGQIARLKGCRVVGIAGGAEKCRFLVEELGFDGAIDYKNEDLAAGLKRECPKGIDVFFDNVGGEILDTVLTRIAFKARIVLCGAISQYNNKEAVRGPANYLSLLVNRARMEGMVVMDYAQRFPEGLKEMATWLAEGKLQSREDIVEGLETFPETLLKLFSGENFGKLVLKV

SEQ ID NO: 9424 - protein, 326 aa, Vibrio cholerae
MTQPFAIAIHGGAGTILREQMSDALRMDILATLEQAVRAGHQLLVEGADALDAVVAAVTVLEDSPLFNAGKGSVLTHNEMVEMDASVMHGAAREAGAIAGVRHIRNPIQLARDVLRHSDHVFLIGDGAEQFAFQQGHVYTEQDYFFTERRYEQLQNMKQQDRFALSEASYQSESAEQESPSEYPDDKKFGTVGAVALDQQGNLAAATSTGGITNKRFGRVGDSPIIGAGTLAENGNVAISCTGMGEYFIRYAVAGDIAARMRYLKEDVHTACETVVQGELKSVGGEGGLIAIDAQGELHFAMNSSGMYRAGIDRDGQFSVKIYADE

SEQ ID NO: 9425 - protein, 220 aa, Glycine max
  unsure (1)..(220): unsure at all Xaa locations
MTTEFVPNPKMLYRNLGNTGLRVPVFSYGGWLTVGNTQKGDIVKDLMKTAFDNGINMFDNAEAYSGGESEREMGRVIEELGWDRRDIVVTTKIFFGTGRKETQNTRGLSRKHIVEGLNQSLKNLRLDYVDIVFAHRPDRTTPLEETVRAFNHVIDQGKAFYWGTSEWSAXEIAQANEIARRLTLVGPVVEQPHYSMLHRERFRERVPPRCSRKLGYRTTI

SEQ ID NO: 9426 - protein, 225 aa, Glycine max
MLSISATRIFFLRSTTIRLSSSSSSLQFFSNPNRTLFRPFLHTSFKPLPSSFSFRTDHTMATSNAKSVHDFTVKDAKGNDINLGDYKGKVLIIVNVASQCGLTNSNYTELSQLYEKYKQKGLEILAFPCNQFGAQEPGSNEQIQEFVCTRFKAEFPVFDKVDVNGDKAAPLYKYLKSSKGGLLGDGIKWNFAKFLVDKEGNVVDRYAPTTSPLSIEKDLLKLLDA

SEQ ID NO: 9427 - protein, 360 aa, Acanthothamnus aphyllus
AVQSQKLAVRAISHLQSLPGGDIKLLCATVVDSVRDLTGYDRVMVYKFHEDEHGEVVAESKRPDLEPYIGLHYPATDIPQASRFLFKQNRVRMIVDCRASPVGVRQDDGLMQPLCLVGSTLRAPHGCHAQYMENMGSKASLAMAVIINGNDEESIGGRNATRLWGLVVCHHTSARCIPFPLRYACEFLMQAFGLQLNMELQLAAQLSEKHVLKTQTLLCDMLLRDSPTSIVTQSPSIMDLVKCDGAALYYQGKYYPLGVTPAEAQIKDIVEWLLAFHGDSTGLSTDSLGDAGYPGAALLGNAVCGMAVAYITNRDFLLWFRSHTTKEIKWGGAKHHPEDKDDGQRMHPRSSFKAFLEVVK

SEQ ID NO: 9428 - protein, 228 aa, Sinorhizobium meliloti
MTAQLTLISHHLCPYVQRAAIALHEKGVPFERVDIDLANKPDWFLKISPLGKVPLLRISQDGGEAILFESTVICEYLEETQAGPKLHPADPLARARHRGWMEFGSAILSDLWVYETTQDGATLEAKRNVLKSKFATVEAELGSGPYFAGSAFSLVDAVFAPIFRYFDVFDTISDSGVFQGLPRVTAWREALAGRPSVKAAVGEDYPQRLMAFLEKHEAALLKTERVAA

SEQ ID NO: 9429 - protein, 485 aa, Pseudomonas fluorescens PfO-1
MVTSNNKTRKSPMPVGNHPPHGETAQGGPLKRELGERHIRLMALGACIGVGLFLGSAKAIEMAGPAIMLSYIIGGLAILVIMRALGEMAVHNPVAGSFSRYAQDYLGPLAGFLTGWNYWFLWLVTCVAEITAVAVYMGIWFPDVPRWIWALAALVSMGSINLIAVKAFGEFEFWFALIKIVTIIAMVLGGIGIIAFGFGNDGVALGISNLWAHGGFMPNGVTGVLMSLQMVMFAYLGVEMIGLTAGEAKNPQKTIPNAIGSVFWRILLFYVGALFVILSIYPWNEIGTQGSPFVMTFERLGIKTAAGIINFVVITAALSSCNGGIFSTGRMLYSLAQNGQAPAGFARTSSNGVPRRALLLSIFALLLGVLLNYLVPEKVFVWVTSIATFGAIWTWVMILLAQLKFRKGLSASERAGLKYKMWLFPVSSYLALAFLVLVVGLMAYFPDTRVALYVGPAFLVLLTVLFYVFKLQPKDSVQGAMRSAS

SEQ ID NO: 9430 - protein, 207 aa, Zea mays; identical to SEQ ID NO: 1093

SEQ ID NO: 9431 - protein, 392 aa, Dicella nucifera
DLEPVNPADVPVTAAGALKSYNLASKAISRLQSLPSGNISLLCDVLVKEVRDLTGYDRVMVYKFHEDEHGDVVSECRRSDLESYLGLHYPATDIPQASRFLFMKNKVRMICDCLAPPVKVIQDERLPQPLSLCGSTLRSPHGCHAQYMTNMGTIASLVMSVTINEEDETMDGDQQQMTRKLWGLVVCHHTSPRFVPFPLRYACEFLIQVFGVQINKEVELAAQVRENHILQIQTMLCDMLLRDAPVAIITQSPNVMDLVKCDGAALYFKNKTWLLGVTPTEKQIRDIAEWLLEYHSGNTGLSTDSLMEAGYPGASVLGDAVCGMAAVSITSRDFLFWFRSHTAKEIKWGGAKHDPDDKDDGRKMHPRSSFKAFLEVVKWRSIPWEDIEMDAI

SEQ ID NO: 9432 - protein, 182 aa, Zea mays
  unsure (1)..(182): unsure at all Xaa locations
MNRKPGDWDCRACQHLNFSRRDICQRCSEPRGVADRGGGGGGGDYASFGGRGGSSFGGGFGAAGSDVRPGDWYCSCGAHNFASRSSCFKCSAYKEEAAVNSGAGGFDSDMSRXSRGYGFGSDAAGAGAGAARTTNRPGWKSGDWICTRSGCNEHNFASRMECFRCNAPRDSGSAAMTYENYL

SEQ ID NO: 9433 - protein, 168 aa, Sorghum bicolor
MAAADVEYRCFVGGLAWATNNETLEQAFANFGQVIDSKVITDRETGRSRGFGFVTFSSEQSMLDAIENMNGKELDGRNITVNQAQSRGGGGGGGGYGGGGGGYGGREGGGYGGGGGGYGGRREGGGGYGGGGYGGGGGGYGGREGGGGYGGGGGYGGNRGDSGGNWRN

SEQ ID NO: 9434 - protein, 225 aa, Zea mays
  unsure (1)..(225): unsure at all Xaa locations
MCARSMAPRRPCTTAIALPWLALFLCPHLAGGGAVRFFLASSLDLRPITGGFALFSMAAASSATSVHDFTVKDASGKDVDLSTYKGKVLLIVNVASQCGLTNSNYTELSQLYEKYKDQGFEILAFPCNXQFGGQEPGTNEEIVQFACTRFKAEYPIFDKVDVNGDNTAPIYKFLKSSKGSLFGDNIKWNFSKFLVDKEGHVVERYAPTTSPLSIEKDIKKLLGSS

SEQ ID NO: 9435 - protein, 158 aa, Ferroplasma acidarmanus
MKMSSVKEISADELKVGISRVWIDTNNLDRVLDATSREDIKKLIGLNIIQRRDKKNHSNQRLKKRINQLTKGRRRGPGSVRGTKYARYPRKRRWITTIRALRDELKTLKEKESIDKTTYRKYYRTIKSGSFSSRAQLVSHLKTESLIKEDKHENDTST

SEQ ID NO: 9436 - protein, 338 aa, Glycine max; identical to SEQ ID NO: 4657

SEQ ID NO: 9437 - protein, 148 aa, Zea mays
MAGIGPIRQDWEPVVVRKKAPTAAAKKDEKAVNAARRSGAEIETMKKFNAGMNKAASSGTSLNTKRLDDDTENLAHERVPSDLKKNLMQARLDKKLTQAQLAQIWCSLQMINEKPQVIQEYESGKAIPNQQIIGKLERALGTKLRGKK

SEQ ID NO: 9438 - protein, 407 aa, Bradyrhizobium japonicum USDA 110
MSAVPLRNNKAAASAVRSVTVLGATGSIGDSTMDLLRASPERYRVEALTANGNVEALAKLAKEFSARFVAIADTSKFAELKAALAGTSTECGAGESAVIEAGARPADWVMAAVSGAAGLKPALAAVDRGAHVALANKECLVCAGDFFMQRAAKAGACILPADSEHNALFQALGSGNRDELVRVIITASGGPFRTWKPADIEQATLAQALKHPNWSMGQKITIDSASMMNKGLEVIEASYLFALSPDEIDVLVHPQSIIHGMVEFSDRSVVAQLGSPDMRTPIAHCLGWPDRIKGPAAKLDLAKIGQLTFEAPDFERFPGLRLAYDSLRTGKGATTVYNAANEVAVAAFIAGKIRFGAIARLVEATLEDWIRGGNQTPLTSADDAISVDHVARNRAAALLPQIALKAS

SEQ ID NO: 9439 - protein, 281 aa, Archaeoglobus fulgidus DSM 4304
MVKEVFESIEDYEKSLEERIQSGSMGYRKMFDLTGKVAIVTGATGGLGGPIALGLADFGCDVVVVGRRLEVLEKLKESIEKLGQRALAVKCDITSEEDVANLVNRTVEEFGRIDILVNCAGINIPKPAEEYPLEDWNKVMDANVTGVFLVCREVGKVMVKQNGGKIINVSSVRSSYGMPKNYIAYCSSKAAVNMITKQLACEWAKYNILVNAIAPTVIATPLTAHIMKDPELSKTMKSRILLGRWGYPDDLIGAVVFFASDASNFVTGQILYIDGGVTSWA

SEQ ID NO: 9440 - protein, 143 aa, Kokia drynarioides
LGTSTFSEYTVVHVGQVAKINPEAPLDKVCVLSCGMSTGFGATVNVAKPKKGGSVAVFGLGAVGLAAAEGARVCEASRIIGIDLNPNRFEEAKKFGCTEFVNPKDHNKPVQEVIAEMTGGGVDCSIECTGSIQAMISAFECVH

SEQ ID NO: 9441 - protein, 422 aa, Thiobacillus sp.
MVTKQDVEAAYLLLLGRPAEPGAAEYWMENVYHTIDLVTGLMASDEFRINRLPRLVEAGLSLSDFAPAAAPKALADNGPPMQAALHRGIGQIEVVEINRPEALPGTVVVKVGASGICGTDLRAYRQDPNSQDLPHGHEFAGTIVEVGEGVSRDRIGKRVTADLFLNAMCGNCQFCISGHAYHCIDKALPFRSGGFAEYLRVRNAATFDLPDSIDDALGALVEPLAVSTHAIRLVGVQPGMIGVVIGAGTIGLCAIAAALHAGATNVFVVARHAFQGELARAIGATDILPDDIGSAINRIREVAPHGADFVIEAVGGGQATIDQATRFLAPRGRVGIVGETGPGIKVVEAYPALMKELTFLYSNCYGYLDGKHDFEVAIENLALDGERLRKLITHEFLIADAPLAFQTANNKKFSSVKVQLKP

SEQ ID NO: 9442 - protein, 424 aa, Adiantum capillus-veneris
DLEPYLGLHYPATDIPQASRFLFMKNRVRMICDCRAIPVKVIQDRELRQPLSLAGSTLRAPHGCHSQYMANMGSAASLVMAVLVNDNEEGSSSRSHKPKPRKLWGLVVCHHTNPRAVAFSLRSACEFLMQVFGLQLNMEVELAAQMREKHILRTQTLLCDMLLRDAPIGIVSESPNIMDLVKCDGAALYYGKKFWLLGTTPTEPQIRDLAEWLLDVHRDSTGLSTDSLADAGYPGAAALGDAVCGMAAAKITSRDFLFWFRSHTAKEIKWGGAKHDPEDRDDGRKMHPRSSFKAFLEVVKRRSLPWEDVEMDAIHSLQLILRGSFQDIDDSDTKTMIHARLNDLKLQGMDELSTVANEMVRLIETATAPIFAVDAGGFINGWNAKIAELTGLSVEEAMNRSLVGDLVVEDSAEIVERLLCLALQ

SEQ ID NO: 9443 - protein, 206 aa, Oryza sativa (japonica cultivar-group)
MVSLKLQKRLASSVLKCGKGKVWLDPNEVNEISMANSRQNIRKLVKDGFIIKKPQKIHSRSRARRAHEAKQKGRHSGYGKRRGTREARLPTKILWMRRMRVLRRLLRKYREAKKIDKHMYHDMYMKVKGNMFKNKRVLMESIHKSKAEKAREKTLSDQFEAKRAKSKASRERKIARRDERLAQGPREPAAPAVPAQTAAAPKKYKK

SEQ ID NO: 9444 - protein, 193 aa, Burkholderia fungorum
MAAKKILFLTGDFAEDYETMVPFQALQAVGHVVDAVCPNRKAGDRIKTAIHDFEGDQTYTEKPGHQFTLNATFDDADPRQYDALAIAGGRAPEYLRLNPKVIEVVRQFAEAGKPIAAICHAAQLLAAADVIRGKRISAYPACAPEVKMAGGEYADIPVDAAITDANFVTAPAWPAHPEWLRQFLVLLGTRIEL

SEQ ID NO: 9445 - protein, 233 aa, Staphylococcus aureus subsp. aureus Mu50
MINHLALNTPYFGILLSVIPFFLATILFEKTNRFFLFAPLFVSMVFGVAFLYLTGIPYKTYKIGGDIIYFFLEPATICFAIPLYKKREVLVKHWHRIIGGIGIGTVVALLIILTFAKLAQFANDVILSMLPQAATTAIALPVSAGIGGIKELTSLAVILNGVIIYALGNKFLKLFRITNPIARGLALGTSGHTLGVAPAKELGPVEESMASIALVLVGVVVVAVVPVFVAIFF

SEQ ID NO: 9446 - protein, 1299 aa, Ceratodon purpureus
SSTTSAKSKHSVRVAQTTADAALEAVYEMSGDSGDSFDYSKSVGQSAESVPAGAVTAYLQRMQRGGLIQNFGCMVAVEEPNFCVIAYSENASEFLDLIPQAVPSMGEMDVLGIGTDIRTLFTPSSSAALEKAAATQDISLLNPITVHCRRSGKPLYAIAHRIDIGIVIDFEAVKMIDVPVSAAAGALQSHKLAARAITRLQALPGGDIELLCDTIVEEVRELTGYDRVMAFKFHEDEHGEVVAEIRRMDLEPYMGLHYPATDIPQASRFLLMKNRVRLIADCYASPVKLIQDLDIRQPVSLAGSTLRAPHGCHAQYMGNMGSIASLVMAVIINDNEEYSRGAIQRGRKLWGLVVCQHTSPRTVPFPLRSVCEFLMQVFGMQLNLHVELGAQLREKHILRTQTLLCDMLLRDAPIGIVSQTPNIMDLVKCDGAALYYGKRVWLLGTTPTENQIKEIADWLLEHHNDSTGLSTDSLADANYPGAHLLGDAVCGMAAAKITAKDFLFWFRSHTATEVKWGGAKHDPDEKDDGRKMHPRSSFKAFLEVVNKRSPPWEDVEMDAIHSLQLILRGSFRDIADSDTKTMIHARLNDLKLQGVEERNALANEMSRVLETAAAPILAVDSRGMINAWNAKIAQVTGLPVEEAMHCSLTKDLVLDESVVVVERLLSLALQGEEEQNVEIKLKTFGTQTTERAVILIVNACCSRDASDTVVGVFFVGQDVTEQRMFMDRFTRIQGGEKTTVQDPHPLMRPSFDGDEFGRTFKRNSALGGLKDHATGSVERLDLYLRRAEECMEVMETIPSPKFNNKQCQYLAGKLKAVLQSASLFLRISHHEHHELGASIDMGRHVEIFKLLLALAKEIESFIQGCCKDEWIKAAMTLTNVSEYVSSMGFNLELCKIAFCKSCAASGSLTLDQIEVICKDEAEVVKRNATIDVDTLFAKVIYDLTEKTLSSDQNDLAIYLLQRLKRAKPILPSFSSRPSWWNFYDDWSFSEKFFQWIQITGSLGSGSSATVEKAVWLGTPVAKKTFYGRDNEDFKREVEILAELCHPNITSMFCSPLYRRKCSIIMELMDGDLLALMQRRLDGNEDHDSPPFSTLEVVDIILQTGEGMNYLHEKGIIHRDLKSMNILVKSVKVTKSEIGYVHVKVADFGLSKTKDSSTRYSNQTWNRGTNRWMAPEVINLGYESTEGEISFDGKVPKYPLKSDVYSFGMVCYEVLTGDVPFPEEKNPNNVKRMVLEGVRPDLPAHCPIELKALITDCWNQDPLKRPSFAVICQKLKYLKYLLMTGFSSYQDSYPSTEELS

SEQ ID NO: 9447 - protein, 860 aa, Aspergillus kawachii
MRFTLIEAVALTAVSLASADELAYSPPYYPSPWANGQGDWAQAYQRAVDIVSQMTLAEKVNLTTGTGWELELCVGQTGGVPRLGVPGMCLQDSPLGVRDSDYNSAFPSGMNVAATWDKNLAYLRGKAMGQEFSDKGADIQLGPAAGPLGRSPDGGRNWEGFSPDPALSGVLFAETIKGIQDAGVVATAKHYIAYEQEHFRQAPEAQGYGFNISESGSANLDDKTMHELYLWPFADAIRAGAGAVMCSYNQINNSYGCQNSYTLNKLLKAELGFQGFVMSDWAAHHAGVSGALAGLDMSMPGDVDYDSGTSYWGTNLTVSVLNGTVPQWRVDDMAVRIMAAYYKVGRDRLWTPPNFSSWTRDEYGYKYYYVSEGPYEKVNHYVNVQRNHSELIRRIGADSTVLLKNDGALPLTGKERLVALIGEDAGSNPYGANGCSDRGCDNGTLAMGWGSGTANFPYLVTPEQAISNEVLKNKNGVFTATDNWAIDQIEALAKTASVSLVFVNADSGEGYINVDGNLGDRKNLTLWRNGDNVIKAAASNCNNTIVIIHSVGPVLVNEWYDNPNVTAILWGGLPGQESGNSLADVLYGRVNPGAKSPFTWGKTREAYQDYLVTEPNNGNGAPQEDFVEGVFIDYRGFDKRNETPIYEFGYGLSYTTFNYSNLEVQVLSAPAYEPASGETEAAPTFGEVGNASNYLYPDGLQKITKFIYPWLNSTDLEASSGDASYGQDSSDYLPEGATDGSAQPILPAGGGPGGNPRLYDELIRVSVTIKNTGKVAGDEVPQLYVSLGGPNEPKIVLRQFERITLQPSEETKWSTTLTRRDLANWNVEKQDWEITSYPKMVFVGSSSRKPPLRASLPTVH

SEQ ID NO: 9448 - protein, 214 aa, Glycine max
  unsure (1)..(214): unsure at all Xaa locations
MGIAAEAHNVKILGSGTEYIVLAHGFGTDQSVWKHFVPYLVDNFRVILYDNMGAGTTNPDYFDFERHSILEGYASDLLAILEELQVESCIFVGHSVSAMIGAIASISRPDLFTKLIMVGASPRYLSVVLCPPGLEQEDLDQLFDAMAANXKAWCYGFAPLAVGGDMESVAVQEFSRTLFNMRPDIALXVSRTIFQSDMRQILXLFSVPCHIIQA

SEQ ID NO: 9449 - protein, 169 aa, Brassica oleracea
TSFKFRQSPSSSSLNLRLNSRNWALNVSTPLTVDSSSSPPIEEEPKTQRFDPGAPPPFNLADIRAAIPKHCWVKNPWKSMSYVVRDVAIVFALAAGAAYLNNWLVWPLYWIAQGTMFWALFVLGHDCGHGSFSNDPRLNSVVGHLLHSSILVPYHGWRISHRTHHQNHG

SEQ ID NO: 9450 - protein, 143 aa, Oryza sativa
MAMAYKMATEGMNVKEECQRWFMEMKWKKVHRFVVYKIDERSRAVLVDKVGGPGEGYEELVAALPTDDCRYAVFDFDFVTVDNCQKSKIFFIAWSPTASRIRAKILYATSKQGLRRVLDGVHYEVQATDSSEMGYDVIRGRAQ

SEQ ID NO: 9451 - protein, 405 aa, Methanosarcina acetivorans C2A
MITNSRKGIHLTENIIESGDPQARYDSVIEKDSKYVMQTYGRQPLVLSKGKGAVVQDIYGKEYIDCVAGIAVNNVGHCHPTVVKAIQAQAENLIHVSNLYYTEIQAEFAETLASITGMERVFFCNSGAESVEAAMKLARVATGKSAFVAAEHSFHGRTIGALSVTHKSMYRDPFMPPVSSETTFVPYSDAEAIRQAISENTAAVILEPIQGEGGINIPDPGYLKEVREICDETGALLIFDEVQTGFGRTGTWFCKEQFGVEPDIMSMSKAIGGGFPMGAIAAHNGINFGRGQHASTFGGGPLACAAALASVKVIREEKLLERSKEMGAYFMKKLAGMVRDDVVEVRGKGLMIGVEIKYPCGKFVDFAREQGVLVNCTSDSVLRLVPPLVITKEQIDTVVDVLEQA

SEQ ID NO: 9452 - protein, 427 aa, Dianthus caryophyllus
QAYHLQSWLVKHRKNYNALGEKEKRFAIFRDNLEFIDQHNNNNNGGGGGEFELGLNKFADLTNDEFRRIYFGVKRPEKAESVKSDRYAVKEGDELPESVDWRKKGAVSHVKDQGQCGSCWAFSAIGAVEGINKIVTGDLITLSEQELVDCDTSYNSGCDGGLMDYAFRFIINNGGIDTDKDYPYKATDGSCDSNRKNAKVVTIDGLEDVPANNEKALQKAVAHQPVRLAIEAGGRDFQLYKSGVFTGSCGTSLDHGVVAVGYGTTDDGKDYWIVRNSWGDDWGEDGYIRMERNTESKSGKCGIAIEPSYPVKTSPNPPNPGPSPPSPPPAPKVVCDSYSSCPSATTCCCVYEYGPYCYMWGCCPLEAASCCDDDSSCCPHDYPVCNTQQGTCSKSKNNPFTVKALKRTPLHSTLISGGFKDLKKTSS

SEQ ID NO: 9453 - protein, 493 aa, Aster tripolium
MAGVINGDEREIQKNYWVEHSVDLTVESMMLDSMASDLDKEERPEVLSLLPSYEGKRVLELGAGIGRFTGELAKTAGEVIALDFIESVVKKNESINGHCKNVKFMCADVTSPDLRFPAESIDLIFSNWLLMYLSDKEVEDIAERFLKWVKVGGHIFFRESCFHQSGDHKRKQNPTHYREPRFYTKAFKQCHMTDASGNSYELSLIGSKCIGAYVRSKKNQTQICWIWQKVASSEDDRGFQQFLDNGQYKSSGILRYERIFGPGFVSTGGLDPTKEFGALLDLKPGQKVLDVGCGIGGGDFYMADNFDVDVIGIDLSVNMIAFALERSIGLQCSVEFEVADCTKKSYPDNSFDVIYSRDTILHIQDKPALFRTFYKWLKPGGKVLISDYCRKSGKPSEDFAEYIKQRGYDLHDVETYGKMLKDAGFGEVIAEDRTKQFIEVLQRELERVEKEKEEFIQDFTEGDYNDIVGGWKAKLVRTGSGEQRWGLFIAKKK

SEQ ID NO: 9454 - protein, 385 aa, Novosphingobium aromaticivorans
MTRTISVLGATGSIGASTLDLIRRERDKWRVVALTANGNARELAALAREFGAEVAVVADESALAALRDALAGSGIEAAAGPGALIDAAALGAEVTVAAIVGCAGLAPTMAAIERGGIIALANKEALVSAGDVMMAAVERHGATLLPVDSEHNAIFQCLQGNDIAHVRAITLTASGGPFRDWTTEQLQRATPAEAVRHPNWSMGAKISVDSATMMNKGLEFIEAFHLFPVGVERLRIIVHPQSIVHSMVEYRDGSTLAQLGPSDMRVPIASALAWPARMDTPCDPLDLATIGQLTFRAPDEQRFPATRLAREAVIAGGAAPAVLNAANEMAVAAFLGGQIGFTRIVQCCEDVLAHGLAPAPRSLAEVIAVDAEARARALELMEPVR

SEQ ID NO: 9455 - protein, 355 aa, Zea mays
MVSAVLRTILVTGGAGYIGSHTVLQLLQQGFRVVVVDNLDNASEAALARVAELAGHDGANLVFHKVDLRDRHALVDIFSSHRFEAVIHFAGLKAVGESVHKPLLYYDNNLVGTITLLEVMAANGCKKLVFSSSATVYGWPKEVPCTEEFPLCATNPYGRTKLVIEDICRDVHRSDPDWKIILLRYFNPVGAHPSGYIGEDPCGVPNNLMPYVQQVAVGRLPHLTVYGTDYSTKDGTGVRDYIHVVDLADGHIAALRKLYEDSDKIGCEVYNLGTGKGTSVLEMVAAFEKASGKKIPLVFAGRRPGDAEIVYAATAKAEKELKWKAKYGIEEMCRDLWNWASKNPYGYAGSRDNSK

SEQ ID NO: 9456 - protein, 244 aa, Glycine max
MRLNLCHVSLGFVLKFLNFLQCFVGLSILLYSLWMFNEWDHSVPPDPPLPPAFHFYLKLNSINLPAPWFIYNFMGFGILVLCISFLGCIAAEMINGCCLCFYSILVVVLLLLEASLVGFIALDSDWEKDIPFDPTGQLDELRAFIEDNIDTCTWVGIAVLVIQALSLLLALILRATVSSRRADFDYEDGYDVRGRSWEPLLNPQPGQPSGSSKGDNSGNHSDFWSVRMREKYGLNHGDKSSYQP

SEQ ID NO: 9457 - protein, 363 aa, Schizosaccharomyces pombe
MSKKPVLNLDTSNGFSEEYISHPERNDNQGIVEITDLVFSSESKLTQRKESRDSKTFVPSFLEELDDDHLHELVTNGGILYMNSLGEGVSGSVRKCRIRGTQMIFAMKTVLAAPNTALQKQLLRELKINRSCTSPYIVKYYGACYNNAECQLNIAMEYCGAGSLDAIYKRVRSQGGRTGERPLGKIAFGVLSGLSYLHDRKIIHRDIKPSNILLTSKGQVKLCDFGVSGELVNSLAGTFTGTSYYMAPERISGGSYTISSDIWSLGLTLMEVALNRFPFPPEGSPPPMPIELLSYIINMPPPLLPQEPGIKWSKSFQHFLCVCLDKDKTRRPGPQKMLTHPWVKAFERIHVDMEEFLRQVWSD

SEQ ID NO: 9458 - protein, 348 aa, Carica papaya
MAIICSFSKLLFVAICLFGHMSLSYCDFSIVGYSQDDLTSTERLIQLFNSWMLKHNKNYKNVDEKLYRFEIFKDNLKYIDERNKMINGYWLGLNEFSDLSNDEFKEKYVGSLPEDYTNQPYDEEFVNEDIVDLPESVDWRAKGAVTPVKHQGYCESCWAFSTVATVEGINKIKTGNLVELSEQELVDCDKQSYGCNRGYQSTSLQYVAQNGIHLRAKYPYIAKQQTCRANQVGGPKVKTNGVGRVQSNNEGSLLNAIAHQPVSVVVESAGRDFQNYKGGIFEGSCGTKVDHAVTAVGYGKSGGKGYILIKNSWGPGWGENGYIRIRRASGNSPGVCGVYRSSYYPIKN

SEQ ID NO: 9459 - protein, 110 aa, Zea mays
AIRSLIEFGFAAKERADVRLYYGDTSLKSMSYHERLSNWESTGIKIIPVLSQPDDSWKGERGYVQDAVFRNKNIVNPSSTGAILCGPNEMQEVCICVVSRLLHNFTIKHA

SEQ ID NO: 9460 - protein, 308 aa, Thermosynechococcus elongatus BP-1
MLILDTLERGHRDLVESVLKTELIVGDIGDRPLLDWLFQTYPVTAVMHFAAYIEVGESIHSPDRFYQNNVHGALTLLQAMVAAKIPYFIFSSTAAVYGVPPEIPISETCPCAPINPYGRSKWMVEQMVADMGTAYGLKSVIFRYFNAAGADPHSRLGEDHRPETHLIPLVLQAAMGRRPHIAIYGTDYPTPDGTCIRDYIHVVDLAQAHVRGLKYLLSGGNSQIFNLGNAQGFSVRQIIETAQRVTGCSIPVIEGDRRAGDPAILVANSDRARCLLGWQPQYPDIEQIIHHAWQWHQRRHRGNHIIMS

SEQ ID NO: 9461 - protein, 490 aa, Rhizobium etli
MTVMESTRTEADGQVFAEEDLGYHKALKPRQIQMIAIGGAIGTGLFLGAGGRLAAAGPALVLVYALCGFFAFLVLRALGELIVHRPTSGSFVSYAREFYGEKLAFAVGWMYWLTWAMTAVADVTAVALYMNFFKAYVPWIAMIDQWVFAFAALVLVLSMNLLSVKVFGELEFWFSLVKVLALLIFLIVGVYFVVTGTPIDGHVPGLNTITDFGGMFPNSVLPALVVIQGVVFAYASIELIGTAAGETENARKVMPRAIRTVVLRLVVFYVGSVLLLSLLLPYTAYKGGESPFVTFFGKIGIQGADVVMNLVVLTAVLSSLNAGLYSTGRILHSMAVSGSAPAALAKMNRSGVPYGGIAVTAVVTAFGVVLNAVVPAEAFEIGLNVAALGIIAAWGVIVLCQLKLWQLSRQGKLARPEFRMFGAPYTGLLTLGFLAIVVILMALDYPVGTYTVASLLLIIPALVVGWLLMRERIHMIAAEQGDERGGFDLA

SEQ ID NO: 9462 - protein, 371 aa, Sinapis arvensis
SSNKTLVSPGNDFELGFFRTTPSSRWYLGIWYKKLSERTYVWVANRDNPLFNSIGTLKISGNNLVLLGQSNKSVWSTNLTRGNERSPVVAELLANGNFVMRDSNNNSASGILVAKFRLPYRYLLPEMKLGYDLRTGLNRFLTSWRSSDDPSSGNYSYKLQNRRLPEFYLSSGVFRLHRSGPWNGIRFSGIPEDEKLRYMVYNFTENSEEVAYTFRMTNNSIYSRLTISSEGIFQRLTWNPSLEMWNLFWSSSSGPPCPIGFIMLGPYSYCGPLNTSPICNCIRGFNPSNMEQWDQRSWSGGCIRRTRLRCSGDGFTRMKNMKLPETTMAIVDRSIGVKECEKRCLSDCNCTAFANADIPERWVGMCDVDRR

SEQ ID NO: 9463 - protein, 550 aa, Oryza sativa
MAAPAAESAVVGVGVDSATSAAVRDGFAELERQQQLLATCTRLYQQLTEHFGSLERRLAARSETLRTKRRFLDVRTSRRLEALRRREASIDGSVSLALSRLDSLAKGDAGTTGSASADAAGIAEGLRSLCASMDSAGFFTFVVARRKEVDALRAELPDALKRCVDPARFAMDAVSEVFPIDKRAVRSPTDLAWACVLILEAVVPSLADPDPEIGAARPMVPQAARERARGMAREWKDAAEKKGGVEGAKPPDAHAFLQHVATFAVAEKEDKELYRRIVVSFSWRRQMPRLAITLGLEDEMDDIIEELITKGQQLDAVNFAYEAGLQEKFPPAPLLKAYLEDSKKIPSNSDNLSTSTGQSGSNANKKEQSALRAVIKCVEDHKLEAEFPLEDLRERLEELEKAKTEKKKAASSSSSGGSSGPANKRIRASTGGPMPPAKAGRLTDYTGTPSSPATTTTNATFIRSPSHASYGTASPYSYDRPAAHPLYCGQNTLAMREPYAYHHPSEVSSVGLGMSYPSPPMTYPAYAGYSNGIGYSNAMAPAFHHQAYYR

SEQ ID NO: 9464 - protein, 195 aa, Zea mays
MVAAVAMDALVCRVAVAAGRGMVGTVVVVADGRLARGLGMVEVGNAAVVVVAVVTTTVEAGNVVVVVVLLALHLTDHTLAEFQRRVMLMGLLCKNAATCICIWELQKMTLLWKEVDRMPNLWCLEFYGKHMKMKCLGNSGLLMLSLKAKHMNRLVTYNLLKREWQKVPDCMLPWSRKRQWITCGTAFDPVPCALV

SEQ ID NO: 9465 - protein, 282 aa, Oenococcus oeni MCW
MTQQIQWFPGHMAKTIREIGEQMKLVDFSLEIVDARAPQTTQNPQIMEMIAVKPVFLVLNKIDLADPRQVTKFINKNKDKFSGILTTDAKMGVLSKDFLRQLKNNSFFADLSKNNTAANLKALVVGTPNVGKSTFINHLAGKNIARTANKPGVTHFLYWIRTRYNLVFLDTPGLLWPKFEDQEIATKIGILGGIKDNLLASDDLALWLISFLQKNYPTAIATRYKISHFPLDNPIAALMSITSQLGLRQDFESASQRLINDFRSGKFGLISLDFYGDDYLDN

SEQ ID NO: 9466 - protein, 450 aa, Pseudomonas putida KT2440
MQPDHSASGNGQLRKTLRLWHVIIIGLAYLTPMTVFDTFGIVSGITAGHVPSAYILALAGILFTAVSYGTLVKRFPQSGSAYTYTQRAINPHVGFLVGWSSLLDYLLLPMVNALLAKLYLSAMFPEVPEWMWVAGFVTLISLINMRSVNLVAHFNLLFVGVQVAIIAVFIYLCVRGLDQGEGLGTTWSLIPFADSQTQFSALAAGATILCFSFLGFDAVTCLSEETRDPAKTIPRAIFLTALIGGVVFITVSYFIQAYFPTMARFHDQEAALPEIALYVGGKLFQSIFIACTVINTIASGLASQTSVSRLLYVMGRDNVIPASVFARLHSRYKTPVLNIAVVGLISLSAIFFDLVTATSIINFGALVAFSFVNLSVINHCYLREGNRKGLANQLKYLVLPTIGFCIIVSLWLDLNAHSLMFGGIWAALGLVYLGWLTKAFRAAPPNYVAE

SEQ ID NO: 9467 - protein, 182 aa, Pseudomonas putida KT2440
MAIRSFQQHTPKVGPRAFVDRSAVVLGDVEIGEDSSVWPLTVVRGDMHRIRIGARTSVQDGSVLHITHAGPFNPDGFPLIIGDEVTIGHKVMLHGCTLGNRILVGMGSTIMDGAIVEDEVIIGAGSLVPPGKRLVSGYLYMGSPVKQARLLNDKERAFFSYSAGNYVKLKDQHLAEGYDQPE

SEQ ID NO: 9468 - protein, 423 aa, Aeropyrum pernix
MLAGLGEGGRVYIADLAIGPVALRDDGSIEEYELFPRSVDEAVTEALRLEEEGFTLAHEKLGKKLVESGVGSLVVESEDTARHFSKLGLSVKVEPGNNVALSARERLVSLGVELGFFGSEDDALSWLYEVEVEYTRRKLRGAAQKRDMLAAQAIRAIDDIDKTVNLFVARLREWYSIHFPELNDLVREHEDYVKIVSAVGHRDNITVERLVDLGFSEEKARRIAEAAKQSIGADLSEIDIQAVQTLARITSELYQLRRRLTEYIEQVMNEVAPNITALVGPLLGARLISLAGGLDKLARMPASTIQVLGAEKALFRALRTGGKPPKHGIIFQYPDIHRSPKWQRGKIARALAAKLAIAAKVDAFTGRFIGDKLREELRRRIAEIKKIYAKPPKRKREEKPPQPRRARPPRRGRPPRRRRGGRR

SEQ ID NO: 9469 - protein, 351 aa, Mycobacterium leprae
MTVGFTSDIKNLLPMLAVFKPTVVVSVPRVFEKVYNTAEQNAANEGKSRIFAMAAQTAVEWSEASHRGGPGLLLRARHAVFDRLVYRKLRAALGGDCHASVSGGAPLGARLGHFYRGVGLTIHEGYGLTETSAAITLNQAGNVKVGTVGNLLPGNSMRIADDGELLVRGNVVFSGYWHNEQGTIEAFTEGWFKTGDLGAIDEDGFLTITGRKKEIIVTAGGKNVAPALLEDQLRAHPLISQALVVGDAKPFVGALITIDPEAFNGWKQRNSKAADAAIGDLTTDPDLVAEVDAAVKQANLSVSHAESIRKFRILPVDFTEQTGELTPTMKVKRNVVAQKFASDIEAIYEKD

SEQ ID NO: 9470 - protein, 381 aa, Triticum aestivum
RQDDGSGSSSRAQGGDEGPSADGFDPGAPPPFGLADIRAAIPKHCWVKDPWRSMGYVVRDVVVVLALAATAARLDSWLAWPVYWAAQGTMFWALFVLGHDCGHGSFSNNAKLNSVVGHILHSSILVPYNGWRISHRTHHQNHGHVENDESWHPLPEKLYRSLDSSTRKLRFALPFPMLAYPFYLWSRSPGKSGSHFHPSSDLFQPNEKKDILTSTTCWLAMAGLLAGLTVVMGPLQILKLYAVPYWIFVMWLDFVTYLHHHGHNDKLPWYRGKAWSIYTGGLTTLDRDYGWLNNIHHDIGTHVIHHLLPQIPHYHLVEATEAAKPVLGKYYREPDKSGPFPFHLFGALARSMKSDHYVSDTGDIIYYQTDPKLAAGAHTSD

SEQ ID NO: 9471 - protein, 152 aa, Zea mays; identical to SEQ ID NO: 631

SEQ ID NO: 9472 - protein, 425 aa, Daucus carota
ACKSILKRKLVSKNDKEDIKREIQILQHLSGQPNIVEFKGVFEDRQSVHLVMELCAGGELFDRIIAQGHYSERAAATICRQIVNVVHVCHFMGVMHRDLKPENFLLSSKDKDAMLKATDFGLSVFIEEGKVYRNIVGSAYYVAPEVLRRSYGKEIDIWSAGVILYILLSGVPPFWAENEKGIFDAILEGVIDFESEPWPSVSNSAKDLVRKMLTQDPRRRITSAQVLDHPWMREGGEASDKPIDSAVLSRMKQFRAMNKLKQLALKVIAESLSEEEIKGLKSMFANMDTDKSGTITYEELKSGLARLGSKLSEVEVQQLMDAADVDGNGTIDYLEFITATMHRHKLESYEHQAFQYFDKDNSGFITKDELESAMKEYGMGDEATIKDIISEVDSDNDGRINYDEFCAMMRRARNRRKLFSVSLTS

SEQ ID NO: 9473 - protein, 392 aa, Mascagnia sepium
DLEPVNPADVPVTAAGALKSYKLAAKAISRLQSLPSGNISLLCDVLVKEVRDLTGYDRVMVYKFHEDEHGEVVSECRGSDLESYLGLHYPATDIPQASRFLFMKNKVRMICDCLAPPVKVIQDERLPQPLSLCGSTLRSPHGCHAQYMTNMGTIASLVMSVTVNEDDDMVDGDQPQMTRKLWGLVVCHHTSPRFVPFPLRYACEFLIQVFGVQINKEVELAAQVGEKHILQIQTMLCDMLLRDAPVAIITQSPNVMDLVKCDGAALYFKNKTWLLGVTPTEEQIRDIAEWLLEYHSGNTGLSTDSLMEAGYPGASALGDAVCGMAAVSITSGDFLFWFRSHTAKEIKWGGAKHDPDDKDDGRKMHPRSSFKAFLEVVKWRSMSWEDIEMDAI

SEQ ID NO: 9474 - protein, 735 aa, Neurospora crassa
MSSPQTSPAPDVGTNIMNSGKPKCGGGEEVGEYDLGLHVAGLFLVMLFSILGAGFPVVAKKVSWVKVPTKVFFMCKHFGTGVLIATAFVHLLPTAFGNLMDPCLPDLFTTQYPAMPGVIMMGSMFILFVIEMWLNSKTGGHSHGGPTGFDNHSHGGNSLAAAQASLAQGNGVNRPSQHRRTNTEDTLFESPSDDIDYEKAMAQELYAEQVRRKAYTQTPPRNPFTNDYDDDDHYEQLSPRSEMPPWFIVFYEQYVRQRLELVNMIKATANRQQAFLPQPDTTSSSNENRKSLIPASIMDSPYRDVETGEPVHPLVYKKMSLNITLLEGGILFHSVFVGMTVSITIEGFTILLIAILFHQMFEGLGLGSRIAAVPYRQGSPRPWLLVVAFGTTAPIGQAIGLLARSSYDPNSAFGLIIVGVFNAISSGLLLYAALVDLLAEDFLSEEAQRIMTKKDKITAFIFVLLGECVKRLRLIFRFSLAQFSTGRRRGLMVHITANTPRSIKHHQQQILCITTSASFLVTVLAGIYPSKTHSPDRSIQAQQRNTMCGNYYQHHAPCGHGGIVSVNSCRALGSTCFGPDPSKGMDITLPPINSRCSDCHAAAHQPNPDARLDENDPYRKEARERAAALETEARIFRAEQEEKLKREKAKQEEEKRLAAEVKKLEKEKREKKKIMKRKIADDAESTELPAKKVREDKKGRKGKKGNTKEMKVSISEHRSYDGGQELPLAPGSGLG

SEQ ID NO: 9475 - protein, 141 aa, Zea mays; identical to SEQ ID NO: 2009

SEQ ID NO: 9476 - protein, 618 aa, Oryza sativa
MEEEGADHRPPSSSSGGRGFLSGLCAAALRRKPISAHAAHAASGEGLVRQLGVFELVLLGIGASIGAGIFVVTGTVARDAGPGVTISFVLAGAACVLNALCYAELASRFPAVVGGAYLYTYAAFNELTAFLVFTQLMLDYHIGAASIARSLASYFVQFLELIPFLKGHIPTWIGHGEEFFGGVVSVNILAPILLIILTTILCYGVKESSAVNTFMTTLKIVIVIVVVFAGVFEVDVSNWSPFMPNGFKSVVTGATVVFFAYVGFDAVANSAEEAKKPQVISVTTHICYYDSMIFALTSLSAHAFKILQRDLPIGILGSLLACVLLYVAVCLVITGMVPYTLLGEDAPLAEAFAAKGLKFVTVLISIGAVAGLTTTLLVGLYVQSRLYLGLGRDGLLPSIFAKVHPTRHTPLHSQIWVGCVAAVLAGLFNVHELSHILSVGTLVCKLQLIFAITSLQHITTGYSVVSACVITLRWNDKTTSCRSLGNMSIWQEGVLCLVIIALCGFVAGMCYRFSYAIAFMIIALLIAVAAGFALQFRQVYVDPPGFSCPGVPIVPMVSVFFNMLLFAQLHEEAWYRFVILSLLAVGVYAGYGQYHAVPSSSDHPHPAVAYHGIPSEAP

SEQ ID NO: 9477 - protein, 208 aa, Triticum aestivum
  unsure (1)..(208): unsure at all Xaa locations
XDCSPLMLRLAWHSAGTFDVSSKTGARRHAGLDIAVRMLEPIKEEIPTISYADLYQLAGVVAVEVSGGPVIPFHPGREDKPQPPPEGRLPDATKGSDHLRQVFGKQMGLSDQDIVALSGGHTLGRCHKERSGFEGPWTRNPLKFDNSYFTELLSGDKEGLLQLPSDKTLLTDPVFRPLVEKYAADEKAFFEDYKEAHLRLSELGYAEA

SEQ ID NO: 9478 - protein, 119 aa, Atropa belladonna
QVPEDEEDIDEDAAEELQNLMEQDYDVGSTIRDKIIPHAVSWFTGEAAEDDYADLEDDEDEDEDDEEDEDEDEEDDEDEEDEEDDAKTKKKSSAARKRSGRAPAGDGQSGERPPECKQQ

SEQ ID NO: 9479 - protein, 382 aa, Chlamydomonas reinhardtii
MAAGSVGVFATDEKIGSLLDQSITRHFLSTVTDQQGKICAEYVWIGGSMHDVRSKSRTLSTIPTKPEDLPHWNYDGSSTGQAPGHDSEVYLIPRSIFKDPFRGGDNILVMCDCYEPPKVNPDGTLAAPKPIPTNTRFACAEVMEKAKKEEPWFGIEQEYTLLNAITKWPLGWPKGGYPAPQGPYYCSAGAGVAIGRDVAEVHYRLCLAAGVNISGVNAEVLPSQWEYQVGPCEGITMGDHMWMSRYIMYRVCEMFNVEVSFDPKPIPGDWNGSGGHTNYSTKATRTAPDGWKVIQEHCAKLEARHAVHIAAYGEGNERRLTGKHETSSMSDFSWGVANRGCSIRVGRMVPVEKSGYYEDRRPASNLDAYVVTRLIVETTILL

SEQ ID NO: 9480 - protein, 146 aa, Zea mays
GWRKEKRTRASRGEKSAGWRWLVRRTRDSKPFFFTFAALCGVVPGVIGYGVMQLTGSRNEQLEAHLRSTARPETTMMGQVNRERLAEFLGELQRKEDTNDRYVAALRGETLTRKRYERIQPVPAANAQASQEAAGASAEEERPKAK

SEQ ID NO: 9481 - protein, 110 aa, Thermococcus celer
MKFCPKCGNLMLPDRKRKVWVCRSCGYEEPFDEEKDREKTVIKQEVKHKPDEGIVVIEQDLKTLPTTKITCPKCGNDTAYWWEMQTRAGDEPSTIFYKCTKCGHTWRSYE

SEQ ID NO: 9482 - protein, 567 aa, Listeria monocytogenes
MKRNKTALRILVTLAVVMAISFWVGTSSKEVQAAEIGQPTPINEIFTDENLANAIKTTLSKPSTASAVSQVELDSVRDVTAESSNIASLEGVQYLNNLDTLVLNNNKITDLNPLAGLTKLSILEASNNQLSDISALSNVTNLHQLRLDGNQIKQLNGVSNLINLETIELSNNQITAISPVSGLKNLVGLGIDNNKISDLSPISGLSKLNHLTADSNQISDLRPLSNLAAMEVMRLDGNQISDVTPIANLANLNYVFLAENQISDISSLQPLFNSPNFFGITLDNQKITSEPVLYQQELVVPNNIKDEMGALIAPATISDNGVYASPNINWNLPNYTNQVSYTFNKQLAYGSFSGTVTQPLHNAYTATFDVDGVKTNEAVEETKLLQEPIAPTKEGYTFTGWYDAKTGGNKWDFATDKMPAEDITLYAQFTINSYTATFDIDGKLTTQKVTYQSLLEEPVAPTKDGYTFTGWYDAKTGGTKWDFATGKMPAGNITLYAQFTKNDNPNPDDPTTNTPTGNGDGTSNPSNSGGNTTLPTAGDENTMLPIFIGVFLLGTATLILRKTIKVK

SEQ ID NO: 9483 - protein, 526 aa, Yarrowia lipolytica
MFQLFSILVLAFTTALVAQLAYNQYDYQRKVKKFGCGQLRVAENGLFGWKGLREVLRINKYKLGPAALKDRFEKYGKTHVFHVGPSPLITTMDPENIKAMLATQFKDFCLIARYKALGPMLGDGIFTLDGHGWTHSRALLRPQFAREQVSRLDSIEHHFQILKKCISKEMSDKRDTQRGFDIQNLFFLMTLDTATEFLFGSSVDSLVDFLDDPSIQTGDHGGIDEAARKGFSNAFNRAQELSSLRTRLHKLYWVIGTLAVREPYHRYNREVKTFVDHYAAKAIKARNEKNTDLLDNDKYIFMYELVKETSNPITLRDQMLNILLAGRDTTASMLSWIYFRLARDPKRYAKLRAAVLADFGPGPENITFESLKKCDYLRYVLNESLRVYPVVPINARTASRDTTLPRGGGPDGSQPIFVPKGQTVSYSVWWTHRDPEFWGQDAEEFIPERWDTKNGSIGRGWEYLPFNGGPRICLGQQFALTEVGYVLSRMVQTYETLESGDTKPLPPLYNHALTLCHQEGVWIKTE

SEQ ID NO: 9484 - protein, 142 aa, Brassica rapa subsp. pekinensis
RQVTFCNRRNGLLKKAYELSVLCDAEVTLIVFSSRGRLYEYSNNSVKGTIERYKKAISDNTNTGTVAEINGQYYQQESAKLRQQIISIQNSNRQLMGETIGSMSPKELRNLEGRLDRSINRIRSKKNELLFAEIDYMQKREL

SEQ ID NO: 9485 - protein, 272 aa, Gossypium darwinii
LSVEEIEVAPPQKNEVRVKIHFTSLCHTDVYFWEAKGQNPLFPRILGHEAGGVVESVGEGVTDVEPGDHVLPIFTGECKECPHCLSEASNMCDLLRINTERGGMLHDGQTRFSKDGKPIYHFLGTSTFSEYTVVHVGQVAKINPEAPLDKVCVLSCGMTYSSSLLAGFGATVNVAKPKKGGSVAVFGLGAVGLAAAEGARVCEASRIIGIDLNPNRFEEAKKFGCTEFVNPKDHNKPVQEVISEMTGGGVDCSIECTGSTQAVVSAFECVHD

SEQ ID NO: 9486 - protein, 346 aa, Oryza sativa
  unsure (1)..(346): unsure at all Xaa locations
MRLHAGAVQLQYFMPQQGATAAAAADHHQADSATACSASTSPAAAAATMWEYHHQLSTHAALQPSSSFPYSYWSPYSGSTALAGSAFAADSSSSSTDVMRLPAAGEHAHGHGWSHDVSPIKYEIAGSPLYLGGTNTVLQVQDMTMMSSTPACYGEHHHHHHHQLTKEGSCNHQQQLRRSAXQDLLPGRPGNGGXSFWHEELAGSWVIRRLHAGHRVXXSVQPYMRCANSSDSNRQEQETVPARSSSSGSGAAGKKRKSEERQESTVKKSKQEASKASPPKYLPKVKLGEKITALQQIVSPFGKTDTASVLFETIKYIKFLHEQVQLLSEPYTNSSRSNKQVHDXDX

SEQ ID NO: 9487 - protein, 135 aa, Eucommia ulmoides
FLVLDDIMDSSHTRRGQPCWFRLPKVGMIAVNDGLILRNHIPRILKKHFKGKPYYVDLLDLFNEVEFQTASGQMIDLITTLVGEKDLSKYSLPLHHRIVQYKTAYYSFYLPVACALVMSGENLDNHVDVKNILVE

SEQ ID NO: 9488 - protein, 338 aa, Oryza sativa
MAAAVVANGASGDSSKAAFAEIYSRLKEEMLEDPAFEFTDESLQWIDRMLDYNVLGGKCNRGISVIDSFKMLKGTDVLNKEETFLACTLGWCIEWLQAYFLVLDDIMDNSQTRRGQPCWFRVPQVGLIAVNDGIILRNHISRILQRHFKGKLYYVDLIDLFNEVEFKTASGQLLDLITTHEGEKDLTKYNLTVHRRIVQYKTAYYSFYLPVACALLLSGENLDNFGDVKNILVEMGTYFQVQIGTDIEDYKCSWLVVQALERADENQKHILFENYGKPDPECVAKVKDLYKELNLEAVFHEYERESYNKLIADIEAHPNKAVQNVLKSFLHKIYKRQK

SEQ ID NO: 9489 - protein, 458 aa, Streptococcus mutans UA159
MENHNFENEGQFKRKMTSRHLFMLSLGGVIGTGLFLSSGYTIAQAGPLGAVISYLVGAIVVYLVMLSLGELAVAMPVTGSFHTYATKFISPGTGFTIAWLYWICWTVALGTEFLGAGMLMGRWVPYVPTWVFAALFALLIFGLNALSVRSFAEAESFFSSIKVLAILVFIILGFGAMLGLVSFNGKHEVFLFSHLTAHGALPKGLPALMSVMLAVNYAFSGTELIGIAAGETNNPKEAVPKAIKTTIGRLVIFFVLTIVVLASFLPMKEAGVSSAPFVDVFDKMGIPFAADIMNFVILTAILSAGNSGLYASSRMLWSLANEGMISPRVVKINEHGVPMRALLLSMAGAVLSLFSSIYAADTVYLALMSIAGFAVVVVWLSIPMAQINFRKEWLKSHAQEDLFYKTPFTPILPYITIMLLLISIIGIAWDASQRAGLYFGIPFILLCYLYYYWRHKTL

SEQ ID NO: 9490 - protein, 387 aa, Gaeumannomyces graminis var. tritici
MLRSSAFALLAWASLSEAQFGIKHTQYGTSEPVYPSPEISGSGGWEAGLAKAKDFVAQLTPEEKANMVTGTPGPCVGNIAPVPRLNFTGLCLQDGPATLRQATYVTVFPGGVSAASSWDKDLIYKHGVLMAREFRDKGSHIILGPVIGPLGRSPYAGRNWEGFSPDSYLAGVLAEQTVKGMQSVGMQTCTKHYIGNEQEEQRNPTTVDGKGVEAISSNIDDRTMHETYLWPFYNAVRAGTTSIMCSYQRINGSYGCQNSKTLNGLFKTELGFQGFVVSDWAATHSGVASIEAGLDMNMPGPLNFFAPTLESYFGKNITTAVNNGTLSSRRVDDMIERIMTPYFALGQDKDYPPVDGSTVPIGYLQPDAWNHEFPLGPTVDVRRNHHE

SEQ ID NO: 9491 - protein, 346 aa, Citrobacter freundii
MTAYDELEIQLVLEPKRWLITGVAGFIGSGLLEELLYLNQTVIGLDNFSTGYQHNLEDVRAAVSEEQWSRFTFVHGDIRSFADCQAVCENVDYVLHQAALGSVPRSLQDPITTNSANIDGFLNMLTAARDAHVSGFTYAASSSTYGDHPDLPKIEDRIGRPLSPYAVTKYVNELYAEVFARSYDFNAIGLRYFNVFGRRQNPNGAYSAVIPRWILSLLKDEPIYINGDGSTSRDFCYIENVIQANLLSATTNDLASKNKIYNVAVGDRTSLNELYYLIRGGLNLWRDEQISAEPIYKDFRDGDVKHSQADITRIKTFLSYEPEFDIKEGLKQTLKWYIDKKTALYS

SEQ ID NO: 9492 - protein, 176 aa, Neisseria meningitidis MC58
MNAIRTFQNRTPEIHETCMIDEACVVIGEVSLAEDVSVWPCAVLRGDVNSITVGARSNIQDGSVLHVSHKTAAKPEGSPLVIGEDVTVGHKVMLHGCRIGNRVLVGMGTTVLDDAVIEDEVMIGAGSLVPPRKRLAGGYLYVGSPVRQVRVLTDEEKAFLKYSAAHYVKLSKQYGM

SEQ ID NO: 9493 - protein, 154 aa, Claviceps purpurea
MVKAVAVLRGDAKVGGTVVFEQESESAPTTITWDITGNDANAKRGFHIHTFGDNTNGCTSAGPHFNPHGKTHGAPTDEARHVGDLGNLETDGQGNAKGSVKDEHVKLIGPHSVIGRTVVIHAGTDDLGKGDNEESLKTGNAGPRPACGVIGISS

SEQ ID NO: 9494 - protein, 164 aa, Arachis hypogaea
MGAGGRVTKIEAQKKPLSRVPHSNPPFSVGQLKKAIPPHCFERSLFISFSYVVYDLLMAYLLFYIATTYFHKLPYPFSFLAWPIYWAIQGCILTGVWVIAHECGHHAFSKYQLVDDMVGLTLHSCLLVPYFSWKISHRRHHSNTGSLRPRRSVCPETKIKGIMV

SEQ ID NO: 9495 - protein, 336 aa, Glycine max
MSSGATHWCYACRQPIVLDGRDPVCPYCDGGFVQELDELRGIAPNHNHTFSSQSGDFHQMPDIFDAIHAFMGQRGSDQRFGLMDAVDNFMRHRMAGRNSNFDVRGRSGSLPVPEQSWGVYSSGPYLIFHGQVPGFTLSAGSPRGGPRRVDFGDYFMGPGLEELIEQLTMNDQRGPAPAARSSIDAMPTIKITQAHLRSDSHCPVCKEKFELGTEAREMPCNHIYHSDCIVPWLVQHNSCPVCRVELPPQGQASSRGTRSWGGRNASNSSSSGSNDSSRGRENSHQNHGRRNPFSFLWPFRSSNSNNNHYSETGGSSSSTTPDQNNGTSYSGWPFDR

SEQ ID NO: 9496 - protein, 1151 aa, Populus balsamifera subsp. trichocarpa
MASQSQRQSNQRQHQNQAAQSSGTSNMRQHHHATESVSKAIAQYTVDAQLHAVFEQSGGSGKSFDYSQSVRTTSQSVPEEQITAYLSKIQRGGHIQPFGCMIAVDEGSFRVIAYSENAKEMLGLTPQSVPSLDKQEILSDGTDVRTLFRPSSSAMLEKAFGAREIILLNPIWIHSKNSGKPFYAILHRIDVGIVIDLEPARTEDPALSIAGAVQSQKLAVRSISQLQSLPGGDIKLLCDTVVESVRELTGYDRVMVYKFHEDEHGEVVAENKRADLEPYIGLHYPSTDIPQASRFLFKQNRVRMIVDCHATPVRVIQDEALMQPLCLVGSTLRAPHGCHAQYMANMGSIASLAMAVIINGNEEEAIGGRNSTRLWGLVVCHHTSARCIPFPLRYACEFLMQAFGLQLNMELQLASQLSEKHVLRTQTLLCDMLLRDSPTGIVTQSPSIMDLVKCDGAALYYQGQYYPLGVTPTEAQIKDIVEWLLALHGDSTGLSTDSLADAGYPGAASLGNAVCGMAVAYITKRDFLFWFRSHTAKEIKWGGAKHHPEDKDDGQRMHPRSSFKAFLEVVKSRSLLWENAEMDAIHSLQLILRDSFRDVEATNSKAVVHAQLEDTELQGMDELSSVAREMVRLIETATAPIFAVDVDGCINGWNAKVAELTGLSVDKAMGKSLVHDLVYKEYEETVDKLLHRALRGEEDKNVEIKLRTFGSEHQKKALFVVVNACSSKDYMNNIVGVCFVGQDVTGQKVVMDKYVHIQGDYKAIVHSPNPLIPPIFASDENTCCLEWNTAMEKFTGWSRGEVIGKMLVGEVFGSCCQLKGSDALTKFMIALHNAIGGQDTDKLPFSFFDRNGKYVQALLTANKRVNMEGEIVGAFCFLQIASNELQQALKVQRQQEKKCSARMKELAYICQEIRNPLSGLRFTNSLLENTDLTEDQKQFLETSAACEKQILKITRDVDLESIENGLLELEKAEFLFGSVINAVVSQAMLLLRERNLQLLRDIPEEIKTLVVYGDQARIQQVLADFLLNMVRYAPSSAGWVEIHVCPTLKQISDGHTLVHMEFKYALLNSFACLPPELVQDMFHSSRWVTQEGLGLSMCRKILKLMNGEVQYIRESERCYFLVILEVPMPNKCERYNCKKCCRLGCLVCNVY

SEQ ID NO: 9497 - protein, 334 aa, Leuconostoc mesenteroides subsp. mesenteroides ATCC 8293
MAVLVLGGAGYIGSHMVKRLVEAGRDVVVVDALFTGHRAAVNPAATFYQVDIRDKAELSAVFDKENIEQVVHFAAFSIVPESVANPLKYFDNNTSGMITLLEVMKAHDVKQIVFSSTAATYGNPVHIPIKETDPQNPINPYGESKLMMEKIMNWSDQADGVKWVALRYFNVAGAAEDGTIGEDHNPETHLVPIILQAGLGQRDYIEMFGDDYNTPDGFNVRDYVHVLDLADAHILALQYLADGHESNQFNLGSATGFSVKEMVEAAREATGVDIPAKIGPRRAGDPDILIANSDKAREVLGWAPKYDNVQDIIKTAWQWHQSHPKGYDERHEDQ

SEQ ID NO: 9498 - protein, 58 aa, Skeletonema costatum
MRGILADWLVEVHLKFKLVPETLYLVVNLIDRYLAKKEVTRSKLQLVGVTALFIATKY

SEQ ID NO: 9499 - protein, 214 aa, Paeonia lactiflora
IVESVGEGVTDLKPGDHVLPVFTGECKECRHCKSEESNMCDLLRINTDRGVMLNDGKSRFSINGQPIFHFVGTSTFSEYTVVHVGCVAKINPEAPLDKVCVLSCGISTGLGATLNVAKPKKGSSIAIFGLGAVGLAAAEGARIAGASRIIGVDLNPKRFEEAKKFGVTEFVNPKDYNKPVQEVIAEMTGGGVDRSVECTGSIMAMISAFECVHD

SEQ ID NO: 9500 - protein, 428 aa, Pseudomonas aeruginosa UCBPP-PA14
MHRRRHSQRRLGMQPGAGGADLGGTAALPTGAGDQPFRLWRHPGRQRAATGGDARDLRRSDDGGRLSAYVPARRAARGGRPRDARGTAPALARDAHRRARRVPVHDPRPAQRRRGPPRTQRPGRGLPAPLPAQPRRALDAIPQHGADLPGDPRGGRRTARPPAPRLPGRTAGAPIVRRLENRVALVTGAGQGIGRAIAECFAAEGARVLLATRTASRGQAVLEAIRLGGGTAELLAVDLSEHDAARRAVSATLERFGQLDILLHNAAAFPQCALAELDEGTLERTLAVNLKSCFRLTQAALPALRRSVAGRVLVTSSVTGPRTAIPGLSHYAASKAGVNGFIRAAALELAGDGITVNGVEPGLVATPALGSLGDAAALAAHIPLGRVGQPLDIAHAMLFLASDEASYITGQTLVVDGGALLPENGGLA

SEQ ID NO: 9501 - protein, 617 aa, Novosphingobium aromaticivorans
MPSRRPSCAGGSRGSSGASSVPGWGWHGLSRYRAGRSWTWARILSGGLMLLLPCQKAARLALHTRNLGEKWLARCPVPASFAAITWFPEQPYRRFPALDQGGENFMFGRVKPLDAILATAEKKSLHRSLGPVQLTLLGVGAIIGTGIFVLTAAAAQKAGPGMMWSFVIAGFVCAVAALCYSELASMVPVSGSAYTYSYAVVGEMLAWMVGWALILEYAVAASAVSVGWSGYFMGLLKSLTGFELPAMLQAGPTWTMNGLLPHADFSTGLINVPAIVVALLVTWLLMLGTKESATFNAILVAIKVAALTMFIVLTLPAIEREHFAPFAPNGWFGPAGTTGMGIVGAASSIFFAYVGFDAVSTAAEETKNPQRNVPIGLIGSLAICTVFYLLVAAGAIGSIGAQPTALGVAPGSAEFTQQCAALLASGQEPLVCSNEALAHVLRAINYTYAGDLIGLAANLALPVGHPDDALRPDAHLLRHGARWPASGETGHRPPQVENASHRDRNDRRIRRHRGGAASGWSACRHLKFGHALRVLHGRDRGHAAPRPRPEPRPSVPHTGGVGRRPDRRDWLYLPLLEPAVRGEDGPSRLGRHRARVLLRLRLSQEPRRPGPRRSPRG

SEQ ID NO: 9502 - protein, 375 aa, Brucella melitensis 16M
MKFKAAVLDRHGVERPYNQTKPLVIREVELREPKADEVLVKLAASGLCHSDLSVINGDRSRQIPMVLGHEAAGVVEKIGEGVTDLVPGDHVVCVFVPNCGHCQPCAEGRPALCEPGAAANGKGEMLSGGLRLFCDDGDVYHHCGVSAYAEYAVMSRYSIIRIEKDIPLHIAALMGCAVLTGTGSIFNTGLVKPGSRVAIAGLGGVGLAAVMGAVAAGATEIIALDMFDDKLALAEQLGATKTFNVQSEGVVEAVKEYTKGGVDAAFEYAGSGAALAMCYALTKRGGEVVTAGLPNPKNMLSIPAVSLVAEEKSIRGSYLGSGVPTRDIPLFLDLYRKGKLPVEKLLTHRIKLEEINEGFERLAAGKAIRQVVEFN

SEQ ID NO: 9503 - protein, 368 aa, Ureaplasma urealyticum
MSLSAGLVGLPNVGKSTLFNTITNSRVEAANYPFATIEPNIGIVNINDPRLKRLASLVVPDKIVPTTFKFVDIAGLVKGASQGEGLGNQFLNNIRDVDAICHVVRCFDDKSITHVHNKIDALSDIHVINYELILSDLDIIEKRISRIKKKADSGDKDARREYLILFNIEEALKKGQLASSVKLTKEELKIINSFNLITLKPILYIANISENEISNPDLNKEYLKVKKYAQDNDARCVALSAKIEYEISILDEESKSIFIQDLGIKTTGLDEIVKQTYDLLNLKTYFTYGKQEVRAWTFINGMSAPECAGIIHSDFEKGFIKAEIMHYDDLISLGSEQAVKEAGKIRMEGKSYLMKDGDICNFRFNVTK

SEQ ID NO: 9504 - protein, 256 aa, Saussurea medusa
MVRAPCFDKHGIKRGAWSQEEDNKLRAHIQRSGHSNWRQLPKLAGLSRCGKSCRLRWVNYLRPTIKHGNFTKDEKDVVVALHNKLGNKWSAIAARLPGRSDNEIKNYWHTHLKNRAQTDQTVLQTKQDGNAETSKGKGTPKAGCVVRKPNVKSQQEVEILLAVLSSASSSSFSSSTTSDQNESSPPSLSVSDANVTPQCSEEAARSLCIDQFLVEEDSIMLSSDKMYSPLGSVDYFISQDNVMDDVLLWPNLDFYY

SEQ ID NO: 9505 - protein, 162 aa, Ureaplasma urealyticum
MERLNMKLSDYPVLDIDKKLFNWSKVKNKLVLIVNVASKCGYAKQYEQLEYLYKKYKNKGFIIVAFPCRQFMFQEFDDNNKIKEFCSTKYNVTFPIMDLTNVVGSNISPLYKQLITEYPWSPKAKAVKWNFEKFFVKNDEIIGRFESKCEPNDLEEFIKNNL

SEQ ID NO: 9506 - protein, 173 aa, Sulfolobus tokodaii
MKVLFIVGDEYEDIELLYPFYRVIEEGYQPVIAGKEAGAKIVGKHGYSVVADIAFKDVKVEDYLALVIPGGRGPERIRTLPEVKELTRRFFIDKKPVAAICHGPQVLISAGVIKGRKVTSVASIKDDIVAAGGEYVDAPLVEDENLISSRHPGDLPYFAKGLLKALKSVREKS

SEQ ID NO: 9507 - protein, 269 aa, Streptomyces coelicolor A3(2)
MDVRDRNHVTVTGRADGPVVMLAHGFGCDQNLWRLVTPILERDFTVVLFDHVGSGNSNLSAWDPERYGSLDGYVDDVLELCRELALGPVTFVGHSVSAMMGVLAAVREPEAFAGLVLLAPSPCFVDDPDTGYRGGFSAADIEELLDSLDANYLGWSGAMAPVIMGNPERPELGEELTNSFCRTDPDIARVFARVTFLSDNRADLAPVRVPTLVAQCSSDAIAPREVGAFVHAQIPASRLVTLNATGHCPQLSAPQETAAAIAAFAGGAD

SEQ ID NO: 9508 - protein, 496 aa, Lesquerella fendleri
MTSLNIKLLYHYILTNLFNLCLFPLTAFLAGKASHLTKSDLLMFLSHLQDNLITVIVLFTFTIFCLVLYIVTKPKQIYLVDYSCYLPPDHLKVSISSVMDIFYELRKVDPLCEVGCDDSSLEFMRKVLERSGLGDETYVPLGLHQVPPQKTFAAIKDETEQVIKGALENLFENTKVNPREIGILVINSSMFNPTPSLSAMVINTFKLRSNIKSFNLGGMGCSAGVIAIDLAKDLLHVHKNTYALVISTENITITAYAGENRSMNVSNCLFRIGGAAILLSNKPRDKRRSKYKLAHTVRTHTGADDMSYRCVQQEEDEMGKVGVRLSKDITTVAGTAVKKNISTLGPLILPLSEKLLYFVSFIAKKLLKEKIKNYYVPDLKLAINHFCIHAGGRGVLDVLEKNLRLSPIDVEASRSTLHRFGNTSSSSIWYELAYIEAKGRMKKGDKAWQIALGSGFKCNSAVWVALRNVKASANSPWEHCIDRYPVPDTCVENGKS

SEQ ID NO: 9509 - protein, 227 aa, Nicotiana sylvestris
MAVKNKVSNGDLKGGNVKTNGVKEVHYRGVRKRPWGRYAAEIRDPGKKSRVWLGTFDTAEEAAKAYDTAAREFRGPKAKTNFPLPSENQSTSHSSTMESSSGETGIHAPPHAPLELDLTRRLGSVAADGGDNCRRSGEVGYPIFHQQPTVAVLPNGQPVLLFDSLWRPGVVNRPQPYHVMPMAMGFNGVNAGVDPTVSDSSSVVEENQYDGKRGIDLDLNLAPPTEF

SEQ ID NO: 9510 - protein, 125 aa, Zea mays
  unsure (1)..(125): unsure at all Xaa locations
MGSGKLQKRLASSVLKYGKGXVFLDPNEVSXIFMANSLQNIRKLVNDGFIIRKPQKVHSTSRTRRAHDAKHKGTHSLYRTRTGTRDARLPTKILWIKTMPVLMRLLRKYREAKNIDTHIYHDMYM

SEQ ID NO: 9511 - protein, 331 aa, Streptococcus agalactiae 2603V/R
MAVLILGGAGYIGSHMVDQLITQGKEKVIVVDNLVTGHRQAVHSDAIFYEGDLSDKTFMRQVFRENPDVDAVIHFAAFSLVAESMENPLKYFDNNTAGMIKLLEVMNECDIKNIVFSSTAATYGIPEQVPILETAPQNPINPYGESKLMMETIMKWADQAYGIKFVALRYFNVAGDKPDGSIGEDHKPETHLLPIILQVAQGVRDKIMIFGDDYNTPDGTNVRDYVHPFDLADAHILAVDYLRQGNESNVFNLGSSTGFSNLQMLEAARRITGKEIPAQKAARRPGDPDTLIASSEKARQILGWEPKFDNIDKIISSAWAWHSSHPNGYED

SEQ ID NO: 9512 - protein, 345 aa, Neurospora crassa
MRLPQNGQLIAEYIWIDSEGGTRSKSRTLPEKESQYLPEELPIWNFDGSSTGQAPGENSDVYLKPVAVFPDPFRGSPNILVLSECWNADGTPNKFNHRHEAAKLMEAHADQVPWFGLEQEYTLLDINDRPYGWPRNGFPAPQGPYYCGVGTGKVVQRDIVEAHYKCCLYAGVKISGTNAEVMPAQWEFQVGPCDGIEMGDHLWLARFLLHRVSEEFGAKVSFDPKPIPGDWNGAGLHTNFSTENMRKEGGMKYIEDAIKKLEARHKEHIAVYGEGNDKRLTGRHETGSIDSFTYGVANRGASIRIPRECGAKGYGYFEDRRPASNADPYQITGIIMETCFGAVSE

SEQ ID NO: 9513 - protein, 402 aa, Archaeoglobus fulgidus DSM 4304
MRALVVELRLWKAALSLLLGKVTKSVYYSPLSLLKYYKNYPEPALPDEDWVKVKTRLCGICGSDLRIITLQESFYLAPLTSFPFIPGHEVVGEVVEVGKEADAQEGERVVINTALSCRVRGFDDCDACRKGHFAACHNVDRGRISPGIFTGTCRDTGGGWAEYFVAHESQLVRVPEGIRDENAVFAEPLTIGIHSALRSFPDDGEVVAIVGCGVIGICTIIALRHLGFRGEIIGIDISERQAELARKFGADGVVTENPVERIAEMTGGRVYRPPRDKPMFIGGGVDVAFECTGIPQTVDTALRITKPLGRVVIAGTVAKMGVDWAPVFAKELSVLGTFGCGIEEVNGEKRDAFDIAFEILKKVDLSSLLTHRFTIEDYKKALRAAIEKGKSGAVKVAFDFTL

SEQ ID NO: 9514 - protein, 287 aa, Glycine max
MSRASSAADSAASGEIILFGVRVVVDSMRKSVSMSNLSQYEHPQDGSNNKDALAAGYASADDAAPQNSGRLRERERKRGVPWTEEEHKLFLVGLQKVGKGDWRGISKNYVKTRTPTQVASHAQKYFLRRSNLNRRRRRSSLFDITTDTVSAIPMEGEQVQNQDTLSHSQQQSPLFPAETSKINGFPMMPVYQFGFGSSGVISVQGGNGNPMEELTLGQGNVEKHNVPNKVSTVSDIITPSSSSSAVDPPTLSLGLSFSSDQRQTSSRHSALHAIQCFSNGESIISVA

SEQ ID NO: 9515 - protein, 313 aa, Thermoanaerobacter tengcongensis
MFKTKITEMLNIKYPIFQGGMAWVATAELAAAVSNAGGLGIIGAGNAPASFVREQIRKARELTDKPFGVNVMLLSPYVDEVMEVILEERVDVITTGAGNPGKYIPRLKERGIKVIPVVASVALAKRMEDIGVDAVIAEGTESGGHVGELTTFALVPQVVDAVNIPVIAAGGIADGRGFAAAFCLGASGVQMGTRFVCSTECTAHPRYKEYILKAKDRDTVVTGRSTGHPVRALRNRLTREFEKLEQMGAPKEQLEKLGEGKLRAAVVDGDVEYGSVMAGQIAGLIKDIKPVKEIIEDIIKQAAEVIENLNKMR

SEQ ID NO: 9516 - protein, 220 aa, Zea mays
  unsure (1)..(220): unsure at all Xaa locations
MVSLKVPKRLAASVLKCGKGKVWLDPNEVSEISMANSRHNIRKLVKDGFIIKKPQKIHSRSRARRAHEAKQKGRHSGYGKRRGTREARLPTKVLWMRRMRVLRRLLRKYREAKKIDKHMYHDMYMKVKGNSFKNKRVLMESIHKSKAEKAREKTLXSDQFEARRAKSKXASRERKNARREREGWPQGPREIPPPVSATAPTTGAPKKAKKVKYCNKAAAF

SEQ ID NO: 9517 - protein, 168 aa, Xylella fastidiosa Ann-1
MSSIYTFTFTRLDGRPQALADWRGQVLLLVNVASRCGFTPQYAGLEMLWQRYRDAGLIVIGFPCDQFAGQEPGDEAKIAEFCTLTYGVDFPMAAKIKVNGADAHPLWQWLKHRRRGLFGVAAIKWNFTKFLIGRNGQPIARYSPIKSPEQLEVHIVRALGEEGGGNTH

SEQ ID NO: 9518 - protein, 93 aa, Saccharomyces cerevisiae
  unsure (1)..(93): unsure at all Xaa locations
XVTPREPKKRTTRKKKDPNAPKRALSAYMFFANENRDIVRSENPDITFGQVGKKLGEKWKALTPEEKQPYEAKAQADKKRYESEKELYNATLA

SEQ ID NO: 9519 - protein, 358 aa, Cicer arietinum
VLGHGDRENISYPREVESLSGLRTVAGACGVWHTAAIVEVIVAQSSASISSGKLFTWGDGDKNRLGHGDKDARLEPTCVSALIDYNFHRIACGHSLTVGLTTSGHVFTMGSTVYGQLGNPQSDGKLPCLVEDKLAGECVEEIACGAYHVTVLTSKNEVYTWGKGANGRLGHGDIEDRKMPTLVEALKDRHVKYIACGSNYSAAICLHKWVSGAEQSQCSTCRQAFGFTRKRHNCYNCGLVHCHSCSSRKAFRAALAPNPGKPYRVCDSCYTKLIKIAESSNNNRRNGMPRFPGENKDRLEKSELRLLKPAVPSNMDLIKQLDSKAAKQGKKADTFSLVRTSQPPSMLQLKDVVLSTAM

SEQ ID NO: 9520 - protein, 235 aa, Glycine max
MSTLDATRAELGLLVLYLGKAEARDKICRAIQYGSKFLSNGEPGTAQNVDKTTSLARKVFRLFKFVNDLHALISPTPQGTPLPLALLGKSKNALLSTFLFLDQFVWLGRTGIYQNKERTELIGRISLYCWLGSSVCTTLVELGELGRLSSSMKKLEKDLKNKNKYDNEQYRAKLNKSNERTLSLIKAGIDTVVAVGLLQLAPKTVTPRVTGAFGFVSSLISCYQLLPAPAKSKTV

SEQ ID NO: 9521 - protein, 157 aa, Triticum aestivum
  unsure (1)..(157): unsure at all Xaa locations
FRCLKDAIAAQLRHTCELLGEKDAGTSSGLTKGETPRLRAIDQSLRQQRAFHHMGMMEQEAWRPQRGLPERSVSILRSWLFEHFLHPYPSDADXHLLARQTGLSXRNQVSNWFINARVRLWKPMIEEMYQQETKELEGSSAGGRPSNDPPTTFTPQR

SEQ ID NO: 9522 - protein, 1131 aa, Glycine max; identical to SEQ ID NO: 2209

SEQ ID NO: 9523 - protein, 430 aa, Mycobacterium tuberculosis H37Rv
MRYPLGEALLALYRWRGPLINAGVGGHGYTYLLGAEANRFVFANADAFSWSQTFESLVPVDGPTALIVSDGADHRRRRSVVAPGLRHHHVQRYVATMVSNIDTVIDGWQPGQRLDIYQELRSAVRRSTAESLFGQRLAVHSDFLGEQLQPLLDLTRRPPQVMRLQQRVNSPGWRRAMAARKRIDDLIDAQIADARTAPRPDDHMLTTLISGCSEEGTTLSDNEIRDSIVSLITAGYETTSGALAWAIYALLTVPGTWESAASEVARVLGGRVPAADDLSALTYLNGVVHETLRLYSPGVISARRVLRDLWFDGHRIRAGRLLIFSAYVTHRLPEIWPEPTEFRPLRWDPNAADYRKPAPHEFIPFSGGLHRCIGAVMATTEMTVILARLVARAMLQLPAQRTHRIRAANFAALRPWPGLTVEIRKSAPAQ

SEQ ID NO: 9524 - protein, 686 aa, Raphanus sativus
MLARVCRFESSSSSSVSAARFFCTGSIRHALAEKSRDGESGEAGFRGESLKLRSGSYEIKGLEDAIDLFSDMLRSRPLPSVIDFNKLMGAVVRMERPDLVISLYQKMERKQIRCDIYSFTILIKCFCSCSKLPFALSTFGKLTKLGLHPDVVTFTTLLHGLCLDHRVSEALDLFHQICRPDVLTFTTLMNGLCREGRVVEAVALLDRMVENGLQPDQITYGTFVDGMCKMGDTVSALNLLRKMEEISHIKPNVVIYSAIIDGLCKDGRHSDSHNLFIEMQDKGIFPNIVTYNCMIGGFCISGRWSAAQRLLQEMLERKISPNVVTYNALINAFVKEGKFFEAAELYDEMLPRGIIPNTITYNSMIDGFCKQDRLDAAEDMFYLMATKGCSPDVFTFTTLIDGYCGAKRIDDGMELLHEMPRRGLVANTVTYNTLIHGFCLVGDLNAALDLSQQMISSGVCPDIVTCNTLLDGLCDNGKLKDALEMFKAMQKSKMDLDASHPFNGVEPDVLTYNILICGLINEGKFLEAEELYEEMPHRGIVPDTITYSSMIDGLCKQSRLDEATQMFVSMGSKSFSPNVVTFNTLINGYCKAGRVDDGLELFCEMGRRGIVADAIIYITLIYGFRKVGNINGALDIFQEMISSGVYPDTITIRNMLTGFWSKEELERAVAMLEDLQMSVGYQLEDE

SEQ ID NO: 9525 - protein, 322 aa, Carica papaya
DFSIVGYSQDDLTSTERLIQLFNSWMLNHNKFYENVDEKLYRFEIFKDNLNYIDETNKKNNSYWLGLNEFADLSNDEFNEKYVGSLIDATIEQSYDEEFINEDIVNLPENVDWRKKGAVTPVRHQGSCGSCWAFSAVATVEGINKIRTGKLVELSEQELVDCERRSHGCKGGYPPYALEYVAKNGIHLRSKYPYKAKQGTCRAKQVGGPIVKTSGVGRVQPNNEGNLLNAIAKQPVSVVVESKGRPFQLYKGGIFEGPCGTKVDGAVTAVGYGKSGGKGYILIKNSWGTAWGEKGYIRIKRAPGNSPGVCGLYKSSYYPTKN

SEQ ID NO: 9526 - protein, 728 aa, Glycine max
  unsure (1)..(728): unsure at all Xaa locations
MTGHFLRTPLTLKIAAFFFIAVTFFYFGKHWSDGYQQLVFFTQRSDPDSNSNPFVSTSPNNAKSFNVSALIENNTQPAPPENAPPPPAPEEGSIEKLGVVNENGTMSDEFEVGDFDPGMVDQWVNETQVDESEGSSSDVGFGIKKFGLCPREMSEYIPCLDNEDEIRKLPSTEKGERFERHCPEQGRGLNCLVPAPNGYRTPIPWPRSRDEVWYNNVPHTRLVEDKGGQNWISRDKDKFKFPGGGTQFIHGANEYLDHISKMIPDITFGKHIRVVLDVGCGVASFGAYLLSRNVVTMSVAPKDVHENQIQFALERGVPAMAAAFATRRLLYPSQAFDLVHCSRCRINWTRDDGILLLEVNRMLRAGGYFVWAAQPVYKHEEVLEEQWEEMLNLTTRLCWNFLKKDGYIAVWQKPSDNSCYRDREAGTKPPMCDPSDDPDNVWYVDLKACISELPKNGYGANVTEWPARLQTPPDRLQSIKLDAFTSRSELFRAESKYWNEIIASYVRVLHWKEIRLRNVMDMRAGFGGFAAALINQNLDSWVMNVVPVSGPNTLPVIYDRGLIGVMHDCNNFMIYNIXCEAFDTYPRTYDLLHAANLLSVEKKRYYFLHLSAFYVFXCNVSSIMLEMDRILRPGGRVYIRDSLDIMDELQEIAKAIGCTCYALKAKWDASASTTRHLRSALPYKREEVLSIYSSIPLSLEPDASSSLFVKFNLFVYSKALRALNILFP

SEQ ID NO: 9527 - protein, 447 aa, Schizosaccharomyces pombe
MCLPTIRKIAIIGAGPSGLVTAKALLAEKAFDQVTLFERRGSPGGVWNYTSTLSNKLPVPSTNPILTTEPIVGPAALPVYPSPLYRDLQTNTPIELMGYCDQSFKPQTLQFPHRHTIQEYQRIYAQPLLPFIKLATDVLDIEKKDGSWVVTYKGTKAGSPISKDIFDAVSICNGHYEVPYIPNIKGLDEYAKAVPGSVLHSSLFREPELFVGESVLVVGGASSANDLVRHLTPVAKHPIYQSLLGGGDIQNESLQQVPEITKFDPTTREIYLKGGKVLSNIDRVIYCTGYLYSVPFPSLAKLKSPETKLIDDGSHVHNVYQHIFYIPDPTLAFVGLALHVVPFPTSQAQAAFLARVWSGRLKLPSKEEQLKWQDELMFSLSGANNMYHSLDYPKDATYINKLHDWCKQATPVLEEEFPSPYWGEKERSIRENMWSIRAKFFGIEPPK

SEQ ID NO: 9528 - protein, 184 aa, Rhodospirillum rubrum
MVEPIQGEGGIFPAPEGYLSGLRRLADEHGLLLILDEVQTGVGRTGKLFAHEWDGIIPDVVAIAKGIGAGFPMGACLAREPYASALVAGSHGSTFGGNPLAMAVGNAVLDIILAEGFLDGVSARGADLIARLDGLVHRHPTILAGVRGRGLMIGLVCAAPNGVVLNALREQGLLAVPAEAGVVR

SEQ ID NO: 9529 - protein, 419 aa, Zea mays
MAYEASSLSSSSPAAQLLSSLGGATTAIKRDTGVTEESTMGGEKETFDTSDLNASLPAAAAALSAEDRAGLVNALKDKLQSLAGQHADVLETLSPNVRKRVEFLREIQSQHDEIEAKFFEERAALEAKYQKLYEPLYTKRYGIVNGEVEVDGVCDEPASENTVEGKEPDAKGVPDFWLTAMKTNEVLSEEIQERDEAALKYLKDIKWSRIEDPKGFKLDFFFDTNPFFKNSVLTKTYHMVDEDDPILEKAIGTEIEWYPGKNLTQKILKKKPKKGSKNTKPITKTEDCESFFNFFNPPQVPEDDDDIDEDTADELQSQMEHDYDIGTTIRDKIIPHAVSWFTGEAVQGEDFGELGDDDEDDDDEDDDEDDEDEEEDDDEEEDDEEESKPARKSGSGRRHKAPQKVSQGNAEQPAECKQQ

SEQ ID NO: 9530 - protein, 376 aa, Populus tremula x Populus tremuloides
MASMYNPETSAVQDQQQNPTLLYDALYCSEENWVEEVREDWFQDELEGESYCSNNSNKLNTFPILLEQDLSWEDEELSSLFAKEEQNQLCKDLETNPSLARARCEAVEWILKVNEHYSFTALTAVLAVNYLDRFLFSVHLQKEKPWMAQLAAVSCLSLAAKVEETQVPLLLDFQVEDSKYVFEAKTIQRMEILVLSTLKWKMNPVTPISFLDYITRRLGLEHYLCLEFLKRCERMVLSILADSRSMPYVPSVMAAATMLYVIDNIEPSLAAEYQSQLLSILGIDKDKVEDCSKFLMEFALRDHFKLLSNKRKFCSLPGSPSGVVDVSFSSDSSNDSWSVASSVSSSPKPLSKKSRALQSLNNATTSDFSQHSSPVP

SEQ ID NO: 9531 - protein, 470 aa, Burkholderia fungorum
MPPLNRERYSFAMPQRKSPWGTHFEEIHMTSRPVIDDLSSFWMPFTANRQFKAAPRLLESAKGMYYRSTDGREVLDGCAGLWCVNAGHGREEIIAAITQQLSTLDFAPTFQMGHPLAFEAATKVAELMPEGLDRIFFTNSGSESVDTALKIALAYHRSRGEGQRTRLIGRERGYHGVGFGGISVGGIAPNRKTFSGALLPAVDHLPHTHNLEQNAFSKGQPAWGAHLAEELERIVTLHDASTIAAVIVEPVAGSTGVLIPPQGYLQKLREICTKHGILLIFDEVITGFGRVGKATASEYFGVTPDLITMAKAINNAAIPMGAVAASRTVHDTIVNSGAQGAIELFHGYTYSAHPAATAAAIATLDLYRREGLFERAATLAPTFEAAAHSLRGAKHVKDVRNIGLIAGVELESRDGAPGARAYEAFVKCFEAGVLVRFTGDILAFSPPLIINEEQIAHIFKTVGDVLATVQ

SEQ ID NO: 9532 - protein, 326 aa, Streptomyces avermitilis MA-4680
MTWLITGGAGYIGAHVVRAMREAGDRAMVYDDLSTGIAERVPDGVPLVVGSTLDGGLLRRTLAEHAVTGVVHLAAKKQVGESVELPLHYYRENVEGLRVLLEAVTDASVPSFVFSSSAAVYGMPDVDLVREETPCVPMSPYGETKLAGEWLVRATGRATGLSTASLRYFNVAGAATPELADAGVFNLVPMVFEKLTEGAAPRIFGDDYPTPDGTCVRDYIHVVDLAEAHVAAARALEASPGAGLTLNIGRGEGVSVREMVDRINALTGYDTPPTVVARRPGDPARVVASADRIAVELGWKAKYDVQDMITSAWEGWVRLHPGATRG

SEQ ID NO: 9533 - protein, 117 aa, Zea mays
  unsure (1)..(117): unsure at all Xaa locations
PPPFFPGPPHAEDAFPFFLNGPSLYTTAAFXRXYXSLKEELLTDPALEFTEEPXFLDRGGMADYNVLGRQDEPEGSLVGDSYXLLKGADALGEEETLLACXLGLGIEWVHAFFLALD

SEQ ID NO: 9534 - protein, 462 aa, Arabidopsis thaliana
METTVKNKQVILRNYVKGIPKESDLMIITASDPVELKVKPGSAAVMVRNLYLSCDPYMGILMREPTPSTLALLDAFIPGKPIAGIGVSQVIDSDDPSFTKGDMIWGIVNWEEFSTINPAAIFKIDVNINVPLSYYTGILGMIGLTAYAGFFEICSPKKGDTVFVSAASGAVGQLVGQFAKLMGCYVVGSAGSKQKVDLLLNKFGYDDAFNYKEEPDLDSALKRCVPKGIDIYFENVGGKMLDAVLLNMKTYGRIAVCGMISQYHLETRDRLQNLPDIIFKKIRMQGFASYDFIDRFPKFLEFVLPYIKEEKLAYVEDIVEGLENGPAALVGLLHGKNVGKQVLKGKKINPNSSDYNLRTTDSRVAMGILSWFTGSPKPSQSETSKPEMIQMPKSETPAPGMNGAIEVPRPDRATVFEFGSVAATGDRVTLAGYCPVSDDLEPCRWEILPADGKDAPQFRVVF

SEQ ID NO: 9535 - protein, 342 aa, Pseudomonas syringae pv. tomato str. DC3000
MILVTGGAGYIGAHITLQLLESGRDVVVLDNLCNSSRDALGRVERLGGRRLNFIHGDVRSKATLHRLFTRYPVEAVVHCAGLKAVGESVREPLRYFDTNVSGSVNLCQAMAEAGVFDLLFSSSATVYGDCERMPLDENCPLGLPTNPYGHSKLMAEHVMKSVAHSDPRWSIGLLRYFNPIGAHPSGLLGEVPCNTPNNLLPLLLQVANRLRPALHIFGNDYPTPDGTGVRDYLHVMDLADGHLKALDRIHSERGASVWNLGTGQGYSVLEVVRAFERISGKAVPLIYEPRRPGDVAACWSDPAKALRELQWSARLDLDSMLADAWRWQCMNPQGYAPTALVS

SEQ ID NO: 9536 - protein, 64 aa, Zea mays
MARLHWLEAVLPLGIIGGMLCIMGNAQYFIPKAAPGRPKHIGNDMWDVPMEPRAKKLVEQSSGN

SEQ ID NO: 9537 - protein, 473 aa, Oryza sativa
  unsure (1)..(473): unsure at all Xaa locations
NPPKIQTRPSRRRGERNPTMAGGGGGEGKVACAAWIRRREEKEKAXRASSRRXGRAGSPPAVEVLGFDSKECSLSEPLARAELGEEPGDAPRGITVHPSGDELVCATAKGCRLFKLIFEEFTVRLISRDAPPLESVGPQKCLAFSTDGSKFAIGGEDGHLRIFHWPSMNVLLDEPKAHKSFRDMDISLDSEFLVSTSTDGSARIWKIDEGVPLVNLTRSADEKIECCRFSRDGMKPFLFCTVAKGNKVVTVVWNISDWSRIGYKRLLGKPISTLSVSMDGKYLALGSHDGDFCAVDVKKMDVSHWSKKVHLGSPVSSIEFCPTERAVISTSHQWGAELTKLNVPADWKEWQVWLILLSLFLVSAILFYMFYERSDSFWNFPMGQHQPAKPWSVMKESPPVPEDQNPWXIIFQAIKHLGVVLFHNERVFSKPNSCCTILLVRRSDHVSIYLGKSVKCHCNWWSDGSYENAIDFQ

SEQ ID NO: 9538 - protein, 338 aa, Salmonella enterica subsp. enterica serovar Typhi
MRVLVTGGSGYIGSHTCVQLLQNGHDVVILDNLCNSKRSVLPVIERLGGKHPTFVEGDIRNEALITEILHDHAIDTVIHFAGLKAVGESVAKPLEYYDNNVNGTLRLVSAMRAANVKNLIFSSSATVYGDQPKIPYVESFPTGTPQSPYGKSKLMVEQILTDLQKAQPEWSIALLRYFNPVGAHPSGDMGEDPQGIPNNLMPYIAQVAVGRRESLAVFGNDYPTEDGTGVRDYIHVMDLADGHVVAMEKLADKSGVHIYNLGAGVGSSVLDVVNAFSKACGKPINYHFAPRRDGDLPAYWADASKADRELNWRVTRTLDEMAQDTWHWQSRHPQGYSD

SEQ ID NO: 9539 - protein, 228 aa, Gossypium populifolium
  unsure (1)..(228): unsure at all Xaa locations
FTSLCHTDVYFWEAKGQTPLFPRIFGHEAGGIVESVGEGVTHLKPGDHVLPVFTGECGNCRHCKSKESNMCDLLRINTDRGVMLSDGKTRFSINGKPIYHFVGTSTFSEYTVAHXGSVAKINPAAPLDKVCILSCGISTGLGATLNVAKPAKGSTVAIFGLGAVGLAAAEGARIAGASRIIGVDLNPNRFEEAKKFGCTEFVNPKDHNKPVQEVLAEMTNGGVDRSVE

SEQ ID NO: 9540 - protein, 395 aa, Thermus thermophilus
METRTLEDWRALLEAEKTLDSGVYNKHDLLIVRGQGARVWDAEGNEYIDCVGGYGVANLGHGNPEVVEAVKRQAETLMAMPQTLPTPMRGEFYRTLTAILPPELNRVFPVNSGTEANEAALKFARAHTGRKKFVAAMRGFSGRTMGSLSVTWEPKYREPFLPLVEPVEFIPYNDVEALKRAVDEETAAVILEPVQGEGGVRPATPEFLRAAREITQEKGALLILDEIQTGMGRTGKRFAFEHFGIVPDILTLAKALGGGVPLGVAVMREEVARSMPKGGHGTTFGGNPLAMAAGVAAIRYLERTRLWERAAELGPWFMEKLRAIPSPKIREVRGMGLMVGLELKEKAAPYIARLEKEHRVLALQAGPTVIRFLPPLVIEKEDLERVVEAVRAVLA

SEQ ID NO: 9541 - protein, 398 aa, Pasteurella multocida
MTQYNREIFDQVMIQNYVPAQFIPVRGKGSHVWDQQGKDYIDFTSGIAVNSLGHCADEIVDVLKQQSEKLWHSSNWFTSEPTLALATKLVEKTFAERVMFVNSGAEANEAALKLARRYAVDHFGYQKSKIIAFKQSFHGRTLFTVSVGGQAKYSDGFGPKPADIVHVPFNDLAAVQAVMDENTCAVIVEPIQGESGILPASQDFLQGLRELCDQHNALLIFDEVQTGVGRTGYLYAYMKYEVVPDILTSAKALGNGFPIGAMLTTHEIAKSFAPGVHGTTFGGNPLACAVAEKVIDIISAPPFLQKIQRTSEKFMQKLQEINQQCGLFKEIRGEGLLIGAELIEQYHGRASEFVKKAADNGLMILVAGPNVLRFAPALNISEEALALGFERLAKTLHI

SEQ ID NO: 9542 - protein, 299 aa, Zea mays
MMRETYMDVLPPVDHIAARSNWFPAAARLWTAAENKQFERALAGLDLCRPDWEEVARAIPGRTVREVVSHFKHLEVDVQQIESGQVPLPAYGGGASSFTLQWDGYGPGPGDFRHGYRFAGGCGRRHHGRTPEQERKKGVPWTEEEHRLFLLGLKKYGKGDWRNISRNFVQTRTPTQVASHAQKYFIRLNSGGKDKRRSSIHDITTVNLTDDQPPSPSQSSLITSQSNAPAPAPGPAPAAGICQVPLAADAKRHGARTLPFSSPNRTSAAPAYRMEFHDQQGLQCGPLHDQLLASQSVLF

SEQ ID NO: 9543 - protein, 273 aa, Zea mays
MTGSMDLPAKGGFSFDLCRRNNMLEKNGLKVPGFRKTGTTIVGLVFQDGVVLGADTRATEGPIVADKNCEKIHFMAPNIYCCGAGTAADTEAVTDMVSSQLQLHRHATGRESRVVTALTLLKSHLFKYQGHVSAALVLGGVDCTGPHLHTVYPHGSTDTLPFATMGSGSLAAMSVFESKYKEGLTREEGIQIVCEAICAGIFNDLGSGSNVDVCVITKGKTEYLRNHQLPNPRTYASSKGYSFTKGQTEVLSSKVTLLKQKVEVAEGGDAMEE

SEQ ID NO: 9544 - protein, 189 aa, Streptococcus pneumoniae R6
MESILVKLAQYPSIETERLLLRPVTLDDAEAMFDYASDKGNTRYTFPTNQSLEETKNNIAQFYLANPLGRWGIELKSNGKFIGTIDLHKIDPVLKKAAIGYIINQTYWNQGLTTETNRAVIELAFEKIGMNKLVALYDKANPASGKVMEKSGMRFSHAEPYACMDQHEKGRIVTRVHYVLTKEDYFANK

SEQ ID NO: 9545 - protein, 157 aa, Gossypium hirsutum
NKGSWTAEEDRRLAKYIEIHGAKRWKTIAIKSGLNRCGKSCRLRWLNYLRPNIKRGNISDEEEDLIIRLHKLLGNRWSLIAGRLPGRTDNEIKNYWNSHLSKKIINHDVRTEQTSSSEQIVPHKAWETVQMEEEEVVKGSDEIENSEFSIDVDEFFD

SEQ ID NO: 9546 - protein, 341 aa, Burkholderia fungorum
MRPTHFSTTIRMPRADYRKRRFWHRSRVATSTVCNWVSAHCSESASRPRGARFARIGGISMNQDFFLQSKVAAITGAAGGLGTGIAKRLAGLGASVALLEPGIERLVSLASELTDSGATVLNVACNVTDAASTRYAAAQVLSSFGRIDVLVNNAGVLARPSALESISLEDWDRSLAVNLTGALLCTASFGAAMLEAGAGSIVNIASIAAYSPNTSVAYSVSKAGLLALTRHTAVEWAPRGIRANSVSPGFIRTPLSEVHYANPDLLQLRTQATPVRRLGTVDDVAAIVGFLASPASAFINGEDIVADGGFLNTALMHVHDPAQQYGGTHQADLSAFARLGR

SEQ ID NO: 9547 - protein, 204 aa, Triticum aestivum
MPRSGALPLLAALVLALAAAAAASASNSKGAPAATDFIRKSCRETQYPSVCMQSLSSYGKPPPRSPQELARAALSVSADRARSASAYVGRICGPGLRSGSGAKAKSSPARDCLENMADSVGHLRDAAKELDGSLGRAGSPAFRWHLSNVQTWCSAALTDENTCLDGLSRGVDAGTRAAIRSKVVEVAQVTSNALALVNKVGSGH

SEQ ID NO: 9548 - protein, 379 aa, Oryza sativa (japonica cultivar-group)
MSTSAPTSSPEPPEFIRGSLIPALPDDLAIHCVALLPRAAHPSLALVSRAFHTLLCRDPGPLLAARRRLRLSDPHVILSLRPPASASPLFFLLLPHPGWPPLPLPSPPVPVSSSSSVAVDGNRVFLFGGSVSGVPSPSVQILDPRTRSWSVGPRLSSPREFAAAVAHSGVLFVAGGCVPSSPFWAESLNLSSPDAKWSPVPSPPHFREKWMHGSASLAGKVLAVADRGGLAYDPAAPPTEAWAPVSPILDMGWKGRAAVVGGILYSYDYLGQVKGYDPDTDCWSKVEGLEQELPKFLCGATLANVGELLYLVWEGKWKGKGKAKGKGEARSMVVIDWAAIAVTKAEEGRLTGKVLSRDTIVFKDMPKGSAITHCIALEL

SEQ ID NO: 9549 - protein, 369 aa, Zea mays
MEAIRKQASKLREQVARQQQAVMKQFGGGYGADGVFADEAEAHQHSKLEKLYISTRAAKHFQRDIVRGVEGYIVTGSKQVEIGNKLCEDGKKYGTENTCTSGSTLSKAALSFAKARSMMEKERGNLLKALGTQVAEPLRAMVMGAPLEDARHLAQRYDRMRQESEAQAIEVSKRQMKLREASGNSDMISRLEAAESKLQELKSNMGGLGKEALAAMTAVEGQQQRLTLQRLIALVESERNYHQKVLQILDQLEREMVSERQRIEGAPPPVVESSMPPPPAYEEVNGIFMRNTVAELVETVEYFLAEAIQSYRAESDTELNLSAGDYIVVRKVSNNGWAEGECRGRAGWFPYDYIEKRERVLASKVAQVF

SEQ ID NO: 9550 - protein, 475 aa, Lactobacillus plantarum WCFS1
MKASQRLLVKKSVNPANFNKGGLEKTLSAFSLTMMGVGAIVGSGIFITPGIIAAKYAGPAAMLSFVIAAVVCSLAALCYAEFSSTIPLAGSAYTYVYTVFGEFLAWILGWSLISEYLFAVSSVAVSWSSYFQNLMSGFGLKLPTFLTAAAGTAGVSGAGFNLIAFVVVLAVSLLLVGGLQESTRVNSIMVIVKILVIVLFIGVAIFFVKPANYHPFMPHGVSGLVKGASLAFYAYIGFDAVSTASEEVKNPKRNMPIGIVGSLVVASILYVAMAAVLVGVVHYSKLNVGDPVAYALAVIHQNWAAGIVSLGAVVGMTTVLIVMLYGGTRLLFAISRDGLLPKVFRTVSPHTKVPVKSTWIFGIIASVFAAVIPLDKIAELVNIGTLFAFAMVSIGVVFLRRHETLQQINSSFKVPFYPVLPVVSFLACVYLMLNLQAFTWHMFGIWLVIGIVIYFAYSYRHSRIRAGLRAKESKS

SEQ ID NO: 9551 - protein, 215 aa, Zea mays
MAGTSSWSSSSSCASSFGSPDHDVVCVTEPDSVGAAAVAVADAEGSVKFLCSYGGRILPRRTDGTLRYVGGDNRVLSVDRPIRFYVLQRKLRELCGGWEAHLRCQLPTEDLDALISVTCDDDLAKLLEEYDEASKDRLQSLKIRAFLFPTRTPAPSILQRRSPPSIAHLHWQNTSPPAAAGVSLTCAPRWWAGPQASRQAQAPQAQNYDRHSLGE

SEQ ID NO: 9552 - protein, 447 aa, Arabidopsis thaliana
MALQRQLLKRATSDIYHRRAISLLRTDFSTSPSIADAPPHIPPFVHQPRPYKGPSADEVLQKRKKFLGPSLFHYYQKPLNIVEGKMQYLYDESGRRYLDAFAGIVTVSCGHCHPDILNAITEQSKLLQHATTIYLHHAIGDFAEALAAKMPGNLKVVYFVNSGSEANELAMMMARLYTGSLEMISLRNAYHGGSSNTIGLTALNTWKYPLPQYGTSGKVAGFIAETIQGVGGAVELAPGYLKSVYEIVRNAGGVCIADEVQTGFGRTGSHYWGFQTQDVVPDIVTMAKGIGNGLPLGAVVTTPEIASVLASKILFNTFGGNPVCSAGGLAVLNVIDKEKRQEHCAEVGSHLIQRLKDVQKRHDIIGDVRGRGLMVGIELVSDRKDKTPAKAETSVLFEQLRELGILVGKGGLHGNVFRIKPPMCFTKDDAGKFLMHWTIPSPGCEQG

SEQ ID NO: 9553 - protein, 386 aa, Saccharomyces cerevisiae
MSAATVGKPIKCIAAVAYDAKKPLSVEEITVDAPKAHEVRIKIEYTAVCHTDAYTLSGSDPEGLFPCVLGHEGAGIVESVGDDVITVKPGDHVIALYTAECGKCKFCTSGKTNLCGAVRATQGKGVMPDGTTRFHNAKGEDIYHFMGCSTFSEYTVVADVSVVAIDPKAPLDAACLLGCGVTTGFGAALKTANVQKGDTVAVFGCGTVGLSVIQGAKLRGASKIIAIDINNKKKQYCSQFGATDFVNPKEDLAKDQTIVEKLIEMTDGGLDFTFDCTGNTKIMRDALEACHKGWGQSIIIGVAAAGEEISTRPFQLVTGRVWKGSAFGGIKGRSEMGGLIKDYQKGALKVEEFITHRRPFKEINQAFEDLHNGDCLRTVLKSDEIK

SEQ ID NO: 9554 - protein, 85 aa, Antirrhinum majus subsp. cirrhigerum
GSVSEANTQYYQQEASKLRAQISNLQNQNRNMLGESLGGLTLRDLKNLETRVEKGISRIRSKKNELLFTEIEYMQKRQEIDLHHN

SEQ ID NO: 9555 - protein, 478 aa, Clostridium perfringens str. 13
MAEQHNEPKKLGFAQLAALIVGSMIGGGAFNLPSDMARGAGTGAVIIGWIITGIGMIALAFVYQSLANRKPELTGGVYSYAKAGFGEYIGFNSAWGYWLSAWIGNVSYSVLLFGAVGYFLPMFGAGNNVASIIGASVLLWAFTLLILNGVSGAALINLITTIAKLVPIFLFIVISLFMFNFDKFTFQFWGTSDLGGIVTQVKSTMLVTLWCFIGIEGAVVVSGRAKKQSDVGKATVLGLIGTLIIYMLITLMALGVMDRVKLSGLENPSMAYVLEFAVGKWGAVLINLGLIISLFGSLLGWALLAAEIPYVAAKDGVLPKVFAKLNKKGTPSGSLIITNLLVQAFLILTLVASSTYQALYSVASTAILVPYLLSAMYGFKLALTGETYDKNPTGRTRDKIFGGIATVYAIWLCYAAGLKYLLLCFILYAVGIIFFYIGKKQNNKDAEVFVGKEKILAIIVLVIAIIAIVMLFNGTITI

SEQ ID NO: 9556 - protein, 408 aa, Xanthomonas axonopodis pv. citri str. 306
MSTAADSPLSLAHYYLPVYRPRQVVLERGQGSRVWDDAGREYLDLSSGIAVSGLGHNDPDLVAALTEQAGKLWHTSNVFFSAPPLKLAEELVSASRFAHKVFLCNSGTEANEAAIKLVRKWASSQGRPADKRVIVTFRGSFHGRTLASVTATAQPKYQEGYEPLPGGFRYVDFNDVAALEAAMAGGDVAAVMVEPIQGEGGVMPAAPGFLSRVRALCDQHDALLVLDEIQCGMGRTGTLFAHWQEQVTPDIVTLAKALGGGFPIGAMLAGPKVAQTMQFGAHGTTFGGNPLAAAVARVALRKLASPQIADNVVRQSAALRAGLEALNAEFGLFAQIRGRGLMLGAVLAPEHAGQAGAILDLAAKHGLLLLQAGPDVLRFVPALNLTDAELADGLARLRLATAEYVAQP

SEQ ID NO: 9557 - protein, 205 aa, Neisseria meningitidis Z2491
MPYTEDMRPGDTANPYGASKAMVERMLTDIQKADPRWSVILLRYFNPIGAHESGLIGEQPNGIPNNLLPYICQVASGRLPQLSVFGGDYPTPDGTGMRDYIHVMDLAEGHVAAMQAKSNVAGTHLLNLGSGRASSVLEIIRAFEAASGLTIPYEVKPRRAGDLACFYADPSYTKAQIGWQTQRDLAQMMEDSWRWVSNNPNGYDD

SEQ ID NO: 9558 - protein, 152 aa, Populus tremuloides
MVKAVAVLNSSEGVSGTIFFTQEGDGPTTVTGNLSGLKPGLHGFHVHALGDTTNGCMSTGPHFNPVGKEHGAPEDENRHAGDLGNVTVGDDGTAAFTIIDFQIPLTGPHSIIGRAVVVHGDPDDLGKGGHELSKTTGNAGGRVACGIIGLQG

SEQ ID NO: 9559 - protein, 120 aa, Beta vulgaris
VSEEYKLVPDTLYLTVNLIDRFLSGNYLEKQKLQLLGVTCMLIASKYEEVSAPQVEDFCYITANTYAREEVLNMERKVLNFLCFQLSVPTIKTFLRRYVHAAQATEDSLVDLEFLAKYLV

SEQ ID NO: 9560 - protein, 123 aa, Oryza sativa
  unsure (1)..(123): unsure at all Xaa locations
XGEGNDPGAWGGFEXSWDAXGFSKTGGTASRRTRGGGKFPLSGWGNNEMTVPLTSAAIREVDVVGIFRYKDTWPXLCIEFLRSGKIDVKPLITHRFGFSQEDVEEAFEVSARGRDAIKVMFNL

SEQ ID NO: 9561 - protein, 457 aa, Zea mays
MSHYHSADFEEMEDEYDMNEPVDDMEGEDEYQELVIRDSDAEDEDDADQLHKLSDTSAADARSGKDIQGIPWETIEVTRETYRQARLEQYKNYENIPNSGVAAMMVQFVNQPKKACKSTEKGRTYYEFRRNTRSVKSTISHFQLRNLVWATSKHDVYLLLHYSVLHWSALNGVDTEIMDVHGHVAPSEKHPGSLLEGFLHTQISTMAVKDNLLVAGGFQGELICKHLDREGISFCCRTTYDDNAITNALEIFNTSSGALHFIASNNDCGVREYDMERYQLFKHFRFDWPVNHTSLSPDGKLVIIVGDDTDALLIDSNSGKTIHSMKGHLDFSFASAWSPDGLTFATGNQDKTCRIWDARNLTESVHVLRGNVGAIRSIRFTSDGHFLSMAEAADFVHIFDIKSDYNKRQELDFFGEVSGMSFSPDTDTLYVGISDRTYGSLLQFGRLYNYSYLDSLL

SEQ ID NO: 9562 - protein, 644 aa, Antirrhinum majus
MATGIQNQKIVPENLRKQLAIAVRSIQWSYAIFWSNSVAQPGVLEWGDGFYNGDIKTRKTVQSVELNQDQLGLQRSDQLRELYESLSLGETNTQAKRPTAALSPEDLTDAEWFFLVCMSFIFNIGQGLPGRTLARNQAVWLCNAHRADTKVFSRSLLAKSASIQTVVCFPYSEGVVELGATELVPEDLNLIQHIKTSFLDSPATVPKIPNYVSNSITNNNDLICEALEHANIPENDLDQLLNCPDTNICSPDNSLDDFADNLLIDESNLAEGINGEVPQTQSWPFMDDAISNCLNSSMNSSDCISQTHENLESFAPLSDGKGPPETNNCMHSTQKCNQQIENTGVQGDEVHYQGVLSNLLKSSHQLVLGPYFRNGNRESSFVSWNKDGSSGTHVPRSGTSQRFLKKVLFEVARMHENSRLDAGKQKGNSDCLAKPTADEIDRNHVLSERKRREKINERFMILASLVPSGGKVDKVSILDHTIDYLRGLERKVDELESNKMVKGRGRESTTKTKLHDAIERTSDNYGATRTSNVKKPLTNKRKASDTDKIGAVNSRGRLKDSLTDNITVNITNKDVLIVVTCSSKEFVLLEVMEAVRRLSLDSETVQSSNRDGMISITIKAKCKGLKVASASVIKQALQKVTMKS

SEQ ID NO: 9563 - protein, 126 aa, Glycine max
  unsure (1)..(126): unsure at all Xaa locations
MSFLYEKSDIWRWLVRKTRDSRSFFFTFATVCGVIPGIIGYGVMQATNSTNPELEARLXQSARPETVMMGKVNQERLAEYLGELKQKQDTNDRYVAALRGETLTRKPYQRIQPVPKPNDTVTTKPQ

SEQ ID NO: 9564 - protein, 327 aa, Nostoc punctiforme
MEYRQLGKHGIRVSEICLGSWLTYGGATSEDIARQCIEQAYNLGINFFDTANVYAGGEAEKIVGKVLRQYPRESYILATKVYFPMGNGPNDRGLSRKHILEQCDASLKRLGLDYIDLYQAHRYDQTVPLAETLMAFDQLVKQGKILYYGVSEWSAGQLAHATDLTRLANLAPIASDQPRYNMLDRTIEKEVLPLCRREGIGIINYSPLAQGLLTGKYKPGQSLPQGSRASDPKQNIFLNNGKLDQQELLKVQRLLPIAEEEGLSLSQLALTWCLRNPEISSVIIGASKPAQVQENVSASGKQLSWATIQRIEEVLKMEISDRVTVGV

SEQ ID NO: 9565 - protein, 374 aa, Guillardia theta
MTQKKTVLAENSKIGNFAYSRFHPMQPIRLSMTSELIYSYGMEKFLRIIRTEKKTNSEMFNIHSSIFEFNVIKKKNFESINYITIDKYDADCPIFKGLNEYLLLYSSASLLSLDELTNNNCQIAINWSGGLHHSKIDEKSGFCYLNDINLCILNLLKHFNYILYIDIDVHHGDGVEEVFYATNRVFVLSFHFYNKNFFPGSGSITNKGISIGKYASYNVPIKKNIGDENYCNIFESIVREIIESVRPDIIILQSGADSLSFDVIGRFNLSINGHSNCLNFLKKFNIPILVLGGGGYIKDRVSKCWTFETSIAIDKKIKYNIPNNIYWKLYRPNFHLDIEKKDKANDFNTKKYLDFIDSEIKKNIRFHKNNIKLF

SEQ ID NO: 9566 - protein, 289 aa, Ribes nigrum
MIAGSIAGSIEHMAMYPVDTLKTRIQAIGSCSAQSAGLRQALGSILKVEGPAGLYRGIGAMGLGAGPAHAVYFSVYEMCKETFSHGDPSNSGAHAVSGVFATVASDAVITPMDVVKQRLQLQSSPYKGVVDCVRRVLVEEGIGAFYASYRTTVVMNAPFTAVHFATYEATKKGLLEVSPETANDENLLVHATAGAAAGALAAVVTTPLDVVKTQLQCQGVCGCDRFSSSSIQDVIGSIVKKNGYVGLMRGWIPRMLFHAPAAAICWSTYEASKTFFQKLNESNSNSSVT

SEQ ID NO: 9567 - protein, 392 aa, Ptilochaeta bahiensis
DLEPVNPADVPVTAAGALKSYKLAAKAISRLQSLPGGNISLLCDVLVKEVRDLTGYDRVMVYKFHEDEHGEVVSECRGSDLESYLGLHYPATDIPQASRFLFMKNKVRMICDCLAPPVKVIQDKRLSQPLSLCGSTLRSPHGCHAQYMANMGTIASLVMSVTVNEDDDMMDGDQQQMARKLWGLVVCHHTSPRFVPFPLRYACEFLIQVFGVQINKKVDLAAQVREKHILRIQTMLCDMLFRNAPVAIITQSPNVMDLVKCDGAALYYKNKFWLLGVTPTEAQIREIAEWLLEYHSGNTGLSTDSLMEAGYPGASVLGDAVCGMAAVSITSRDFLFWFRSHTAKEIKWGGAKHDPEDKDDGRKMHPRSSFKAFLEVVKWRSLPWEDVEMDAI

SEQ ID NO: 9568 - protein, 299 aa, Oryza sativa (japonica cultivar-group)
MDSDWLKGIVPEEHGMGSSSPSAELIACPRAPMQAAAAAADRRLRPQHDQPLKCPRCESTHTKFCYYNNYSLSQPRYFCKTCRRYWTKGGSLRNVPVGGGCRKNKRAPPKKAAAHAQPAVAVAAALQGRHMETGLHLSFSGMQHHLAPPPPAAATAADPLCSLGLFDWKQYDPVFAGSGGGGSPVAALESAGGSEAQFMGAGMMGIGGGGVAEYHALSALRFAAGLGDHLALPFGAVRAEHDAVEVKPVAAERLLSLEWCGEASRTAAPESSISSLGGLGLWSGMIGGGHHHHGSSAAI

SEQ ID NO: 9569 - protein, 155 aa, Zea mays; identical to SEQ ID NO: 5953

SEQ ID NO: 9570 - protein, 1758 aa, Neurospora crassa
MDTLQSLQWRPPKPNYLPHDIDVDEPIVDVYKPPIPMDKASDRENQEYYAHMKRMAHEYNITRPKGYTVSYHFNPDMEPHHFGLTHPMKPFRLTLTKSLVTAYGMNFAMDNYNTRIATYEELNSFHTSDYLDYLHMAPPEEMPRDIDNPDKEVKFNLGGSDCPLFHGLYDYCSMSAGSSLDAARKICNKQSDIAIAWGGGLHHAKKSEASGFCYINDIVIAILQLLRCYPRVLYIDIDVHHGDGVEEAFHSTDRVLTCSFHKFAPEVFFPGTGGLDDNGPKSEHNPGAHHAINVPLNDGITDEQYGHLFQSVIGKINEKFRPSVIALQCGADSLAGDRLGRFNLQVQGHGACAKFCKTFGIPMIMFGGGGYTPRNVARAWAYETSVAIDVDEKINKIIPDHTPWRKHFVQEELFPSLEQILGEPRANRNSQKRLQEIIQHVHEQLRFVNAAPSVQQQVIPPDLGGIRDDVEDRLKEESEERDEGLRRDREEAPNDVPDDAPTYQEATTASPNPNNAPASAASSTPPQRPPPAVTQGLTAPSSTAASSTAPPHWPVPWWQKVDAQDFEQNPDRAIFAAVEDVSEMRNGGLITRRQFVDECTRLNRIRTVLKTGRISEASGPMTAEESQTAQKLLEWWNNFAVSAKAKQHAKELQDLRKGGTARPTPDTAPPPRFWNIINPLDFEKDPDRALTLILGELRNQREQGQLTKEDVARSHADVKRIRMVLKTGRISEYIGPMTEEESMEVQKALDDWKELAAYAESVQQNLQEAQKRTQEAGKAAQSAAPESPRGRAESTVDLEKTLEAVEEEDEGVNEWLGKQQHFRQYMRQRAALVNLDNNVAVQEWEKENDKGAVEQRTEDQRFTEWLERLGGSLPAMVIEGNVHVIEVDPKKAEDSLQGQVDMKNYIMVVKKEYEAATAYLRMMGVDVTAQEVKNEDEEEDGEKSKKKRRSKRKPKKKKKKKTTTGKDAQEYLDDEQTRNLEDGQDDKKDEQDDDNEKDERDDADEKDEDGQANVDEKDKDEMDSEENSDEYNTAAEEQSPQPKKSKINNAKRKRRKQRKQKAEQAAKEKAEREAWEKKKQEAKERKERKKREEEAQKAARKKEAREKETREKEAREKAAREKEEKAMREKAAREIAARKKEAREKETREKEAREKAAREKEAREKTAREKEAREKEVREKEARKKEAREKQVREKDAREKAAKEREEKVAREKEAQKARERQEQEKEAQKAREQQEQEARERKKLDEVIVVEEKVNEDDIKQEDEVKEEADNNPMSSQALMPSQQQMPGPGPGPMMLGHQIPPPPGLEPKPQQGQIPWGGHMWRQRQIPWASQMQQQTQVPWQWQMSQVEQVLRQWQMSQETQVPRQMQMPLQGQMPYQNPMPLQNPMAHQNSIPEQNSIPEQNPIPDQNPWPMQPQTPMPPQNLMPHQNPMPHQNSMPHPNPIPDQNSIPEQNPILDQNPWPMQPQTPMPPQNLMPHQNPMPHQNSMPHPNPIPDQNSIPEQNSILDQNPWPMQPQTPMPPQNLMPHQNPMPHQNSMPHPNPIPDQNSIPEQNPILDQNPGPMQPQTPMPPQNLMPHQNPMPHQNSMPHPNPIPDQNSIPEQNPILDQNPWPMQPQTPMPHHNSMPQGQMLPQEQMPAEPHVFPPPPVQDIVPNSVELTAEQLEIHARLLVRTGCFWMVRNGFFWIHSALSDDDNTANLSDHSKKLVIGRFRVLVSHLMNDLTVPPPPPQQQQQQQQQQQQQQQQQKQQQQQQPERK

SEQ ID NO: 9571 - protein, 194 aa, Oceanobacillus iheyensis HTE831
MKKQWVYLLSFMVIALFLMACGDDQSDEENQDKGEEAVESNATAEEEVLVSLENNEGQVVGTATLTEGEEGVQISLEGENLPAGEHGFHIHEAGKCELPNFESAGSHYNPTNAKHGFNHPEGPHAGDLENITVEEDGTVQTEVDAPMVTLQADTENTLYTEQGTSLIIHSGPDDYKSQPSGDAGDRIACGVIGE

SEQ ID NO: 9572 - protein, 386 aa, Gossypium hirsutum
MDQVQHPSVMQKVAGQLFRSSHSQDFQGYNGSFRSPALYQRRAAYGNYSNAALQHPVRAFGDLSMVPSTASAICVQAPAEKGFSSFAIDFLMGGVSAAVSKTAAAPIERVKLLIQNQDEMIKSGRLSEPYKGIGDCFKRTIKDEGFGSLWRGNTANVIRYFPTQALNFAFKDYFKRLFNFKKDRDGYWKWFAGNLASGGAAGASSLLFVYSLDYARTRLANDAKAAKKGGERQFNGLVDVYRKTLKSDGIAGLYRGFNISCVGIIVYRGLYFGMYDSLKPVLLTGSMQDSFFASFVLGWLITNGAALASYPIDTVRRRMMMTSGKAVKYKSSLDAFSQILKNEGGKSLFKGAGSNILRAIAGAGVLAGYDKLQLIVFGKKYGSGGA

SEQ ID NO: 9573 - protein, 362 aa, Kluyveromyces lactis
MSKNIVVLPGDHVGKEVTDEAIKVLNAIAEVRPEIKFNFQHHLIGGAAIDATGTPLPDEALEASKKADAVLLGAVGGPKWGTGAVRPEQGLLKIRKELGLYANLRPCNFASDSLLDLSPLKPEYAKGTDFVVVRELVGGIYFGERKEDEGDGVAWDSEKYSVPEVQRITRMAAFLALQQNPPLPIWSLDKANVLASSRLWRKTVEETIKTEFPQLTVQHQLIDSAAMILVKSPTKLNGVVITNNMFGDIISDEASVIPGSLGLLPSASLASLPDTNKAFGLYEPCHGSAPDLPANKVNPIATILSAAMMLKLSLDLVEEGRALEEAVRNVLDAGVRTGDLGGSNSTTEVGDAIAKAVKEILA

SEQ ID NO: 9574 - protein, 145 aa, Zea mays
  unsure (1)..(145): unsure at all Xaa locations
NKCSFEWSTSTTSLASDDVLSRCSISSLQEIYLYTTCSGLYGVIPRLLMGINTALTRIKEPNLCVLKINACWVASIAALISIIGSMKIXDFLSHLPQYAVGLDLSXIYLGSLQNTLETTLNGDPSEEASNATFYREAARASIYPI

SEQ ID NO: 9575 - protein, 233 aa, Synechocystis sp. PCC 6803
MAGENRPWTGAEKLTITVLIMACERAKGNSPQLRLGTRGAQRVKCDRVLSPFGCDSFVFRWRKIVDLSRIPAQPKAGLINVLIEIPAGSKNKYEFDKDMNCFALDRVLYSSVQYPYDYGFIPNTLADDGDPLDGMVIMDQPTFPGCVITARPIGMLEMIDGGDRDEKILCVPAKDPRYTYVKSINDLAGHRLDEIAEFFRSYKNLEKKVTEILGWKDVDAVLPLVEECVKNYK

SEQ ID NO: 9576 - protein, 143 aa, Zea mays; identical to SEQ ID NO: 1020

SEQ ID NO: 9577 - protein, 612 aa, Oryza longistaminata
MISLPLLLFVLLFSALLLCPSSSDDDGDAAGDELALLSFKSSLLYQGGQSLASWNTSGHGQHCTWVGVVCGRRRRRHPHRVVKLLLRSSNLSGIISPSLGNLSFLRELDLGDNYFSGEIPPELCRLSRLQLLELSDNSIQGSIPAAIGACTKLTSLDLSHNQLRGMIPREIGASLKHLSNLYLHKNGLSGEIPSALGNLTSLQEFDLSFNRLSGAIPSSLGQLSSLLNMNLGQNNLSGMIPNSIWNLSSLRAFCVSENKLGGMIPTNAFKTLHLLEVIYMGTNRFHGKIPASVANASHLTRLQIDGNLFSGIITSGFGRLRNLTELYLWRNLFQTREQEDWGFISDLTNCSKLQTLNLGENNLGGVLPNSFSNLSTSLSFLALHLNKITGSIPQDIGNLIGLQHLYLCNNNFRGSLPSSLGRLKNLGILLAYENNLSGSIPLAIGNLTELNILLLGTNKFSGWIPYTLSNLTNLLSLGLSTNNLSGPIPSELFNIQTLSIMINVSKNNLEGSIPQEIGHLKNLVEFHAESNRLSGKIPNTLGDCQLLRHLYLQNNLLSGSIPSALGQLKGLETLDLSSNNLSGQIPTSLADITMLHSLNLSFNSFVGEVPTM

SEQ ID NO: 9578 - protein, 273 aa, Zea mays
  unsure (1)..(273): unsure at all Xaa locations
MTGSMDLPAKGGFSFDLCRRNSMLEKNGLKLPGFRKTGTTIVGLVFQDGVVLGADTRATEGPIVADKNCEKIHFMAPNIYCCGAGTAAXDTEAVTDMVSSQLQLHRYATGRESRVVTALTLLKSYLFRYQGHVSAALVLGGVDCTGPHLHTVYPHGSTDTLPFATMGSGSLAAMSVFESKYKEGLTREEGIQLVSEAICAGIFNDLGSGSNVDVCVITKGKTEYLRNHQLPNPRTYVSSKGYSFTKGQTEVLSAKITHLKQKVEVTEGGDAME

SEQ ID NO: 9579 - protein, 259 aa, Oryza sativa
  unsure (1)..(259): unsure at all Xaa locations
MNATAARSDPGLHAQSPPRDCCRRRRRALVLLLLHHDDCRRSHGRGXKAASPVSRHIMPHLLNIYGSCATARDFEIYAAHATFEDPLMRAHGVKQIKSAFYTLPKLFGESKIVEYTITENETAPGKVEILIDNKQHYKFLGRAIDLASLITLDVEDGKVVKHQDWWDKKPLKNRDTVSFPVVGRLAEATRRGAMLLTHALMGCGKDPXAIASDSPTSGQSRCPYKNMFNIVYSLFTSTTSFPKYIKLVCLILNESTSYK

SEQ ID NO: 9580 - protein, 174 aa, Pseudomonas aeruginosa
MKYRLGDARVEAHPDSWIAPSAAVIGKVRLDAGASVWFGAVLRGDNELIHIGEHSNVQDGSVMHTDMGYPLTLGKGVTVGHNAMLHGCSVGDYSLVGINAVILNGAKIGKYCIIGANALIPEGKEIPDGSLVMGSPGKVVRELSEPQKKMLEASAAHYVHNARRYARDLVEDPA

SEQ ID NO: 9581 - protein, 404 aa, Brassica napus
FKFRQSPSSPRFRLNSRNWALNVTTPLTVDSSSSPPIEEEPKTQRFDPGAPPPFNLADIRAAIPKHCWVKNPWKSMSYVVRELAIVFALAAGAAYLNNWLVWPLYWIAQGTMFWALFVLGHDCGHGSFSNDPRLNSVVGHLLHSSILVPYHGWRISHRTHHQNHGHVENDESWHPMSEKIYKSLDKPTRFFRFTLPLVMLAYPFYLWARSPGKKGSHYHPDSDLFLPKERNDVLTSTACWTAMAVLLVCLNFVMGPMQMLKLYVIPYWINVMWLDFVTYLHHHGHEDKLPWYRGKEWSYLRGGLTTLDRDYGLINNIHHDIGTHVIHHLFPQIPHYHLVEATEAAKPVLGKYYREPDKSGPLPLHLLGILAKSIKEDHFVSDEGDVVYYEADPNLYGEIKVTAE

SEQ ID NO: 9582 - protein, 481 aa, Burkholderia fungorum
MSYRTEEVAYVQPAQPAASAQAAQATQQRSTAEYRALDAAHHIHPFSDMGALNRTGSRVIVKAQGVYLWDSDGNKVIDGMAGLWCVNVGYGRKELADAAYRQMMELPYYNTFFKTTHPPVIELSALLAELAPEPFNHFFYCNSGSEGNDTVLRIVHHYWATQGKHAKKFVISRKNGYHGSTIAGGTLGGMGYMHEQMPSKVENIVHIDQPYFFGEAQGNLTPEEFALARAQQLEAKILEIGADNVAAFIGEPFQGAGGVIFPASTYWPEIQRICRKYDILLVADEVIGGFGRTGEWFAHQYFGFEPDLITLAKGLTSGYIPMGAVGLHDRVAKAIIENGDFNHGLTYSGHPVAAAVAVANLKLLRDEKIVERVKTDTGPYFQKKLRDTLGNHPIIGEISGAGLVAGLQLAQDPKTRKRFANGGDVGTICRDFCFNGNLIMRATGDRMLLSPPLVINKLEIDEIVSKAKKAIDATAQQLGIS

SEQ ID NO: 9583 - protein, 171 aa, Vibrio cholerae
MNQFTLFAVVAFFSSSVLAQEMTVVMTDLSSGQSVGTVTVTDSEYGTVFTPQLTGLPAGLHGFHVHANGSCETSSKDGKTVLGGAAGGHYDPQNTGKHGYPWTNDNHLGDLPALYVDAQGQANQPVLASRFKMAEVKGKALMVHAGGDNHSDHPMPLGGGGARIVCGVIGL

SEQ ID NO: 9584 - protein, 470 aa, Xanthomonas campestris pv. campestris str. ATCC 33913
MSSWLRRKSIDQVTVHEAGRQLVRSLSWPHLIALGIGAIVGTGIYTLIGVGADKAGPAVLLSFVAAGIVCACAALAYAEMATMMPAAGSAYTYSYTALGESIAWVVGWSLVLEYSLVVSTVAVGWSGYFVGFLQWLGVNLPHALIAGPHAGGIVNLPAVVITFLVAGMLMAGTKESATLNAVLVVLKIIALGVFVAIALPAFNSANLQPFMPYGFSKAMGPDGVERGVMAAAIIFFAFYGFDAISTAAEETKNPGRDLSIGIVGSMIGCTLIYVLVALSAVGAMSFTVFGKSPEPLALILRELGHGKAALVIGAVAIIALPTVLLAFLYGQSRIFFVMSRDGLLPRGLSKVNARTGTPVAITLFTAVLVAALAGVARLDEIAALANAGTLAAFTAVAACLLVLRVREPTRARAFRTPLAWVVGPVAILGCLYLFWSLPSTTQGWFLVWNALGVVVYLAYGRRNSRLGKVG

SEQ ID NO: 9585 - protein, 393 aa, Sesleria insularis
EPARTEDPALSIAGAVQSQKLAVRAISRLQALPGGDVKLLCDTVVEHVRELTGYDRVMVYKFHDDEHGEVLAESRRADLEPYLGLHYPATDIPQASRFLFRQNRVRMIADCHAAPVRVIQDPAMPQPLCLVGSTLRSPHGCHAQYMANMGSIASLVMAVIISSGGEDNMSRGGAVPSAMKLWGLVVCHHTSPRCIPFPLRYACEFLMQAFGLQLNMELQLAHQLSEKHILRTQTLLCDMLLRDSPTGIVTQSPSIMDLVKCDGAALYYHGKYYPLGITPTGAQIKDIIEWLKVCHGDSTGLSTDSLADAGYPGATALGDAVCGMAVAYITPSDYLFWFRSHTAKEIKWGGAKHHPEDKDDGQRMHPRSSFKAFLEVVKSRSLPWENAEMDAIH

SEQ ID NO: 9586 - protein, 469 aa, Glycine max; identical to SEQ ID NO: 4368

SEQ ID NO: 9587 - protein, 154 aa, Saccharomyces cerevisiae
MVQAVAVLKGDAGVSGVVKFEQASESEPTTVSYEIAGNSPNAERGFHIQEFGDATNGCVSAGPHFNPFKKTHGAPTDEVRHVGDMGNVKTDENGVAKGSFKDSLIKLIGPTSVVGRSVVIHAGQDDLGKGDTEESLKTGNAGPRPACGVIGLTN

SEQ ID NO: 9588 - protein, 382 aa, Daucus carota
MRFTRVYTEVFNMTDHSLLCTETNNLCFDDLEARDDQDPRIDCENVVGNESEALICAVPLQRDEDFVFVFESKVNFCPEVIFSTDRSGELDLCVRKEALDWIYKAHAHYNFGALSVCLAVNYLDRFLSLYELPSGKKWTVQLLAVACLSLAAKMEEVNVPLTVDLQVADPKFVFEAKTIKRMELLVLSTLKWRMQACTPCSFIDYFLRKINNADALPSGSLIDRSIQFILKTMKGIDFLEFRPSEISAAVAICVTREAQTLDINKAMSNIIPVEKDRVFKCIEMIQDLTLVTETSNVASGRTRAQVPQSPVGVLDAACLSYKSDERTVGSCPNSSLHTETSPHTKRRKLIEIMKCGFYSITQFQIFSEWEFWCGCLCKRPPL

SEQ ID NO: 9589 - protein, 353 aa, Zea mays
MDMPIMHDGDRYELVRDIGSGNFGVARLMRNRADGQLVAVKYIDRGEKIDENVQREIINHRSLRHPNIIRFKEVILTPTHLAIVMEYASGGELFERICNAGRFSEDEARFFFQQLISGVSYCHSMQVCHRDLKLENTLLDGSTAPRVKICDFGYSKSSVLHSQPKSTVGTPAYIAPEVLLKKEYDGKVADVWSCGVTLYVMLVGAYPFEDPDEPKNFRKTIQRILGVQYSVPDYVHISPECQDLISRIFVANPSTRITMPEIRSHPWFLKNLPADLVDDSATTTSKQYEEPEQPMQGMDEIMQILGEATIPAAGSRGLNQFLNDGLDLDDDMEDLDSDADLDLESSGEIVYAM

SEQ ID NO: 9590 - protein, 127 aa, Triticum aestivum
MDTSAPSPFVNGETLKMFLGRRVRTVVQVQHNEGGVLLGLSTDGHQLTIRGASGAPEPPHYIEVIGIADSNLSIRAESCTDFGENFDGVAFNGAMQALRMTKYNYLFLVEFNITPGWGVNQAMLVNW

SEQ ID NO: 9591 - protein, 838 aa, Brassica napus
TFLLVFVVMILFHPALSIYINTLSSTESLTISNNRTLVSPGDVFELGFFKTTSSSRWYLGIWYKQLPEKTYVWVANRDNPLPNSIGTLKISNMNLVLLDHSNKSVWSTNLTRRNERTPVMAELLANGNFVMRDSNNNDASEFLWQSFDYPTDTLLPEMKLGYNLKKGLNRFLISWRSSDDPSSGDYSYKLEPRRLPEFYLLQGDVREHRSGPWNGIRFSGILEDQKLSYMEYNFTETSEEVAYTFRMTNNSFYSRLTLSSTGYFERLTWAPSSVIWNVFWSSPANPQCDMYRMCGPYSYCDVNTSPSCNCIQGFDPRNLQQWALRISLRGCKRRTLLSCNGDGFTRMKNMKLPETTMAIVDRSIGEKECKKRCLTDCNCTAFANADIRNGGTGCVIWTGNLADMRNYVADGQDLYVRLAAADLVKKSNANGKIISLIVGVSVLLLLIMFCLWKRKQNREKSSAASIANRQRNQNLPMNGIVLSSKRQLSGENKIEELELPLIELEAIVKATENFSNSNKIGQGGFGIVYKGILLDGQEIAVKRLSKTSVQGVDEFMNEVTLIARLQHVNLVQILGCCIDADEKMLIYEYLENLSLDSYLFGKTRRSKLNWKERFDITNGVARGLLYLHQDSRFRIIHRDLKVSNILLDRNMVPKISDFGMARIFERDETEANTMKVVGTYGYMSPEYAMGGIFSEKSDVFSFGVMVLEIITGKRNRGFDEDNLLSCAWRNWKEGRALEIVDPVIVNSFSPLSSPFQLQEVLKCIQIGLLCVQELAENRPTMSSVVWMLGNEATEIPQPKSPGCVRRSPYELDPSSSRQRDDDESWTVNQYTCSVIDAR

SEQ ID NO: 9592 - protein, 923 aa, Oryza sativa (japonica cultivar-group)
MEKDHQPVISLRPGGGGGGPRPGRLFSPAFAAAASGSGDLLRSHVGGASKIGDPNFEVRERVRYTRDQLLELREIVDIPEAILRINQEIDIELHGEDQIWGRPESDVQVQTQTQAQPHNRYGETDNRDWRARTVQPPAANEEKSWDNIREAKAAHASSGRQQEQVNRQDQLNHQFASKAQVGPTPALIKAEVPWSARRGNLSEKDRVLKTVKGILNKLTPEKFDLLKGQLMESGITTADILKDVISLIFEKAVFEPTFCPMYAQLCSDLNEKLPSFPSEEPGGKEITFKRVLLNNCQEAFEGAESLRAEIAKLTGPDQEMERRDKERIVKLRTLGNIRLIGELLKQKMVPEKIVHHIVQELLGSGPDKKACPEEENVEAICQFFNTIGKQLDENPKSRRINDTYFIQMKELTTNLQLAPRLRFMVRDVVDLRSNNWVPRREEIKAKTISEIHDEAMKTLGLRPGATGLTRNGRNAPGGPLSPGGFPMNRPGTGGMMPGMPGTPGMPGSRKMPGMPGLDNDNWEVPRSKSMPRGDSLRNQGPLLNKPSSINKPSSINSRLLPHGSGALIGKSALLGSGGPPSRPSSLMASLTHTPAQTAPSPKPVSAAPAVVPVTDKAAGSSHEMPAAVQKKTVSLLEEYFGIRILDEAQQCIEELQCPEYYSEIVKEAINLALDKGPNFIDPLVRLLEHLHAKKIFKTEDLKTGCLLYAALLEDIGIDLPLAPALFGEVVARLSLSCGLSFEVVEEILKAVEDTYFRKGIFDAVMKTMGGNSSGILKFVFPNRHYILLKLSNIGFVGRRGGGRVCWSRAASAAGALFARNMAGRHTIILMQPSQNRATRTFMDFNSVNHALDGICGLYERKIRDINPMARDLTYDINDLYNFIDGLTDISALVFDRSLHAFLPYDRRWIKQEMFQHLKRLAQQ

SEQ ID NO: 9593 - protein, 359 aa, Magnetococcus sp. MC-1
MAKKFLVLPGDGIGQEITAEAVKVLNWAIQNGADITLEEGLIGGTAYDATGTPLPAETITQAKAAQAVLLGAVGGTKWEPLDISVRPEKGLLGIRKALDLYCNLRPAAVYPQLADASTLKKEVVAGIDIMVVRELSSGIYFGQPRGVEDLGDGRKKGFNTLVYTTDEIERIARKAFEAARKRSNRVCSVDKANVLESTELWREVVSDLHKREYADVELSHMYVDNAAMQLIRNPRQFDVIVTTNMFGDILSDAASMLTGSIGMLPSASLGDQFALYEPIHGSAPDIAGKGIANPLATILSVAMMLRYSLELPQLADGVEAAVVTVLDQGLRTADIMQPGMTQVGTAQMGDAVLAALNNA

SEQ ID NO: 9594 - protein, 2117 aa, Aspergillus fumigatus
MPNGRSNSPFPRSAGLERSASQGHNQPRQGSSNNLYSSTFSWNSPDISHTDQRRGVGRKAMATSGADDPGPPPTSSSSSKQLQLNPNQIDYFHQNPNASWSSSPKIAPMDSSGTFSHDFSEQEASPASATFRPSTGRTFASEPVDFDYNRDDRRPSVASATTISSQGSKSSTGGRFRKKLQGFFGDEYLPPGESKQEQEQDTRSLSSRPASIDHFKARERANSDGARNFPERSQDDTSSLHPSRPRTPLPSSEITPWLYQSFNDIPQFGEAPIREVPIAPEGSRLAGQTATNSGAPREARRHHGSHRHSRSKEEKPTVAGDLAGYPARPATGRDDSYLGLRPFRDHSLNASTAMSSTTTLGGRSTSPTPSIQSAYSREQSQNSPGAPSNKRSILDKIRRTKAHGPLKHFPGSKSAQEASKSSSKLARREASPRRGRQGSLEGGTSLRNLDLGDYERRKDGKGIVMGSTKLRNRRGLGNEAPPGKDVKLSEEPGVWRLDTDLSHMEGIVSQQPPPSPGDKSKAQDGVPPKHEEGKKSEGLPPGHWDAPESWQVKKHGEDLAARLPNVASDATGIAREPDGTSYFIRVFRIDSTFATLSAGLNATVADILLMLGRKSFLQDHLNNYEIVMKRNDLSRQLDHSERPILMQKRLLEQVGYTAKDRIEEIGREDHSYICRFIFLPTKLSGYSSLDGDPGFSRMQKFSHVDLQGRSLVTIPITLYKKASEIISLNLSRNLSLDVPKDFIQGCINLREIKFIGNEARRLPASFSLASRLTYLDVSNNLLEELGHANLDRLHGLVSIKMANNKLSELPSYFGNFQYLRSLNISSNNFQVFPSFLCNLKSLVDLDISFNNIAELPNIGKLVTLERLWMTNNMLSGPLDETFKDLVNLREIDARFNAITNIDILAQLPRLEQLLIGHNAVSKFKGSFPKLRTLLLDHCPMTQFDIDAPVPTLTSLNIASAKLVQFRDSLFENLPNLTKLILDKNHFVSMSPHIGKLRRLEHFSMIKNPLAALPATIGCLTELKYLNLRECNLRRLPAEIWHCARLETLNVSSNVLDSFPKHGSSPPQPPTDTGITPAATPGGATTPSYEELGPLQEQDGLETRRPSQTSGGFISSGGSPNDGTYRKPSVASSLGQSGRKVSAASRSGTEGSPSSRKDSNFSQHVASTFAGSLRNLYLADNRLEDDIFRELSLIPELRVVNLSYNELTELPQGLLKRWPFLTELYLSGNELTSLPSDDLEEGSNLKVLNLNANRFQVLPAELCKVSKLAILDVGSNALKYNVSNWPYDWNWNWNRNLKYLNFSGNKRLEIKPNITSAGTTTANGTDLTDFNSLTHLRVLGLMDVTLTTPTIPEENEDRRVRTSASLAGSLAYGMADFLGKSEHLSIIDMIVPRLKPDNVETLVGLFDGQAQSTGGSRIAKFLHENFTSTFSSELKRLRVEEEETPLDALRRTFLALNKNMAAAAYKSIDDRSVRQFHRGSPATKLLNQDDIRSGGVATVLYLNNMDLYVANVGDAQAILVKSDGTLKYLTKNHDPAEPHERARIRAAGGFVSRNGRLNDILHVSRAFGHFQLMPAVVAAPHTMHVQLTEQDEMIILASKELWDYVTPDVVVDVTRAERRDLMIAAQKIRDLAISFGANNKLMVMILGVSDLKKREKFKFRGTSLSMGPPAFPEEQIIPSTKRTKKPRDMPGDSRLARFDYVDAPIGELAIIFTDIKKSTSLWETCPDAMRSAIQIHNDILRRQLGIIGGYEVKTEGDAFMVAFSTTTAALLWCFNCQTQLLEAEWPTEILEQPQCQVQYDMENNIIFRGLSVRMGIHWGEPVCEKDPVTNRMDYFGPMVNRASRISAVADGGQIFVSSDFMSDIQRNLEVYADSERAASTGSEESYAVDSLGYNIRRELQQLNSQGFVIKDQGERKLKGLENPEPLYLIYPHSLSGRLTTLEQAEARENGPTTISKHSELEIQADLIWRLWELTLRLERLCGALENPGEARLKEPNVALFNLVKNHGGELADSTVVSLVEQQVTRIEMNVTTLSVRYMLKPFKPGDKLSDHAVPIGVVMQQLQTQLAEYRALKEQLAVGGAGITGVSSSSPGAEGQDTGESDPSSASSSFLQLATSSE

SEQ ID NO: 9595 - protein, 204 aa, Oncidium cv. 'Gower Ramsey'
MGRGKIEIKKIENPTSRQVTYSKRRLGITKKAMELTVLCDAKVSLIMFSSSGKLSDYCSPSTEIKDAFQRYQQVTGFDIWDAQYQRMQSTLMNLREVNHKLQMEIRQRKGENLEGLDVKELRGLEQKLEESIKIVRERKYHVIATQTDTYKKKLRSTREMYPALLNELQEVDDENQQRSFIAEDLSGVYNSAISMANQRLAHCL

SEQ ID NO: 9596 - protein, 316 aa, Corynebacterium glutamicum ATCC 13032
MKQRMVGSSGLRVSRLGLGTSTWGSGTELAEAGDIFKAFINSGGTLIDVSPNYTTGVAEEMLGTMLDAEVSRSAVVISSSAGVNPALPLGRRVDCSRRNLIAQLDVTLRALNTDYLDLWSVGYWDEGTPPHEVADTLDYAVRTGRVRYAGVRGYSGWQLAVTHAASNHAAASARPVVVAQNEYSLLERRAEQELLPATQHLGVGFFAGAPLGQGVLTAKYRSEIPHDSRAASTGRDAEVQSYLDNRGRIIVDALDTAAKGLGISPAVTATTWVRDRPGVTAVIVGARTHEQLSHLLKAESVTLPTPITQALDDVSL

SEQ ID NO: 9597 - protein, 408 aa, Oryza sativa (japonica cultivar-group)
MSIQANPLIKTLALSPRRRMAPPAPATARRPMAAVRCSAAKRSYNVTLLPGDGIGPEVVAVAKDVLSLAGALEGVEFRFQEKLMGGAAVDAYGVPLPEETLAAAQASDAVLLGAIGGYKWDNNEKHLKPETGLLQIRAGLGVFANLRPAAVLPQLVDASTLKKEVAEGVDIMVVRELTGGIYFGQPRGFGKNDKGEDTGFNTEVYSASEIDRITRVAFEVARKRRGKLCSVDKANVLEASMLWRKRVTSLASEFPDIELSHMYVDNAAMQLIRNPKQFDTIVTNNIFGDILSDEASMLTGSIGMLPSASVGESGPGLFEPIHGSAPDIAGQDKANPLATILSAAMLLRYGLGEENAAKRVEAAVTETLNNGFRTGDIYSPGTTLVGCKRMGEEVLKTVESQSAVALNS

SEQ ID NO: 9598 - protein, 283 aa, Saccharopolyspora spinosa
MESIFDALAHGRPLHHGYWAGGYREDAGATPWSDAADQLTDLFIDKAALRPGAHLFDLGCGNGQPVVRAACASGVRVTGITVNAQHLAAATRLANETGLAGSLEFDLVDGAQLPYPDGFFQAAWAMQSVVQIVDQAAAIREVHRILEPGGRFVLGDIITRVRLPEEYAAVWTGTTAHTLNSFTALVSEAGFEILEVTDLTAQTRCMVSWYVDELLRKLDELAGVEPAAVGTYQQRYLGDIAAKHGPGPAQLIAAVAEYRKHPDYARNEESMGFMLLQARKKQS

SEQ ID NO: 9599 - protein, 257 aa, Triticum aestivum
  unsure (1)..(257): unsure at all Xaa locations
MPVGTVLVTGGTGYIGSFTSLTLLEHGYDVVIVDSLYNSSEVALDRIELICGRRPAFYKLDITDEKAIDEVFAKRPAIDSVIHFAALKAVGESGEIPLEYYRVNVGGSISLLRSMERNNVNNIVFSSSATVYGDATRFPNMIPIPEHCPIGPTNTYGRTKSMIEDVITDFVNAQRNNLEKAGKEYKQWNGALLRYFNPCGAHPTGIMGEDPQGIPFNLLPLLGQVATGEREKLLVFGDDYSSRDGTAIRDYIHXVDL

SEQ ID NO: 9600 - protein, 497 aa, Lactococcus lactis subsp. lactis
MQNLNKTEKTFFGQPRGLLTLFQTEFWERFSYYGMRAILVYYLYALTTADNAGLGLPKAQAMAIVSIYGALVYLSTIVGGWVADRLLGASRTIFLGGILITLGHIALATPFGLSSLFVALFLIILGTGMLKPNISNMVGHLYSKDDSRRDTGFNIFVVGINMGSLIAPLIVGTVGQGVNYHLGFSLAAIGMIFALFAYWYGRLRHFPEIGREPSNPMDSKARRNFLITLTIVVIVAIIGFFLLYQASPANFINNFINVLSIIGIVVPIIYFVMMFTSKKVESDERRKLTAYIPLFLSAIVFWAIEEQSSTIIAVWGESRSNLDPTWFGITFHIDPSWYQLLNPLFIVLLSPIFVRLWNKLGERQPSTIVKFGLGLMLTGISYLIMTLPGLLNGTSGRASALWLVLMFAVQMAGELLVSPVGLSVSTKLAPVAFQSQMMAMWFLADSTSQAINAQITPLFKAATEVHFFAITGIIGIIVGIILLIVKKPILKLMGDVR

SEQ ID NO: 9601 - protein, 203 aa, Oryza sativa
  unsure (1)..(203): unsure at all Xaa locations
KKXSLKLQKRLAASVLKCGRGKVWLDPNEVNEISMANSRQNIRKLVKDGFIIRKPTKIHSRSRARRMKEAKRKGRHSGYGKRKGTREARLPTKILWMRRMRVLRRLLRKYRESKKIDKHMYHDMYMKVKGNVFKNKRVLMESIHKSKAEKAREKTLSDQFEAKRAKNKASRERKIARREERLAQGPGEKVSAASSAXAAXASX

SEQ ID NO: 9602 - protein, 242 aa, Haemophilus somnus 2336
MAKTVLITGSSRGIGKAIALNLAAQGYDIVVHCRSRVDEAENVAQEVRALGQNARVLQFDVADREKVRSILEADVEENGAYYGIVLNAGLTRDNAFPALTDDDWDSVLRTNLDGFYNVLHPIMMPMIRRRQAGRIVCITSVSGLIGNRGQVNYSASKAGIIGAVKALAIELAKRKITVNCVAPGLIDTDILDENVPIAEILKMIPAGRMGDPEEVAHAVQFLMDEKAAYITRQVIAVNGGLC

SEQ ID NO: 9603 - protein, 566 aa, Schizosaccharomyces pombe
MNELHDGESSEEGRINVEDHLEEAKKDDTGHWKHSGTAKPSKFRAFIRLHFKDSRKFAFSRKKEKELTSEDSDAANQSPSGAPESQTEEESDRKIDGTGSSAEGGDGSGTDSISVIKKSFFKSGRKKKDVPKSRNVSRSNGADTSVQREKLKDIFSPHGKEKELAHIKKTVATRARTYSSNSIKICDVEVGPSSFEKVFLLGKGDVGRVYLVREKKSGKFYAMKVLSKQEMIKRNKSKRAFAEQHILATSNHPFIVTLYHSFQSDEYLYLCMEYCMGGEFFRALQRRPGRCLSENEAKFYIAEVTAALEYLHLMGFIYRDLKPENILLHESGHIMLSDFDLSKQSNSAGAPTVIQARNAPSAQNAYALDTKSCIADFRTNSFVGTEEYIAPEVIKGCGHTSAVDWWTLGILFYEMLYATTPFKGKNRNMTFSNILHKDVIFPEYADAPSISSLCKNLIRKLLVKDENDRLGSQAGAADVKLHPFFKNVQWALLRHTEPPIIPKLAPIDEKGNPNISHLKESKSLDITHSPQNTQTVEVPLSNLSGADHGDDPFESFNSVTVHHEWD

SEQ ID NO: 9604 - protein, 246 aa, Staphylococcus aureus subsp. aureus Mu50
MKMTKSALVTGASRGIGRSIALQLAEEGYNVAVNYAGSKEKAEAVVEEIKAKGVDSFAIQANVADADEVKAMIKEVVSQFGSLDVLVNNAGITRDNLLMRMKEQEWDDVIDTNLKGVFNCIQKATPQMLRQRSGAIINLSSVVGAVGNPGQANYVATKAGVIGLTKSAARELASRGITVNAVAPGFIVSDMTDALSDELKEQMLTQIPLARFGQDTDIANTVAFLASDKAKYITGQTIHVNGGMYM

SEQ ID NO: 9605 - protein, 494 aa, Suaeda japonica
MAASGMELMQERDVFKKYWVEHTVDLTIEAMMLDSQASDLDKEERPEILSMLPPLEGKCLLELGAGIGRFTGELAEKAGQVIALDFIESAIKKNEVINGHYKNVKFMCADVTSPTLSFPPHSLDVIFSNWLLMYLSDEEVENLVERMLKWLKPGGYIFFRESCFHQSGDHKRKSNPTHYREPRFYTKAFKECHLQDGSGNSYELSLLSCKCIGAYVRNKKNQNQISWLWQKVDSKDDKGFQRFLDTSQYKCNSILRYERVFGPGYVSTGGYETTKEFVSMLDLKPGQKVLDVGCGIGGGDFYMAETFDVEVVGFDLSVNMISFALERSIGLKCAVEFEVADCTKINYPDNSFDVIYSRDTILHIQDKPALFRSFYKWLKPGGKVLISDYCKKAGPPSPEFAAYIKQRGYDLHDVKEYGQMLKDAGFVDVLAEDRTEQFIRVLRKELETVEKEKDVFISDFSEEDYNDIVGGWNDKLRRTAKGEQRWGLFVAKKK

SEQ ID NO: 9606 - protein, 576 aa, Bifidobacterium longum DJO10A
MDDQRPIALSLQTRTERRRAGRVERLRTLAVRGTREERERGTALLMGTFQQRIPSAGRRQMRSDIQFHHSKLLVFHSLFVLPLSYGRRHRAPPAQPTRDTTVHPTKGDPSMAAAGTPKDDTGLERKMESRHLTMISLGGVIGTGLFVSSGYAIHQAGPLGAILAYAAGSLLVYCVMVSLGELSVAMPYAGSFHMYAKRFIGPGTAFTIAILYWLNWAVALASEFTAAGLLMQRWFPHSPSWVWSAVFIVVVFALNIMSVRLYGEAEFWFASIKVFAIIAFIVIGLLAIFGAIPIAGHDSAPLLGNFVAGGWFPSGIAPIFSTLLTVVFAFSGTEVVGVAAGETKDPSRAIPKAVHTTVLRLAIFFIGSILVMAALIPWHQAGVDTSPFVLVFQSIGMPFAGDIMNFVVLTAVLSAANSGLYVCSRMVWSLAKERLIPERFARTNFRGVPVWAVLFSMAGSLLALLSSVIAASTVYLVLVAVSGLATLVVWFSVCVCHIRFRREWARDGHSADELGYRAPGFPVLPWLAIVMCIGALVLVVLDDTQRSTLYCMIPFVACCYAAYYALERQRKRENNA

SEQ ID NO: 9607 - protein, 730 aa, Thermoanaerobacter brockii
MSYGIGQITRLGGASNLSPRETVRIANQIQKFLIENTRLGIPALIHEESCSGYMAKGATIFPQTIGVASTWNNEIVEKMASVIREQMKAVGARQALAPLLDITRDPRWGRTEETFGEDPYLVMRMGVSYIRGLQTESLKEGIVATGKHFVGYGNSEGGMNWAPAHIPERELREVFLYPFEAAVKEAKLSSIMPGYHELDGVPCHKSKKLLNDILRKDWGFEGIVVSDYFAISQLYEYHHVTSDKKGAAKLALEAGVDVELPSTDYYGLPLRELIESGEIDIDFVNEAVKRVLKIKFELGLFENPYINEEKAVEIFDTNEQRELAYKIAQESIVLLKNENNLLPLKKDLKSIAVIGPNADSIRNMIGDYAYPCHIESLLEMRETDNVFNTPLPESLEAKDIYVPIVTVLQGIKAKVSSNTEVLYAKGCDVLNNSKDGFKEAVEIAKQADVAVVVVGDKSGLTDGCTSGESRDRADLNLPGVQEELIKAIYETGTPVIVVLINGRPMSISWIAEKIPAIIEAWLPGEEGGRAVADVIFGDYNPGGKLPISIPQSVGQLPVYYYHKPSGGRSHWKGDYVELSTKPLYPFGYGLSYTEFSYTNLNISNRKVSLRDRMVEISVDIKNTGTLKGDEVVQLYIHQEALSVTRPVKELKGFKRITLDAGEEKTVIFKLSIEQLGFYDENMEYVVEPGRVDVMIGSSSEDIRLRDYFEIVGEKEKVAKKFITEVRVENK

SEQ ID NO: 9608 - protein, 151 aa, Zea mays; identical to SEQ ID NO: 743

SEQ ID NO: 9609 - protein, 356 aa, Lactococcus lactis subsp. lactis
MRAARFYDRGDIRIDEINEPIVKAGQVGIDVAWCGICGTDLHEFLDGPIFCPSAEHPNPITGEVPPVTLGHEMSGVVNFIGEGVSGLKVGDHVVVEPYIVPEGTDTSETGHYNLSEGSNFIGLGGNGGGLAEKISVDERWVHKIPDNLPLDEAALIEPLSVGYHAVERANLSEKSTVLVVGAGPIGLLTAAVAKAQGHTVIISEPSGLRRKKAQEAQVADYFFNPIEDDIQAKVHEINEKGVDAAFECTSVQPGFDACLDAIRMGGTVVIVAIWGKPASVDMAKLVIKEANLLGTIAYNNTHPKTIDLVSTGKIKLDQFITAKIGLDDLIDKGFDTLIHHNETAVKILVSPTGKGL

SEQ ID NO: 9610 - protein, 394 aa, Zizania aquatica
EPARTEDPALSIAGAVQSQKLAVRAISRLQALPGGDVKLLCETVVEHVRELTGYDRVMVYRFHEDEHGEVVAESRRNDLEPYLGLHYPSTDIPQASRFLFRQNRVRMIADCHSAPVRVIQDPALPQPLCLVGSTLRAPHGCHAQYMANMGSIASLVMAVIISSAGDDEHNMARGGIPSAMKLWGLVVCHHTSPRCIPFPLRYACEFLMQAFGLQLNMELQLAHQLSEKHILRTQTLLCDMLLRDSPTGIVTQSPSIMDLVKCDGAALFYHGKYCRLGVTPTEAQIKDIIEWLTVCHGDSTGLSTDSLADAGYPGAATLGDAVSGMAVAYITPSDYLFWFRSHTAKEIKWGGAKHHPEDKDDGQRMHPRSSFQAFLEVVKSKSLPWENAEMDAIH

SEQ ID NO: 9611 - protein, 216 aa, Carica papaya
LPESVDWRAKGAVTPVKHQGYCESCWAFSTVATVEGINKIKTGNLVELSEQELVDCDLQSYGCNRGYQSTSLQYVAQNGIHLRAKYPYIAKQQTCRANQVGGPKVKTNGVGRVQSNNEGSLLNAIAHQPVSVVVESAGRDFQNYKGGIFEGSCGTKVDHAVTAVGYGKSGGKGYILIKNSWGPGWGENGYIRIRRASGNSPGVCGVYRSSYYPIKN

SEQ ID NO: 9612 - protein, 131 aa, Triticum aestivum
  unsure (1)..(131): unsure at all Xaa locations
LLSIQSNRLTKIEXLEELDKLEEIYLSHNAIAKIEGFQNNLKLTIIDIANNALTTIENLSHLPALEEFWANNNQFDNECYQQVEEELGKIKTLETVYLEGNPMQQKNKATYRNKIRLALSNIKQIDATPVR

SEQ ID NO: 9613 - protein, 152 aa, Glycine max; identical to SEQ ID NO: 2480

SEQ ID NO: 9614 - protein, 256 aa, Arabis gemmifera
MEDYERNSNSPTHEEDSDVRKGPWTEDEDAILVNFVSIHGDARWNHIARSSGLKRTGKSCRLRWLNYLRPDVRRGNITLEEQFMILKLHSLWGNRWSKIAQYLPGRTDNEIKNYWRTRVQKQAKHLRCDVNSNLFKETMRNVWMPRLVERINAQSSPATCEPVESMITDPGQPIEEPIPVEPGFLQFNQQFVPASELSATSSNSPAETLSDVQGGVVNGSGSDPAGQTGFGEFNDWGCVGGDNIWTDEESFWFLQD

SEQ ID NO: 9615 - protein, 580 aa, Zea mays
MGEVEDMYTQDGTVDMKGNPAVKKGTGNWRACPYILANECCERLAYYGMSTNLVNYMKTRLGQVNSVASNNVTNWQGTCYITPLIGAFFADAYMGRFWTIAIFMIIYIFGLALLTMASSVKGLVPTSCGDKDVCHPTDAQAAVVFVALYLIALGTGGIKPCVSSFGADQFDENDEREKKSKSSFFNWFYFSINIGALVASTVLVYVQTHVGWGWGFGIPAVVMAIAVGSFFVGTPLYRHQKPGGSPLTRIAQVLVACARKWNVAVPADKSRLHETVDGESGIEGSRKLEHSEQLACLDRAAVVTAEDGAEASPWRLCSVTQVEELKSVIRLLPIWASGIVFAAVYSQMSTMFVLQGNTLDQSMGPRFKIPSATLSMVDTISVIVWVPVYDRAIVPLVRSYTGRPRGFTQLQRMGIGLVVSIFSMVAAGVLDIVRLRAIARHGLYGEDDIVPISIFWQIPQYFIIGCAEVFTFVGQLEFFYDQAPDAMRSMCSALSLTTVALGNYLSTVLVTIVTHITTRHGRIGWIPENLNRGHLDYFFWLLAVLSLLNFLAYLVIASWYKYKKTADDYPGAKGEHGTEH

SEQ ID NO: 9616 - protein, 328 aa, Corynebacterium diphtheriae
MKLLVTGGAGYVGSVCSTVLLEQGHEVTIVDNLTTGNRDAVPLGATFVEGDIKDVAENVLSSDSFDAVLHFAARSLVGESVEKPDEYWQHNMVTTLALLDAMKRNNVRNIVFSSTAATYGEPETVPITEDAPTHPTNPYGATKLSIDYAITSYAHAYGFAATSLRYFNVAGAYGLVGENREIETHLIPLVLQVALGHRDKIFMFGDDWPTEDGTPIRDYIHIRDLADAHILALQSNVEGSHRIFNLGSGEGYSVKQVIDTCREVTGHPIPAEVAPRRAGDPAVLIASSAKAQSELGWKPQRTDLHTIVSDAWAFTSQLGDKAHSASRG

SEQ ID NO: 9617 - protein, 193 aa, Cucumis sativus
  unsure (1)..(193): unsure at all Xaa locations
TGDEGNNEYKKGLWTVEEDKILMDYVKAHGKGHWNRIAKKTGLKRCGKSCRLRWMNYLSPNVKRGNFTEQEEDLIIRLHKLPGNRWSLIAKRVPGRTDNQVKNYWNTHLSKKLGIKDQKTKQSNGDIVYQINLPNPTETSEETKISNIVDNNNILGDEIQEDHQGSNYLSSLWVHEDEFELSTLTNMMDFINX

SEQ ID NO: 9618 - protein, 580 aa, Oryza sativa
MGEVAEDIYTQDGTVDVKGNPATKKNTGNWRACPYILANECCERLAYYGMSTNLVNYMKTRLGQESAIAANNVTNWSGTCYITPLLGAFLADAYMGRFWTIASFMIIYILGLALLTMASSVKGLVPACDGGACHPTEAQTGVVFLALYLIALGTGGIKPCVSSFGADQFDENDEGEKRSKSSFFNWFYFSINIGALVASSVLVYVQTHVGWGWGFGIPAVVMAVAVASFFVGTPLYRHQRPGGSPLTRIAQVLVASARKWGVEVPADGSRLHETLDRESGIEGSRKLEHTGQFACLDRAAVETPEDRSAANASAWRLCTVTQVEELKSVVRLLPIWASGIVFATVYGQMSTMFVLQGNTLDASMGPHFSIPAASLSIFDTLSVIVWVPVYDRLIVPAVRAVTGRPRGFTQLQRMGIGLVISVFSMLAAGVLDVVRLRAIARHGLYGDKDVVPISIFWQVPQYFIIGAAEVFTFVGQLEFFYDQAPDAMRSMCSALSLTTVALGNYLSTLLVTIVTHVTTRNGAVGWIPDNLNRGHLDYFFWLLAVLSLINFGVYLVIASWYTYKKTADSPDDKAEHAGAN

SEQ ID NO: 9619 - protein, 512 aa, Candida tropicalis
MLDQILHYWYIVLPLLAIINQIVAHVRTNYLMKKLGAKPFTHVQRDGWLGFKFGREFLKAKSAGRSVDLIISRFHDNEDTFSSYAFGNHVVFTRDPENIKALLATQFGDFSLGSRVKFFKPLLGYGIFTLDAEGWKHSRAMLRPQFAREQVAHVTSLEPHFQLLKKHILKHKGEYFDIQELFFRFTVDSATEFLFGESVHSLKDEEIGYDTKDMSEERRRFADAFNKSQVYVATRVALQNLYWLVNNKEFKECNDIVHKFTNYYVQKALDATPEELEKQGGYVFLYELVKQTRDPKVLRDQSLNILLAGRDTTAGLLSFAVFELARNPHIWAKLREEIEQQFGLGEDSRVEEITFESLKRCEYLKAVLNETLRLHPSVPRNARFAIKDTTLPRGGGPNGKDPILIRKDEVVQYSISATQTNPAYYGADAADFRPERWFEPSTRNLGWAFLPFNGGPRICLGQQFALTEAGYVLVRLVQEFPNLSQDPETKYPPPRLAHLTMCLFDGAHVKMS

SEQ ID NO: 9620 - protein, 302 aa, Triticum aestivum
  unsure (1)..(302): unsure at all Xaa locations
MEARPRPSGVRRVTAKKRPRPDASSNSARKLQRREIAAFPERTFAASTTRERFRNIQLQEEFDTYDPKENSSLLPYLRKRSEIIEIVGARDIIFALSQLGVCAAFSRVTNQRICFLNGSPDEVIRSLFYNKNNDSLITVSVYGSENFSALRCRTTRIEYIRRGKPDAGFPLFETESLRWPGFVEFDDVNGKVLTYSAQDSTYKVFDLKNYTLLYTISDKDVQEIKISPGIMLLIYSRKKGYIPLEILSIEXGKRLKSFRHLLHRNKKIDFIEQFNEKLLVKQDGENLQILDVTNSKITEXSQ

SEQ ID NO: 9621 - protein, 458 aa, Streptococcus agalactiae NEM316
MENHRYEDEGKFQRKMTSRHLFMLSLGGVIGTGLFLSSGYTIAQAGPLGAVLSYLIGAVVVYLVMLSLGELAVAMPVTGSFHTYATKFISPGTGFTVAWLYWICWTVALGTEFLGAAMLMQRWFPDVPAWAFASFFALVIFGLNALSVRFFAEAESFFSSIKVIAIIIFIILGLGAMFGLVSFEGQHKAILFTHLTANGDFPNGIVAVVSVMLAVNYAFSGTELIGIAAGETDNPKEAVPRAIKTTIGRLVVFFVLTIVVLASLLPMKEAGVSTAPFVDVFDKMGVPFAADIMNFVILTAILSAGNSGLYASSRMLWSLANEGMLSKSVVKINKYGVPMRALLLSMAGAVLSLFSSIYAADTVYLALVSIPGFAVVVVWLAIPVAQINFRKEFLKENRLEDLSYKTPFTPVLPYITIVLLLISIVGIAWDSSQRAGLYFGVPFIILCYIYHKLRYKTW

SEQ ID NO: 9622 - protein, 222 aa, Triticum aestivum
MTLIELLPDYARIVDDGLYRAIDIYLKAHPSLMESECKKLCKLIDCQKLSQDASSHAAQNDRLPMQMVVRVLYFEQLRLKSSFSGGHSGGGGEYCSFSQRITMPISGSGVPSSCVSPRAAGAADSYASLRRENRELKLEVSRMRVRLTELEREQGMMKQGMRDGRPGEHGRAFFASISRGIGRMAMFGPAGERRKKSSRATASSQCSEGKSRRRKKPSVTYA

SEQ ID NO: 9623 - protein, 369 aa, Photobacterium damselae subsp. piscicida
MKSRAAVAFGPGLPLEIVEIDVAPPKKGEVLVKISHTGVCHTDAYTLSGDDPEGLFPVVLGHEGAGVVVEVGEGVTSVKPGDHVIPLYTAECGECDFCTSGKTNLCVAVRETQGKGVMPDATSRFFVNGQPLYHYMGCSTFSEYTVVAEVSLAKINPQANAEQVCLLGCGVTTGIGAVHNTAKVQEGDSVAVFGLGGIGLAVVQGARQAKAGRIFAIDTNPSKFELAKQFGATDCINPNDYDKPVQQVLVEMTKWGVDHTFECIGNVNVMRSALESAHRGWGQSVIIGVAGAGKEISTRPFQLVTGRVWKGTAFGGVKGRTQLPGMVEDAMSGKIELAPFVTHTMELDKINEAFDLMHDGKSIRTVIHY

SEQ ID NO: 9624 - protein, 210 aa, Brownea sp. 'Lavin 6225'
YDRVMAYKFHEDDHGEVIAEITKPDMEPYLGLHYPATDIPQAARFLFMKNKVRIIVDCRAKHVKVLQDEKLPFDLTLCGSTLRDPHSCHLQYMENMNSVASLVMAVVVNDNDEDGDSSDSVQPQKRKRLWGLVVCHNTTPRFVPFPLRYACEFLVQVFAIHVNKELELEYQIVEKNILRTQTLLCDMLMRDAPLGIVSQGPNIMDLVKCD

SEQ ID NO: 9625 - protein, 181 aa, Ralstonia metallidurans
MALPHWLCGLLDLGCGSSSTSSSSVTRQTSASTKPAAALSPKSGTNTAGRVTFDQQAGGGVMVVVSVTGLPPGTTHGFHIHEKGDCSAPDAMSAGGHFNPAGKPHGQMTMPDHHAGDMNNLVADSSGNARVQFIMPDVTVAPGPNSVVGRAVVVHKDADDYRTQPTGNSGGRIACGVIAAS

SEQ ID NO: 9626 - protein, 115 aa, Triticum aestivum
  unsure (1)..(115): unsure at all Xaa locations
PSNLVQVSLFRALHEKEVRSKGGFTRSQFXLVAFVCSFVYYIFPGYLFQMLTSLSWICWVFPNSVFAQQLGSGLYGLGIGSIGXDWAPSPPNSGSPSANPGSPTAIPARSQHQVR

SEQ ID NO: 9627 - protein, 743 aa, Geobacillus stearothermophilus
MENQNRQNAAQCPFHGSVTNQSSNRTTNKDWWPNQLNLSILHQHDRKTNPHDEEFNYAEEFQKLDYWALKEDLRKLMTESQDWWPADYGHYGPLFIRMAWHSAGTYRIGDGRGGASTGTQRFAPLNSWPDNANLDKARRLLWPIKKKYGNKISWADLFILAGNVAIESMGGKTIGFGGGRVDVWHPEEDVYWGSEKEWLASERYSGDRELENPLAAVQMGLIYVNPEGPDGKPDPKAAARDIRETFRRMGMNDEETVALIAGGHTFGKAHGAGPATHVGPEPEAAPIEAQGLGWISSYGKGKGSDTITSGIEGAWTPTPTQWDTSYFDMLFGYDWWLTKSPAGAWQWMAVDPDEKDLAPDAEDPSKKVPTMMMTTDLALRFDPEYEKIARRFHQNPEEFAEAFARAWFKLTHRDMGPKTRYLGPEVPKEDFIWQDPIPEVDYELTEAEIEEIKAKILNSGLTVSELVKTAWASASTFRNSDKRGGANGARIRLAPQKDWEVNEPERLAKVLSVYEDIQRELPKKVSIADLIVLGGSAAVEKAARDAGFDVKVPFFPGRGDATQEQTDVESFAVLEPFADGFRNYQKQEYSVPPEELLVDKAQLLGLTAPEMTVLVGGLRVLGANYRDLPHGVFTDRIGVLTNDFFVNLLDMNYEWVPTDSGIYEIRDRKTGEVRWTATRVDLIFGSNSILRSYAEFYAQDDNQEKFVRDFINAWVKVMNADRFDLVKKARESVTALQYFLNFY

SEQ ID NO: 9628 - protein, 281 aa, Triticum aestivum
  unsure (1)..(281): unsure at all Xaa locations
PAGFGNSQAQFIKMDKMEYVKLGNTGLKISKVILGCMSFGSSKWQGSPWVLDEEDGLKLLKAAYDNGINTWDTADTYSNGESEVIIGKALKKFNIPRQKVVILSKIYNPVMDDGTRPPSVNDGPLVNQMGLSRKHVFHAVDKCLERLGTDYIDVLQIHRLDRETPPEEIMRALHEVVQSGKVRYIGASSMYTWEFARMQYIAESKGWTKFISMQPFYNLLYREEEREMLPFCEXPGVGVIPWSPIARGLLAKPLSSKDDNQSIRSQNDRRLIRGLRIQSRH

SEQ ID NO: 9629 - protein, 331 aa, Lactobacillus casei
MTIAVLGGAGYIGSHTVKQLLAAGEDVVVLDNLITGHRKAVDPRARFYQGDIRDYHFLSQVFSQEKIDGIVHFAAFSIVPESMKDPLKYFDNNTGGMITLLEAMNQFGIKKIVFSSTAATYGEPKQVPIKETDPQVPTNPYGESKLAMEKIMHWADVAYGLKFVALRYFNVAGAMPDGSIGEDHHPETHIVPIILQVAAGTRTGLQIYGDDYPTKDGTNVRDYVHVVDLADAHILALKYLDAGNKSSAFNIGSAHGFSNLEILNAARKVTGQEIPATMGPRRAGDPSTLIASSEKARDILGWKPNYDDIDKIIETAWNWHENHPEGFGDRN

SEQ ID NO: 9630 - protein, 376 aa, Saccharomyces cerevisiae
MSNVTTPWWKQWDPSEVTLADKTPDDVWKTCVLQGVYFGGNEYNGNLGARISSVFVILFVSTFFTMFPLISTKVKRLRIPLYVYLFAKYFGSGVIVATAFIHLMDPAYGAIGGTTCVGQTGNWGLYSWCPAIMLTSLTFTFLTDLFSSVWVERKYGLSHDHTHDEIKDTVVRNTAAVSSENDNENGTANGSHDTKNGVEYYEDSDATSMDVVQSFQAQFYAFLILEFGVIFHSVMIGLNLGSVGDEFSSLYPVLVFHQSFEGLGIGARLSAIEFPRSKRWWPWALCVAYGLTTPICVAIGLGVRTRYVSGSYTALVISGVLDAISAGILLYTGLVELLARDFIFNPQRTKDLRELSFNVICTLFGAGIMALIGKWA

SEQ ID NO: 9631 - protein, 1839 aa, Saccharomyces kluyveri
MSSPTDAERVNMRREKHPQIEETFEEHVHNAMPKFKKHYALGITTHTNDEDDDPRDHRQRGIHNPNFIHSPNDPRPPLSQPIKPRFSVHGTASNASVFSHGDIAPVRKTSRAGSLFKRLAGKKSTTSLLGTEHQQRQQQQSSNSLVPAAGLRRKMSTFIHGGSGSQSNESRGTRSSIFFPSTSNSRRGSATSTMTSGSRSSHPPDTPPITSQQQEQQYDQQRQQRPETREQEQKPPTLSDMPIVSRSPSFFMLDTDLNNLSDITNIISATPKNTESDEVRSTGANKTLKYPKPPLSSHKSTSASDLSHHKAQWTAPESWDIEEDANKLLATKRKAKHHHHYHHPQHPRPPHRKHYSNFSKPIEDKAVVEKEQEPPEKCPQPISTDSNDAQGLEIAKPIDESSGIQHSASTQSVSSFSSGATGASGATGKQIGGDQETESTISTVGEDEEVTNLRSIDSEQTDDTSFSKFDEEYDKAEYQLEKYYNDFSDVDLNRRYAIRIFNIDDTFTTLSCTPNTTLQDMMPQLKRKFNVGQGSYQVSLKVGKLSKILRPTAKPILIQRRLLLLNGYLKSDPLHIMGIEDLSFIFSFVFHPVATSHLNYEQEQRLSRGDFVHVDLRNMDLTTPPIILYQHTSDIESLDVSNNANIFLPLDFIESAIKLSSLRMVNIRASKFPANVTDAYKLVSLDLERNFIKKVPDSIFKLNNLTIVNLQCNNLERLPPGFSKLKNLQLLDISSNKFVNYPEVINSCTNLLQIDLSYNKIHSLPVSINQLVKLAKMNLFNNRLTSVGDLSQMKNLRTLNLRCNRVTSIECHAPNLQNLFLTDNRISTFDDDLTRLRTLELQQNPITSMVCGGNYMANMTSLSLNKAKLSSFSAELLSKLPRLEKLELNENNLTQLPPEINKLTRLIYLSVARNKLESIPDEISDLRSLKSLDLHSNNLRMLMNNLEDLELTSLNVSSNLLTGFHGSPAKFFASPSPKLAKSLLFLSVADNNLTDSIWPLVNTFQNLKTLNLSYNNFVEISDLKLQNLTELYLSGNNFTSLPGEAVQHLRSLKVLMLNGNKLLSLPAELSQLSRLSVLDVGSNQLKYNISNYHYDWNWRNNKDLKYLNFSGNKRFEIKSALDPEGKNDLSDLGILKQLRVLGLMDVTLKTSKVPDESVSIRLRTTASMINGMRYGVADTLGQSDSVCSRDVTFERFRGREDECLICLYDGKNENASSGHKISKIIRDIYDKILIRLLEKYGEESDGIKRALRYSFLQLNKEINGMLVSVEDGNTDSGLTSADLLSGSSATVVYLKGKKIYTANIGDTMAVLSKNNGDFVTLTKLHVPAEREEYERIRTSGGYVNNQKLDGVSEVSRAVGFFDLLPHIHASPDISETVLSYSDEMLIIATHKLWEYLDYETVCDISRENKSQPMSAAEKMKDYAISYGCSDNITILCVSLDKSVNQQSQFTLNREDLISRKNTFEDTVLRRLQPEIAPPTGNVAIVFTDIKNSTFLWELFPDAMRAAIKTHNDIMRRQLRIYGGYEVKTEGDAFMVAFPTPTSALVWCLSVQLKLLEAEWPEEITSIQDGCLITDNSGTKVYLGLSVRMGVHWGCPVPEIDLVTQRMDYLGPVVNKAARVSGVADGGQITLSSDFCSEFKKIMKFHKRVVENQEPLKEVYGEDFIGEVLEREIHMLENVGWVFKDLGEQKLKGLETKEFITIAYPKTLASRHDLATKNQNSSVLNDDLLFQLRTISNKLENILSSINGGLIESETPGNSSIYMTFDKNTKDAVITKSTESDWISFLDHLVTRVESTVAILQLRQKLQGGLELYTSSDSTMHKSVFELLDEILKIQTDQKQ

SEQ ID NO: 9632 - protein, 165 aa, Ricinus communis
MAAADIEYRCFVGGLAWATSDKALEEAFSAYGEVLESKIINDRETGRSRGFGFVTFNNEKSMRDAIEGMNGQNLDGRNITVNEAQSRGGGGGGGGGYRNGGGGGYGGGRREGGYGGGGGYSRGGGGYGGGGGGYGGGRDRGYGGGGDGGSRYSRGGGASEGNWRS

SEQ ID NO: 9633 - protein, 124 aa, Oryza sativa
  unsure (1)..(124): unsure at all Xaa locations
XFITSRXAEPVAMTAPVITAEERSQGKGQMTMQFLLPSKYSKVEEAPRPTDERVVLRQVGERKYGVVRFSGLTGDKVVKEKAEWLKAALEKDGFTVKGPFVLARYNPPFTLPPLRTNEVMVPVE

SEQ ID NO: 9634 - protein, 518 aa, Coxiella burnetii RSA 493
MMKRSVGAPALLFAAIGGIVGSGWLFGPYFASRLVGPSAILAWAVGGGLMMLIALTFAELGSSFPFTGGSVRYLQLSHGPLVGFTMAWIAWISSIAVAPVETLALLHYASNYLPWLMHNVDGQSVLTLPGLITAGFLLAFLCVINSIGVRYLTKTNAIIVGAKLAVPIFTAIVLLFFDFHATNFSSHGFATQGIKGILTALPAAGVIFSFIGYSPVIQLAGEAKNPQRSIPIAIIGALIICIVLYILLQVAFIGALNPASLQHGWQALSFKGDAGPFAGIAMTLGMVWFAKLLYLDAAISPFGTALIYTASTARLGFAMSEGGYLPSSLRKLNRLGVPHRMILLNFVIGLFLFLPFPTWQHMMSFLVSLLVFAYAVGPLSLVVLRKTLPDHARPFRLPMAKTISFLAFYICNLIVYWSGWDVVFKMIIAILVGYVLLGSYLLFKHDKSFNWQWRRFWWMVCYIAGLALISHYGSFGGNHLIPFGWDFIVIASFSASIFGLALYCGVEVRKGEISAAVV

SEQ ID NO: 9635 - protein, 448 aa, Thermobifida fusca
MASEHADLPQERRLVTEIPGPRSRALQERRTAAVAQGVGSSLPVYVVRASGGIVEDVDGNRLIDFGSGIAVTNVGNANPRVVARASEQLARFTHTCFMINPYEGYVDVCEALNRITPGDHEKRSILVNSGAEAVENAVKIARHATGRQAVVVFDHAYHGRTNLTMALTARNMPYKQGFGPFAGEVYRMPMAYPFRWPTGPDNCGPEAAAQAIDLITTQIGPENVAAVLIEPIQGEGGFIVPGEGFLPALVEFCRKHGIVFIADEIQTGFARTGRLFACEHEGIVPDLITTAKGIAGGLPLAAVTGRAELMDAVHGGGLGGTYGGNPVACAAALAALETIEQDNLVERARAIGDVLLSRLRALAERYDIIGDVRGRGAMVAMELVAGAGDKTPNPEALASVVKYCHAKGLILLTAGTYGNVIRLLPPLVISDALLDEGLTIIEEAFAQL

SEQ ID NO: 9636 - protein, 248 aa, Triticum aestivum
  unsure (1)..(248): unsure at all Xaa locations
SCRIRHEAISRTTQLAGQFTSPTLNHNRFKTMASKYSVRKIGQPNTLEHRIYIEKDGNIVSPFHDIPLYANPEGTILNMVVEIPRWTNAKLEISKEQTINPIKQDIKKGKLRYVRNCFPHKGYLWNYGAFPQTWEDPNVIHPETKAKGDNDPLDVCEIGRXLLGTPGKIKQVKVLGVMALLDEEETDWXVSVIDGNRPLAAKLHDVEDVERHLPGLLRATNEWFRIYKIPXDXKPENQFAFNGECKNK

SEQ ID NO: 9637 - protein, 250 aa, Rosa rugosa
MAYENKPNTVLDSDAQRRLGRGKIEIKRIENTTNRQVTFCKRRNGLLKKAYELSVLCDAEVALIVFSNRGRLYEYSNNSVRETIERYKKACADSSNNGSVSEATTQYYQQEAAKLRAQITTLQNSNRGYMAEGLSNMSIKELKGVETKLEKAISRIRSKKNELLFAEIEYMQKRELDLHNNNQLLRAKGQIAENERHQQSINAIAGGHGSYDIMQPTQPFHEARNYFQVNALQPNIHQYSRHDQISLQLV

SEQ ID NO: 9638 - protein, 640 aa, Cryphonectria parasitica
MHRTVLLTLLSPSPELKKTHLSSPLSSFGRSPSQSTITDKDAKAQPQSGPSGTAPSPTPPDNNIASSEALTQTPVEFAPKPGILVVTLHEGRGFALPEPHKNIFSSHSTSASQGGGASIAGSVRTAPNGHRPNTSGGFGNVPTNHGRVSGKYMPYALLDFDKVQVFVNSVEGNPENPLWAGSNTQYKFDVSRVTDVTVHLYIRNPTAPPSVGRANDIFLGVVQIKPRFEEKHQFVEDPKANKKDREKAATEFAEKEKALGHSGVQWVPVGYGQGELKIGIEYVENRAGKLTIDDFDLLTVVGKGSFGKVIQVRKKDTSRIYALKTIRKAHIISRSEVTHTLAERSVLAQINNPFIVPLKFTFQSPEKLYFVLAFVNGGELFHHLQKEQRFDVNRSRFYTAELLCALECLHGFNVIYRDLKPENILLDYQGHIALCDFGLCKLDMKDEDRTNTFCGTPEYLAPELLMGQGYNKTVDWWTLGVLLYEMLTGLPPFYDENTNEMYRKILGEPLHFPSHDIVPPAAKDLLTKLLNRDPAQRLGANGSAEIKAHPFFHAIDWRKLLQRKYEPTFKPNVAGAMDTDNFDPEFTREAPQDSYVGGVPLSETMQNQFQGFSYNRPIAGLADGGGSVKDPSFIGSVTGR

SEQ ID NO: 9639 - protein, 458 aa, Escherichia coli CFT073
MMESKNKLKRGLSTRHIRFMALGSAIGTGLFYGSADAIKMAGPSVLLAYIIGGIAAYIIMRALGEMSVHNPAASSFSRYAQENLGPLAGYITGWTYCFEILIVAIADVTAFGIYMGVWFPTVPHWIWVLSVVLIICAVNLMSVKVFGELEFWFSFFKVATIIIMIVAGFGIIIWGIGNGGQPTGIHNLWSNGGFFSNGWLGMVMSLQMVMFAYGGIEIIGITAGEAKDPEKSIPRAINSVPMRILVFYVGTLFVIMSIYPWNQVGTAGSPFVLTFQHMGITFAASILNFVVLTASLSAINSDVFGVGRMLHGMAEQGSAPKIFSKTSRRGIPWVTVLVMTTALLFAVYLNYIMPENVFLVIASLATFATVWVWIMILLSQIAFRRRLPPEEVKALKFKVPGGVATTIGGLIFLLFIIGLIGYHPDTRISLYVGFAWIVVLLIGWMFKRRHDRQLAENQ

SEQ ID NO: 9640 - protein, 389 aa, Staphylococcus aureus subsp. aureus MW2
MQQHSSKTAYVYSDKLLQYRFHDQHPFNQMRLKLTTELLLNANLLSPEQIVQPRIATDDELMLIHKYDYVEAIKHASHGIISEDEAKKYGLNDEENSQFKHMHRHSATIVGGALTLADLIMSGKVLNGCHLGGGLHHAQPGRASGFCIYNDIAITAQYLAKEYNQRVLIIDTDAHHGDGTQWSFYADNHVTTYSIHETGKFLFPGSGHYTERGEDIGYGHTVNVPLEPYTEDASFLECFKLTVEPVVKSFKPDIILSVNGVDIHYRDPLTHLNCTLHSLYEIPYFVKYLADSYTNGKVIMFGGGGYNIWRVVPRAWSHVFLSLIDQPIQSGYLPLEWINKWKHYSSELLPKRWEDRLNDYTYVPRTKEISEKNKKLALHIASWYESTRQ

SEQ ID NO: 9641 - protein, 222 aa, Triticum aestivum
  unsure (1)..(222): unsure at all Xaa locations
MAGEKGLVLLDFWVSPFGQRVRIALAEKGLPYEYAEEDLMAGKSDRLLRANPVHKKIPVLLHDGRPVNESLIILQYLEDAFPDAPXLLPSDPYARAQARFWADYVDKKVYDCGSRLWKLKGEPQAQARAEMLDILKTLDGALGDKPFFGGDKFGFVDAAFAPFTAWFHSYERYGEFSLPEVAPKIAAWAKRCGERESVAKSLYSPDKVYDFIGLLKKKYGIE

SEQ ID NO: 9642 - protein, 456 aa, Escherichia coli CFT073
MEGQQHGEQLKRGLKNRHIQLIALGGAIGTGLFLGSASVIQSAGPGIILGYAIAGFIAFLIMRQLGEMVVEEPVAGSFSHFAYKYWGSFAGFASGWNYWVLYVLVAMAELTAVGKYIQFWYPEIPTWVSAAVFFVVINAINLTNVKVFGEMEFWFAIIKVIAVVAMIIFGAWLLFSGNGGPQASVSNLWDQGGFLPHGFTGLVMMMAIIMFSFGGLELVGITAAEADNPEQSIPKATNQVIYRILIFYIGSLAVLLSLMPWTRVTADTSPFVLIFHELGDTFVANALNIVVLTAALSVYNSCVYCNSRMLFGLAQQGNAPKALASVDKRGVPVNTILVSALVTALCVLINYLAPESAFGLLMALVVSALVINWAMISLAHMKFRRAKQEQGVVTRFPALLYPLGNWICLLFMAAVLVIMLMTPGMAISVYLIPVWLIVLGIGYLFKEKTAKAVKAH

SEQ ID NO: 9643 - protein, 348 aa, Corynebacterium efficiens YS-314
MVRKESRKMKLAVIGGDGIGPEVTDEALKVLRALRADIETTDLDLGARRYLRNGELLTDEDLALLREHDAILLGAIGAPGSVPPGVLERGLLLKLRFALDHHVNLRPSKLYEGVESPLKNPGEIDFVVVREGTEGAYTGNGGAIRVGTPHETANETSVNTRYGAERVIRYAFELAQSRRRHLTLVHKTNVLVHGGGLWQRTVDEVAREYPEVTVDYNHIDAATIYLVTDPSRFDVIVTDNLFGDILTDEAGAISGGIGLAASGNIDATGTNPSMFEPVHGSAPDIMGKGIADPTAAILSAAMMLRHLGDEANAVRIEEAVARDVAGRDPEAPISTTEVGDRIAAAVVA

SEQ ID NO: 9644 - protein, 104 aa, Dendrobium sp. XMW-2002-4
MGSNSCGSKEELNKGGWTADEDNLLMAYINTHGEGKWTTVSYNAGLKRSGKSCRLRWLNYLSPKIKRGNFSEEEDDLIIRLHKLLGNRLALSSRYILMKYLLLS

SEQ ID NO: 9645 - protein, 250 aa, Bacillus anthracis str. A2012
MFLNTNEILDYSALKYMPNLKSLTVANAKIKDPSFFANLKQLNHLALRGNEFSDVTPLVKMDHLDSLDLSNNKITNVAPLIEMKNVKSLYLSGNQIEDVTALAKMEQLDYLNLANNKITNVAPLSALKNVTYLTLAGNQIEDIKPLYSLPLTDLVLTRNKVKDLSGIEQMKQLEELWIGKNEIKDVTPLSKMTQLKQLHLPNNELKDITPLSSLVNLQKLDLEANYISDLTPASNLKKVVFLSFGANENR

SEQ ID NO: 9646 - protein, 466 aa, Leuconostoc mesenteroides subsp. mesenteroides ATCC 8293
MSLLARAFKRESVDNYLSADSHMSRVLTTRDLISLGVGTVIGTGIFILPGHEAADHAGPAVAIAFLIAAIFSGLSGMAFAEFSAAMPVAGSAYSYGGAIYGEIIGWLLGWSLIVEYFLAVSAIATGFSAYLGNLLAIFGIHIPKYLSAGPMEGGIVNLFAVLIILFVAAILSRGLNTSKKVENGAVVIKIAILILFIVGGSFFIKTSNYVPFYPKEFHSGLGGLNGIWAATASIIFAFLGFDTIAAHAAEVKNPQKTMAKGIVGTVIISALLYTLFSIVLTGIVNYKKLGVDDPAAFALQVVHQTQFSIVITIGALIGMFTAVLALIYASSRLTYSFGRDGLLPRSLGKISPGSHLPVNALILAVAVEVIFAGLIPLSTLASLINAGTLTAFAFINFGILILRRRKDLAHDGFKVPGYPIVPFIAGMISLFFITQLSAETLKMFGLWLLLGVIWYFSYGIKHSKLS

SEQ ID NO: 9647 - protein, 338 aa, Bacillus cereus ATCC 14579
MAILVTGGAGYIGSHTCVELLNSGYEVIVVDNLSNSSVESINRVKEITGKQFKFYKEDVLNREALDAIFEENAIEAVIHFAGFKAVGESVAIPLTYYHNNITSTLVLCEVMQKHNVKKIIFSSSATVYGIPETSPITEEFPLSATNPYGQTKLMIEQIMRDVAFADAEWSIALLRYFNPFGAHESGRIGEDPNGIPNNLMPYVTQVAVGKLKELSVFGNDYPTKDGTGVRDYIHVVDLANGHVKALEKVLSRTGVDAYNLGTGMGYSVLEMVEAFEKVSGKKVPYKITERRPGDVAVCFADASKAKRELGWEATRGLEEMCADSWKWQSNNKNGYLKV

SEQ ID NO: 9648 - protein, 234 aa, Triticum aestivum
  unsure (1)..(234): unsure at all Xaa locations
MASTPPQADYGKEAVLDVSENQDVETGEVKNGGLQRDLKNRHMQMIAIGGAIGAGLFVGSGGALQKGGPAALLIGYLIIGIMLLCTCLALAEMAVLYPVNGAFFTYICRFVDPSWGFAMGWQYALAWLTVLPFELIAASITIKFWREDINMAVWVSVFLVTLIGIQFFGVRGYGEVEFVLSIIKICAWCGFIILGIVINCGXGVGDQGYIGVKYWQDPGAFTSFKGFCAVFVVA

SEQ ID NO: 9649 - protein, 341 aa, Lactoris fernandeziana
DLEPVNPSDVPVTAAGALKSYKLAAKAISRLQSLPSGNIPLLCDVLVREVSDLTGYDRVMAYKFHEDEHGEVIAECKRSDLEPYLGLHYPATDIPQASRFLFTKNKVRMICDCSARPVKVIQDKRLAQPLSLGGSTLRAPHGCHAQYMLNMGSVASLVMSVTISEDDDDSASEQKGRKLWGLVVCHHTTPRFIPFPLRYACEFLIQVFGIQLNKEVELAAQVREKHILRTQTVLCDMLLRNAPVGIMTKSPNVMDLVNCDGAALYYRNRCWFLGTTPTESQIRDLAEWLLQYHNSTTGLSTDSLVEAGYPCAHGFGEAVCGMAAVKITSRDFLFWFRSHTA

SEQ ID NO: 9650 - protein, 263 aa, Zea mays
MLELRLVQGSLLKKVLEAIRELVNDANFDCSGTGFSLQAMDSSHVALVALLLRAEGFEHYRCDRNLSMGMNLNNMAKMLRCAGNDDIITIKADDGSDTVTFMFESPKQDKIADFEMKLMDIDSEHLGIPDSEYQAIVRMPSSEFMRICKDLSSIGDTVVISVTKEGVKFSTSGEIGSANIVCRQNQTIDKPEEATIIEMQEPVSLTFALRYMNSFTKASSLSEQVTISLSSELPVVVEYKIAEMGYIRFYLAPKIDDDEEMKP

SEQ ID NO: 9651 - protein, 344 aa, Bradyrhizobium japonicum USDA 110
MEYRSLGASGLKVPVLSFGTGTFGGQGPLFSAWGRSGTEEARRLVDICLDAGVNLFDSADVYSNGASEEILGAAIKGRRDKVLISTKMSLPMGDGPLDAGSSRQRLLTAVDAALQRLGTDTIDLLQLHAFDAFTPIEEVLSTLDTLVRAGKLRYVGVSNFAGWQLMKSLAIADRHGWPRYVAHQVYYSLLGRDYEWELMPLARDQGVGALVWSPLGWGRLTGKIRRGQPLPQQSRLHATAQFGPPVDEQRLYAIVDVLDAIAAETGRTVPQVAIAWLLSRPTVSSVIIGSRDEAQLRDNLGAVGWSLGADQIKRLDEACAVMPPYPYYPYRIQEGFARLNPPLV

SEQ ID NO: 9652 - protein, 442 aa, Sinorhizobium meliloti
MSNRLNTTPNDLSAFWMPFTANRQFKKEPRLFVGAKDMYYTTHDGRTVLDGTAGLWCVNAGHCRPKITEAIREQAGELDYAPAFQLGHPKAFELANRLVDIAPEGMNHVLYTNSGSESVDTALKVALAYHRAKGNGSRFRLIGRERGYHGVNFGGISVGGIVANRKMFGTLLTGVDHLPHTHLPAKNAFSRGEPEHGADLAAELERIVTLHDASTVAAVIVEPVAGSTGVLIPPKGYLQKLREICTKHGILLIFDEVITGYGRLGTPFAAQYFDVKPDIITTAKGLTNGVIPMGAVFVTSEIHDAFMTGPEHLIEFFHGYTYSGNPIASAAALGTLDTYREEGLLTRAAELAPYWEEALHSLKDCPHVIDIRNIGLIGAVELEPIAGEPTKRAFSAFLKAYEKGLLIRTTGDIIALSPPLIIEKRQIDELFDKLRDVLKNNI

SEQ ID NO: 9653 - protein, 236 aa, Guillardia theta
MLIKFYDDDHDLWSDMSIRTKFKINKNIKVDKTGTTIIGICIKNHIVLAADTRSTRGKITNDSSCKKIHFIGNNIGICGAGTSADIQNIINYLKININFLNLEKLKETNLEECTKIIQNFLFNYKGMISAALIIGGFDYYGLNLYSIYPDGSMDKNFFISMGSGSFAAMTILEKNYNEIMSLESAINISKQAILAGVYNDLGSGGSVDLYVISKSKNLMYRGISLTLKSNNYLARS

SEQ ID NO: 9654 - protein, 283 aa, Microtetraspora sp. ATCC 39727
MSQTPPPQNQPYPGHTGEMAPEPRDEMRDYVGRALLDGKKALITGGDSGIGRAVAVAFAKEGADVAIAYLTEHEDAAHTRKLVEQAGRRCVLLPGDLADRAHCSSVVEQAVSELGGLDVLVNNVAYQAPVSGLEELDDEQWEHTFAVNIHSYYRVTKAALAHLREGAAIVNTSSINGLRGNKSLIDYAATKGAINAFTYSMAQNLVERGIRVNAVAPGPVWTPLIPATMPEEKVEKFGKQVPMGRAADPDEIAPSYVFFASNRLSSYYTGEVLAPIGGRDAAG

SEQ ID NO: 9655 - protein, 736 aa, Agrobacterium tumefaciens str. C58 (U. Washington)
MSSHTPKLDSCGAEPIHIPGAIQEHGALLVLSAREFSVVQASDNLANYIGVDLPIGAVATEANLPFISVLSAWYSGEESNFRYAWAEKKLDVSAHRSGTLVILEVEKAGVGESAEKLMGELTSLAKYLNSAPSLEDALFRTAQLVSSISGHDRTLIYDFGLDWSGHVVAEAGSGALPSYLGLRFPAGDIPPQARQLYTINRLRMIPDVDYKPVPIRPEVNAETGAVLDMSFSQLRSVSPVHLEYMRNMGTAASMSVSIVVNGALWGLIACHHATPHSVSLAVREACDFAAQLLSMRIAMEQSSQDASRRVELGHIQARLLKGMAAAEKWVDGLLGGEGEREDLLKQVGADGAALVLGDDYELVGNTPSREQVEELILWLGEREIADVFATDNLAGNYPTAAAYASVASGIIAMRVSELHGSWLIWFRPEVIKTVRWGGDPHKTVQESGRIHPRKSFEIWKEQLRNTSFPWSEPELAAARELRGAIIGIVLRKTEEMADLTRELQRTNKELEAFSYSVSHDLRAPFRHIVGFAQLLRERSDALDEKSLHYLQMISEAALGAGRLVDDLLNFSQLGRTQLTLKPVDMQKVVSEVRRSLSHAVSDRQIEWRIGALPVIFGDPTLLRQVWYNLIENAIKYSSREPVSIITISAVETEDDVTYSVEDNGVGFDMAYYNKLFGVFQRLQRVEDFEGTGIGLALVRRIVERHHGLVGAEGTVGEGATFSFTLPVTKVEEEKIA

SEQ ID NO: 9656 - protein, 156 aa, Salmonella typhimurium
NTLTVKMNDALSSGTGENIGEITVSETPYGLLFTPHLNGLTPGIHGFHVHTNPSCMPGMKDGKEVPALMAGGHLDPEKTGKHLGPYNDKGHLGDLPGLVVNADGTATYPLLAPRLKSLSELKGHSLMIHKGGDNYSDKPAPLGGGGARFACGVIEK

SEQ ID NO: 9657 - protein, 356 aa, Ferroplasma acidarmanus
MVDIAVIPGDGIGKEIIPQVCDLVTSIDPSVNFTFYNISSERYINKGITIKDSEIDELKSYNSIFFGAIGDFRVKPGIMEQGVILRLRKELDLYMNIRPAISFSRITGNNIHMTILRENKEDFYSDISGSLNEHKLFRQKGNFYNYNIDINSESDDTIYYTMGFLSRKNLKRFFNMAYKIADTETVTITDKANAVDMYSLWREIAIEESEPAGKKINFEYADSLAYNMINNPLKYRYIIAPNLYGDILSDMSSAMVGGLGYAPSGNIGDYSSMFEPVHGSAPDIAGKNIANPVASILSCIMMLKHLNQTETAGIMEKSVENVIRNGTIPIESGGNAGTHEFINKVKNYCTMTKNNI

SEQ ID NO: 9658 - protein, 392 aa, Sphedamnocarpus sp. Davis 3-01
DLEPVNPADVPVTAAGALKSYKLAAKAISRLQSLPSGNISVLCDVLVKEVRDLTGYDRVMVYKFHEDEHGEVVSECRRSDLESYLGLHYPATDIPQASRFLFIKNKVRMICDCLAPPVKVIQDERLPQPLSLCGSTLRSPHGCHSQYMTNMGTIASLVMPVTINEDDDTMDGDQQQMTRKLWGLVVCHHTSPRFVPFPLRYACEFLIQVFGVQINKEVELAAQVREKHILQIQTMLCDMLLRDAPVAIITQSPNEMDLAKSDGTDLYYKNKTWLLGVTPTEEQIRDIAEWLLQYHSGNTGLSTDSLMEAGYPGASALGDSVCGMAAVSITSRDFLFWFRSHTAKEIKWGGAKHDPDDKDDLRKMHPRSSFKAFLEVVKWRSMPWEDVEMDAI

SEQ ID NO: 9659 - protein, 348 aa, Staphylococcus aureus subsp. aureus Mu50
MTYNIVALPGDGIGPEILNGSLSLLEIISNKYNFNYQIEHHEFGGASIDTFGEPLTEKTLNACKRADAILLGAIGGPKWTDPNNRPEQGLLKLRKSLNLFANIRPTTVVKGASSLSPLKEERVEGTDLVIVRELTSGIYFGEPRHFNNHEALDSLTYTREEIERIVHVAFKLAASRRGKLTSVDKENVLASSKLWRKVVNEVSQLYPEVTVNHLLVDACSMHLITNPKQFDVIVCENLFGDILSDEASVIPGSLGLSPSASFSNDGPRLYEPIHGSAPDIAGKNVANPFGMILSLAMCLRESLNQPDAADELEQHIYNMIEHGQTTADLGGKLNTTDIFEILSQKLNH

SEQ ID NO: 9660 - protein, 262 aa, Zea mays
MAAASLARLSRRATTSTSVAAPAFRRLLSATSTAPAAASAPPPPPSAAAAAAVGADRVRWDYRGQRQLVPLGQWMPKVAVDAYVAPEAVLAGQVTVHDGASVWSGAVLRGDLNKITLGFCANVQERCVLHAAWAAPTGLPAETLVDRYVTVGAYCLLRSCSIEPECIIGQHSILMEGSLVETNSILEAGSVLPPGRRIPTGELWAGSPARFVRKLTNEEIMDIPKLATAINDLMQSHFSEFLPYSNAYLEVEKLKKSFSIPL

SEQ ID NO: 9661 - protein, 199 aa, Triticum aestivum
  unsure (1)..(199): unsure at all Xaa locations
MAGTVTVPGSSTPSTPLLKDELDIVIPTIRNLDFLEMWRPFFQPYHLIIVQDGDPTKTIKVPEGFDYELYNRNDINRILGPKASCISFKDSACRCFGYMVSKKKYIYTIDDDCFVAKDPSGKDINALEQHIKNLLSPSTPFFFNTLYDPYREGADFVRGYPXSLKEGAHTAVSHGLLLNIPDYDAPTQLVKPKERMRVC

SEQ ID NO: 9662 - protein, 361 aa, Lycopersicon esculentum
RLFLLSFLAFALFSSAIAFSDDDPLIRQVVSGNDDNHMLNAEHHFSLFKAKFGKIYASQEEHDHRLKVFKANLHRAKRHQLLDPSAEHGITQFSDLTPSEFRRTYLGLNKPRPNLNAEKAPILPTKDLPSDFDWREKGAVTDVKNQGSCGSCWSFSTTGAVEGAHFLATGELVSLSEQQLVDCDHECDPVEKNDCDAGCNGGLMTTAFEYTLKAGGLQLEKDYPYTGRNGKCHFDKSRIAASVSNFSVVGLDEDQIAANLLKHGPLAVGINAAWMQTYVRGVSCPLICFKRQDHGVLLVGYGSEGFAPIRLKNKPYWIIKNSWGKTWGEHGYYKICRGHHICGVDAMVSTVTATHTTNPNL

SEQ ID NO: 9663 - protein, 343 aa, Acidithiobacillus ferrooxidans
  unsure (1)..(343): unsure at all Xaa locations
MAEMMYWQGILRAHDEEMARDPLVFAMGEDIGVAGGTYKATSGLFAKYGEQRVIDTPISENSYTGIGVGAAMIGARPIVEIMSVNFAWLAMDQLMNNAAKIHYMSGGRIRCPFVMRVPGGTAHQLGAQHSARMEKVFMGISGLRVVTPATPRDAYGLLKSAVXLNDPVVIIEHESMYNLKGEIPDEEFFTPLEGVEVMRPGKDVSIFAYNISVHWALDAAQKLAQDYGIDAEVVDLRALKPMDRAGIAASVRKTHRAVVVEEDEAPVGVGSEVMAILNEECFFDLDAAPVRVHALDVPIPYKSRLEKAAIPNAGEVVALCGRCWAGKIPAIRPLLNLGLTQQW

SEQ ID NO: 9664 - protein, 430 aa, Shigella flexneri 2a str. 301
MMNTEGNNGNKPLGLWNVVSIGIGAMVGAGIFALLGQAALLMEASTWGAFAFGGIVAMFSGYAYARLGASYPSNGGIIDFFRRGLGNGVFSLALSLLYLLTLAVSIAMVARAFGAYAVQFLHEGSQEEHLILLYALGIIAVMTLFNSLSNHAVGRLEVILVGIKMMILLLLIIAGVWSLQPAHISVSAPPSSGAFFSCIGITFLAYAGFGMMANAADKVKDPQVIMPRAFLVAIGVTTLLYISLALVLLSDVSALELEKYADTAVAQAASPLLGHVGYVIVVIGALLATASGINANLFAVFNIMDNMGSERELPKLMNKSLWRQSTWGNIIVVVLIMLMTAALNLDSLASVASATFLICYLAVFVVAIRLRHDIHASLPILIVGTLVMLLVIVGFIYSLWSQGSRALIWIIGAILLSLIVAMVMKRNKTV

SEQ ID NO: 9665 - protein, 458 aa, Listeria monocytogenes EGD-e
MEEQKEELQRGLKNRHIQLIAIGGAIGTGLFLGAGKSIHLAGPSIMLVYLIIGAILFFVMRALGELLIHNPTTGSFTEFAEQFIGPWAGFITGWTYWFCWIVTGIAEITAVGMYVKFWVPDLPQWIPALACVLILLLFNLATVKAFGEIEFWFAIIKVVVIIALIVIGFVLVFIGYKHGTSTASFSNLVDYGGFFPNGIAGFLLAFQMATFSFVGIELVGVTAGEADDPERTLPKAINNIPIRILIFYIGALLVLMSIYPWSNIDPNTSPFVSVFTMIGIPAAAGIINFVVLTAAMSSCNSGIFSTSRMLYTLSAEGKAPKKMHHLSSNGVPATALITSTACLLIGVFLNYFLPEQVFILVTSIATICFIWVWGVILVAHLRFRHKHPEISEKSKFKMPLSPLMNWVSLIFFGGLLVILGFAADTRIALFVTPVWFLILGIAYQILKASNRKTKIRHN

SEQ ID NO: 9666 - protein, 309 aa, Leuconostoc mesenteroides subsp. mesenteroides ATCC 8293
MMYKLAILKGDKESSSVIDRALGIIKSSVNDSTAFEVTELPFGVNGVLSFNEPLPNQTLRELKNYDGILVGALNQEVGTDSLLSVQESLVALRKYLNITLACKAVQISDNNVDASPLKNQIVRDTDFIIVQSAKRANDHVDGNISVDDFAQDTITYEQREVEQVITAGFERAMNRKRAVTVVTPFDSFYTSKIWALTAEKIAKIYPDVVVNYVSLSCVISTIIQQPTSLDVVVAPKWVDQVLNEESQKITGLPETVPVSMKNNSGQMLYQLPQINVDDKNLMMAVGEDTAKLILKECFKHYDNLQKIGV

SEQ ID NO: 9667 - protein, 118 aa, Zea mays
  unsure (1)..(118): unsure at all Xaa locations
HSPGDWYCSCGAHYFASRSSCFMSSAXVGGGRCRTGALMAFDERHVPVTGATXFRSNAAGGAADAARTTNRPGCRTGDWICTXPDACEHNFTXSMECFASNSPRYSGMAAMIYENYLH

SEQ ID NO: 9668 - protein, 392 aa, Lophanthera lactescens
DLEPVNPADVPVTAAGALKSYKLAARAISRLQSLPSGNISLPSDVLVKEVRDLTGYDRVMVYKFHEDEHGEVVSECCRPDLEAYLGLHYPATDIPQASRFLFMKNKVRMICDCLAPPVKVIQDERLPQPLSLCGSTLRSPHGCHAQYMANMGSIASLVMSVTVNEDDDMVDGDQQQMARKLWGLVVCHHTSPRFVPFPLRYACEFLIQVFGVQINKKVELAAQVREKHILRTQTLLCDMLLRDAPVAIVIQSPNVMDLVKCDGAALYYRKKFWLLGVTPTEAQIRDIAEWLLEYHSGNTGLSTDSLMEAGYPGTSVLGNAVCGMAAVKITSRDFLFWFRSHTAKEIKWGGAKHDPGDKDDIRKMHPRSSFKAFLEVVKWRSLPWEDIEMDAI

SEQ ID NO: 9669 - protein, 461 aa, Escherichia coli O157:H7 EDL933
MAINSPLNIAAQPGKTRLRKSLKLWQVVMMGLAYLTPMTVFDTFGIVSGISDGHVPASYLLALAGVLFTAISYGKLVRQFPEAGSAYTYAQKSINPHVGFMVGWSSLLDYLFLPMINVLLAKIYLSALFPEVPPWVWVVTFVAILTAANLKSVNLVANFNTLFVLVQISIMVVFIFLVVQGLHKGEGVGTVWSLQPFISENAHLIPIITGATIVCFSFLGFDAVTTLSEETPDAARVIPKAIFLTAVYGGVIFIAASFFMQLFFPDISRFKDPDAALPEIALYVGGKLFQSIFLCTTFVNTLASGLASHASVSRLLYVMGRDNVFPERVFGYVHPKWRTPALNVIMVGIVAMSALFFDLVTATALINFGALVAFTFVNLSVFNHFWRRKGMNKSWKDHFHYLLMPLVGALTVGVLWVNLESTSLTLGLVWASLGGAYLWYLIRRYRKVPLYEGDRTPVSET

SEQ ID NO: 9670 - protein, 262 aa, Hordeum vulgare subsp. spontaneum
SAESNMCDLLRINTDRGVMIGDGKSRFSIGGKPIYHFVGTSTFSEYTVMHVGCVAKINPEAPLDKVCVLSCGISTGLGASINVAKPPKGSTVAIFGLGAVGLAAAEGARIAGASRIIGVDLNASRFEEARKFGCTEFVNPKDHTKPVQQVLADMTNGGVDRSVECTGNVNAMIQAFECVHDGWGVAVLVGVPHKDAEFKTHPMNFLNERTLKGTFFGNFKPRTDLPNVVEMYMKKELEVEKFITHSVPFSEINKASDLMAKG

SEQ ID NO: 9671 - protein, 215 aa, Solanum tuberosum
MKDKEVKTRMKRGFWKPEEDLILKNCVETHGEGNWATISEKSGLMRSGKSCRLRWKNYLRPNIKRGMMSEDEKDLIIRLHKLLGNRWSLIAGRLPGRTDNEVKNFWNTHLNNKRSCRGKKKHVKSKEANTQSTQGKMQEYPAETVSNQEVATKTVLDSWIEEMQDFNCSLLSPLTMNNMPFLEDEPFIPILDDIVLLEAFTSTGKEAWNEIQPFL

SEQ ID NO: 9672 - protein, 244 aa, Sulfolobus solfataricus
MKVVYDDVRVLKDIIQALARLVDEAVLKFKQDSVELVALDRAHISLISVNLPREMFKEYDVNDEFKFGFNTQYLMKILKVAKRKEAIEIASESPDSVIINIIGSTNREFNVRNLEVSEQEIPEINLQFDISATISSDGFKSAISEVSTVTDNVVVEGHEDRILIKAEGESEVEVEFSKDTGGLQDLEFSKESKNSYSAEYLDDVLSLTKLSDYVKISFGNQKPLQLFFNMEGGGKVTYLLAPKV

SEQ ID NO: 9673 - protein, 267 aa, Prochlorococcus marinus subsp. marinus str. CCMP1375
MNQLKIFNVFSKFGYMFVNDVLVDWLTAFSLNFLLIAFAQRYPLLTRIGWVHAGILGTILWGCLGWTGWMTVVIYLVLGSLVTKIGYSYKKARGIAEGRDGRRGPENVWGSAATGAILALLFKLFSSFSQYQYIILIAFASSFSSKLADTFGSEIGKRWGRKTFLITSLKPVKAGTDGAISFEGTVASLVGSFVMTLVMYVFSFVNSFSAFLIVLLSGFVATIAESLFGAIYQDKFKWLTNEVVNFLQTSFASILSIWLALIFLTTS

SEQ ID NO: 9674 - protein, 158 aa, Azotobacter vinelandii
MRDPLFGIPLDDQPRTLADFPGRAWLVVNTASRCGFTPQYEGLQMLWQRYRERGLVVLGFPCDQFGHQEPGNELEIAEFCQLRYGVDFPLFQKVEVNGPRAHPLFVELKKRAPGLLGSQRVKWNFTKFLIGREGRVVRRFAPATGPRELCGEIEALLE

SEQ ID NO: 9675 - protein, 181 aa, Triticum aestivum
MGSEQNDSTSFTQSSEPKLCANGCGFFGSPSNMDLCSKCYRDICAEEAQTAVAKAAVEKSFKPSPSPPPPTLFIAEPDVAKPEKEKAVATVLVVAEPSSATGEATVPEQNEPPSKPARPNRCLCCNKKVGILGFKCKCGSTFCGEHRYPERHDCSFDFKEAGRGEIAKANPVIKADKLQRF

SEQ ID NO: 9676 - protein, 245 aa, Methanosarcina acetivorans C2A
MFKAAINAELLKDAIAALAVIVDEVRFKIKPEGISVKAVDPANVAMGIFELGSSAFDEYSADECEIGLDLNKITDLLGIADRNDTVRMGLEEGSNKLLIDVGGLSYTLSLLDPSTIRAEPRVPQLELPAKVVLNGADLRRAVKAAEKISDHMLMGVSGDTFYMEAKGDTDQVRLEMGRDQLIDLKAGEACSLFSLDYLTDIVKPTNKVNEVTLSLGRDFPILIDFEIANGAGRISYLLAPRIESD

SEQ ID NO: 9677 - protein, 198 aa, Mesorhizobium loti
MFALPFFRRDLPALKGNLVTLRVPYTNDYREWSTLRGESRAFLEPWEPRWTPDELDRTAWRLRISRYREDYAQGTAIAFFIFEKSSGKLAGGITLGNIRHGVSQSGHVGYWIGERFGGRGLMTDAVKVVARFAFDTLRLHRIEAACIPDNIRSIRVLEKAGFRREGLLRSYLRINGIWQDHYLYARIADDPLDAGTKD

SEQ ID NO: 9678 - protein, 347 aa, Escherichia coli CFT073
MKNSKAILQVPGTMKIISAEIPVPKEDEVLIKVEYVGICGSDVHGFESGPFIPPKDPNQEIGLGHECAGTVVAVGSRVRKFKPGDRVNIEPGVPCGHCRYCLEGKYNICPDVDFMATQPNYRGALTHYLCHPESFTYKLPDNMDTMEGALVEPAAVGMHAAMLADVKPGKKIIILGAGCIGLMTLQACKCLGATEIAVVDVLEKRLTMAEQLGATVVINGAKEDTIARCQQFTEDMGADIVFETAGSAVTVKQAPYLVMRGGKIMIVGTVPGDSAINFLKINREVTIQTVFRYANRYPVTIEAISSGRFDVKSMVTHIYDYRDVQQAFEESVNNKRDIIKGVIKISD

SEQ ID NO: 9679 - protein, 242 aa, Glycine max
  unsure (1)..(242): unsure at all Xaa locations
MSFLEEFQANLDSLPVILQKKYAXLRDLDKSLHDIQRQNEQRCEQEIEDIRRGVRSGXIRXDTSVIRFSDEALDEQNHSIRVADEKVALAVQAYDLVDTHIQHLDQYLKRFGEEIRRERENAAITGVPASGSEGGTKSGGGNESGTGRGGRKKTRQTTVTPAATEAQATANPTGMDLELPVDPNEPTYCFCNQVSYGAMVACDNPNCKIEWFHFGCVGLKEQPKGKWYCSNCAATKNRRRGK

SEQ ID NO: 9680 - protein, 225 aa, Zea mays
  unsure (1)..(225): unsure at all Xaa locations
MAEEKKQGLQLLDFWVSPFGQRCRIALDEKGLAYEYLEQDLGKKSELLLRANPVHKKIPVLLHDGRPVCESLVIVQYLDEAFPAAAPALLPADPYARAQARFWADYVDKKLYDCGTRLWKLKGDGQAQARAEMVEILXRTLEGALGDGPFFGGDALGFVDVALVPFTSWFLAYDRFGGVSVEKECPRLAAWAKRCAERPSVAKNLYPPEKVYDFVCGMKKRLGIE

SEQ ID NO: 9681 - protein, 614 aa, Lycopersicon esculentum
MMMFEDIGFCADLDFFPAPLKEAETVAAVPPIVPEPMMDDDDSDEEIDVDELEKRMWRDKMKLKRLKEMSKGKEGVDAVKQRQSQEQARRKKMSRAQDGILKYMLKMMEVCKAQGFVYGIIPEKGKPVTGASDNLREWWKDKVRFDRNGPAAIAKYQADNAIPGKNEGANPIGPTPHTLQELQDTTLGSLLSALMQHCDPPQRRFPLEKGVSPPWWPNGQEDWWPQLGLPNDQGPPPYKKPHDLKKAWKVGVLTAVIKHISPDIAKIRKLVRQSKCLQDKMTAKESATWLAIINQEEVLARELYPDRCPPLSSGGSSGTFTMNDSSEYDVEGAIDDPIFDVQEQKPNHLSLLNVNVEMFKEKLPLLQQSQPMKGDIFANLDFTRKRKPADDLTFLMDPKTYTCECLHCPHSELRNGFPDRSSRDNHQLTCLFRNTSQFVVPNFHMEEVKPVVFPQQYAEPKRASLPVNPAPPSFDTSGLGVPADGQRVINELMSFYESNVQGNKSSMAGNSVMSKEQPLQQPSIQQNNYLQSQGNVLEGSIFGDTNISANNSMFVQGDRFDQSKVLTSPFNASSTDDFNFMFGSPFNMQSTDLSECLSGISHDDVTKQDASVWY

SEQ ID NO: 9682 - protein, 336 aa, Lycopersicon esculentum
MSHHYQEQEQLEAQKIPFLLDSLYCEENNILTEVSIETESFSSHDLLWEEEELTSLFSKETEYEISYNVLEKNQSFISSRRESVEWILKTTAYYSFSAQTGFLAVNYFDRFLLFSFNQSLNHKPWMNQLVAVTCLSLAAKVEETDVPLLLDLQVEESGFLFESKTIQRMEMLILSTLKWKMNPVTPFSFLDFITRRLGLKHCLSLEFLRRCEKVLLYTITDDRFIGYLPSAMASATMLHVLDRLKPCIGEKYQDQLLGILGIVKEKVEGCYRLIQEVACNIDFGSNKRKFGTLPGSPTGVMDMSFSSDYSNDSWSVATSVTSSPEPLSKKIRESNE

SEQ ID NO: 9683 - protein, 452 aa, Staphylococcus epidermidis ATCC 12228
MAENLQRELSNRHVQLIAIGGAIGTGLFLGAGQTIAMTGPSILLTYIIIGFMLFMFMRGLGEIIIQNTNFKSFADVTNTYIGPFAGFVTGWTYWLCWIITGMAEVTAVAKYISFWFPDIPNWISALFCVLILMSFNLLSAKLFGELEFWFAIIKIVTIIALIVIGVIMILFAFKTPFGNTSLTHLYQHGIFPKGASGFFMSFQMALFSFVGIEMIGVTAGETKDPEKTIPKAINSVPIRILIFYVGALAVIMSIIPWDKVDPDNSPFVRLFALIGIPFAAGIINFVVLTAAASSCNSGIFSNSRMLYGLSNQNQAPPTFASTNKHGVPHKAIIASSALLLIAALLNYIFPDATLVFTYVTTISTVLFVVVWALIIIAYINYSRKNPELHKKATYKLPGGQYMGYLILIFFVFVFALLFINVDTRRAIYCTPIWFILLGLMYLRYKKADKESR

SEQ ID NO: 9684 - protein, 307 aa, Ralstonia solanacearum
MATGLYTHPEFLKHEMGHHHPECPDRLRAIEDQLIASRIEQFLVPCEAPPATEAQLCRVHRPEYVRELVASVPIAGYAPIDPDTAMNPHTYMAAVLAAGAAVQATDKVIAGALENAFCCVRPPGHHAEPGRAMGFCFFNNVAVAARHALDHHGLARVAIVDFDVHHGNGTEAAFRDEPRVLMCSFFQHPFYPYSGTEGVAANMVNIPLPAYTNGLTVREVVETIWLPRLDAFRPEMLFISAGFDAHREDDLGQMGLVEADYAWITRQLMQVARAHAKGRIVSCLEGGYNLSALGRSVVAHVKALAEL

SEQ ID NO: 9685 - protein, 371 aa, Agrobacterium tumefaciens str. C58 (Cereon)
MDGTPISPTARAKASSSDCNRGILLKTHRIALIPGDGIGQSVTDAAWQVLNAVAKTSGFVLEGTEFPWSCAFYKETGAMMPKDGIETLRGFDAIMLGAVGWPAEVPDSVSLHGLLLPIRKAFVQYANIRPHRLLSGVQGPLKADGFDILCIRENTEGEYSGAGGRVHQGTEDEVAVETSIFTRKGVERILRFGFEQAQKRRGKLASITKSNAQKYSMVFWDEVTHKLAAEYPDVEVSSYHIDAMAARMVMAPESLDVVVASNLFGDILTDLGAAIQGGLGFAASANINPDRSAPSMFEPVHGSAPDIAHLGIANPIAAIWSGAMMFEHLGEKDAAAKIMAALETATGRGIGTVPGKDKTDTITAAVLAALA

SEQ ID NO: 9686 - protein, 284 aa, Oryza sativa
  unsure (1)..(284): unsure at all Xaa locations
PAGEGSIKAGLVVLLSSPSSCLNRKPKXVVAAAAAAAIXWVMGRARRSXPAAASTAAWPSSSSSSPSSRPSPLSPPYXYAAWILSRWARHHHLHLQDLLPDLWFVCALMAAGLFYCLLLLAGCVAAEINSPCFLCFYTILAVVMMLLEAALAADLFFNKHWIQDLPYDRTGELDNLLSFIQTNLDLCKWAALAIVATQALSLLLATILRSMLSTPSADYDSDEDFVVIRSHFWLPKVLPLIXPTTADTRGFHPDLWSSRMRHKYGLNSSNYTYNTLDPNAPPPQ

SEQ ID NO: 9687 - protein, 392 aa, Lophopterys floribunda
DLEPVNPADVPVTAAGALKSYKLAAKAISRLQSLPSGNISLLCDVLVKEVRDLTGYDRVMVYKFHEDEHGEVVSECRKSDLESYLGLHYPATDIPQASRFLFIKNKVRMICDCLAPPVKVIQDERLPQPLSLCGSTLRSPHGCHAQYMTNMGTIASLVMSVTINEDDDTMDGDQQQTTRKLWGLVVCHHTNPRFVPFPLRYACEFLIQVFGVQINKEVELAAQVREKHILQIQTMLCDMLLRDAPVAIITQSPNVMDLVKCDGAALYFKNKIWLLGVTPTEEQIRDIAEWLLEYHSGNTGLSTDSLMEAGYPGASVLGDAVCGMAAVSITSRDFLFWFRSHTAKEIKWGGAKHDPDDKDDGRKMHPRSSFKAFLEVVKWRSMPWEDVEMDAI

SEQ ID NO: 9688 - protein, 303 aa, Schizosaccharomyces pombe
MSFKEVSTENGVLTPLITIKEKAYMIIEGLNEEEIELLNTRLPKLSKKALARNRYSNIVPYENTRVRLDPMWKEACDYINASIVKIPSGKTFIATQGPTSNSIDVFWKMVWQSVPKSGIIVMLTKLRERHRLKCDIYWPVELFETLNIGDLSVILVKVYTLTSLNEVQVREFELNKDGVKKKILHFYYNGWPDFGAPHTFSLLSLTRYIKSLSYSPDFETAPIIVHCSAGCGRTGTFMALFEILSQTDDSTSTSKFEVDNIANIVSSLRSQRMQSVQSVDQLVFLYTVSQELLQGKEFLLPQL

SEQ ID NO: 9689 - protein, 368 aa, Zea mays
  unsure (1)..(368): unsure at all Xaa locations
MEALWKQASRLKDQVSRQGVFKQFGYGNSDNAFTDESEVKLHQRLEKLYLSTRAAKHFQRDIVRGVEGYIVTGSKQVEIGNKLSDDSQKYGVGNTCTSGDTLSKAATYFGKARSQMEKERGNMLKAFGTQVAEPLRAMVMGAPLEDARHMAQRYDRTRQEAEAQAVEVSRRQNRVRESTGNGDMVSKLEAAEYKLEELKSNMVGLGKEAIAAMSAVEAQQQRLTLQRLIALVEAERTYHQRVLEILDKLEEEMVSERQKIEAPPTPAAXNYIPPPAPPSYDEINGAFASTSVNESVQSVDFFLGEALDSFNAESEFELTLSAGDIVIVRKISSNGWAEGECKGKAGWFPHAYIERQERVLASKVPHIF

SEQ ID NO: 9690 - protein, 364 aa, Raphanus raphanistrum subsp. raphanistrum
SSNKTLVSPGGVFEFGFFKLASSSCWYLGIWYKNIPERSYVWVANRDNPLHSSTGTLRISGTNLVLLDQSKNTVWSTNLTRRCVKSPVVAELFDNGNFVMRYSNNSDPSGYLWQSFDFPTDTLLPQMKLGFDLKTGPHRFLRSWRSPDDPASGNYTYKLETRGLPEFFLRSEDFLLYRTGPWNGIRFNGVPEMPRLLDNILTENKEEITYTFRMTNHSIYSKFIITHSGFFQLLTWTPKVQLWNVLWSIPNDQCDLYVLCGPYGYCDTKTSMCNCIKGFKPKGSQAWALGDMSQGCVRKTSLSCGGDGFIRLTKMKLPDTTYAIVDKLVGIKECKKRCLKDCNCTAFANADIRKGGSGCVMWTG

SEQ ID NO: 9691 - protein, 378 aa, Pisum sativum
ATQGQVITCKAAVAWEPNKPLTIEDVEVAPPQANEVRIQILFTALCHTDAYTLGGKDPEGLFPCILGHEAAGIVESVGEGVTDVKPGDHVIPSYQAECGECKFCKSPKTNLCGKVRAATGVGVMMADRKSRFSVKGKPIYHFMGTSTFSQYTVVHDVSVAKIHPDAPLDKVCLLGCGVPTGLGAVWNTAKVEPGSIVAIFGLGTVGLAVAEGAKSAGASRIIGIDIDSNKYDTAKNFGVTEFINPKDHEKPIQQVIIDLTDGGVDYSFECLGNVSVMRSALECCHKGWGTSVIVGVAASGQEISTRPFQLVTGRVWKGTAFGGFKSRSQVPWLVEKYLKKEIKVDEYITHNLTLLEINKAFDLLHEGQCLRCVLAVHD

SEQ ID NO: 9692 - protein, 470 aa, Pseudomonas putida KT2440
MSCIPFQELAMHTTTSTAHSPAPHAPSQPGTSTGRFRKSMSMTALVLFGLAYMVPLAVFTTYGLVTQMTKGHLPTAYLLTLAAMLLTAYSYGRMVQAHPYSGSVYTYTRKAFGSHIGFITGWTLLLDYIFLPLLSYLLIGIYMSEYFPTIHAWVWVAGSIALVTFLNLIGIESITRVNWILVVVQLVFIIVFVALSILKLSGQAEPVSLLAPLHHDGFSVPLIMTGAAVLCLSFLGFDAVSTMAEETSNPTYRIPVAILAVSLIGGLLFLVVSYCAQMVFPDWGSFADPDSASVDVMRRVGGELLVTAFTATYVAGCFASAMVSQASVSRVLFAMGRDGALPRAFGQLVTKKRVPATAILVVSLLSLIALVITLDTVANMISFGALFAFSAVNLAVVKHYLVDQKLRGCRNCLLYGAIPGLGFLSTLWLWSSLTSLSFTIGLCWMGLGLLVLLGLTRALRVKLPELQMAE

SEQ ID NO: 9693 - protein, 85 aa, Buchnera aphidicola
YEPAGGSAPDIAGKNIANPIALILSIAMLVRYTMKLPTISDHIEYAVIDTLKKGYRTADIANDKEKYVSTNDIGDIISDILKKRI

SEQ ID NO: 9694 - protein, 728 aa, Pseudomonas aeruginosa PAO1
MTSITPVTLANCEDEPIHVPGAIQPHGALVTLRADGMVLAASENIQALLGFVASPGSYLTQEQVGPEVLRMLEEGLTGNGPWSNSVETRIGEHLFDVIGHSYKEVFYLEFEIRTADTLSITSFTLNAQRIIAQVQLHNDTASLLSNVTDELRRMTGYDRVMAYRFRHDDSGEVVAESRREDLESYLGQRYPASDIPAQARRLYIQNPIRLIADVAYTPMRVFPALNPETNESFDLSYSVLRSVSPIHCEYLTNMGVRASMSISIVVGGKLWGLFSCHHMSPKLIPYPVRMSFQIFSQVCSAIVERLEQGRIAELLRVSTERRLALARRARDADDLFGALAHPDDGIAALIPCDGALVMLGGRTLSIRGDFERQAGNVLQRLQRDPERDIYHTDNWPQPSEDSPDGGDCCGVLAIRFHRQESGWIFWFRHEEVHRIRWGGKPEKLLTIGPSGPRLTPRGSFEAWEEVVRGHSTPWSETDLAIAEKLRLDLMELCLNHAAEVDRMRQRLIAVLGHDLRNPLQSISMAAALLSSSDTRTTELRQHISASSSRMERLVSQILDMSRLQSGIGLTVNPVDTDVSQLVRQIVCETDVAYPGLVIEIAIDPQVRAVVDPDRYAQVAANLLSNARHHGLPGRPVLVTLTRQGDEVCLSVLNETSGLSEAQLANLFEPFKRESADNQRNRNGLGIGLYISQAIAQAHQGRIDVDCRDDVITFCLRLPVRQAETGSSS

SEQ ID NO: 9695 - protein, 31 aa, Glycine max
ALEDIPALFYDEDRNEIYTGNRHGLVHVWSN

SEQ ID NO: 9696 - protein, 361 aa, Oryza sativa
MERAAAGPLGMEMPIMHDGDRYELVKEIGSGNFGVARLMRNRASGDLVAVKYIDRGEKIDENVQREIINHRSLRHPNIIRFKEVILTPTHLAIVMEYASGGELFERICSAGRFSEDEARFFFQQLISGVSYCHSMQVCHRDLKLENTLLDGSTAPRLKICDFGYSKSSVLHSQPKSTVGTPAYIAPEVLLKKEYDGKIADVWSCGVTLYVMLVGAYPFEDPEDPKNFRKTIQKILGVQYSIPDYVHISPECADLITRVFVGNPASRITMPEIKNHPWFMKNIPADLMDDGMVSNQYEEPDQPMQNMNEIMQILAEATIPAAGTSGINQFLTDSLDLDDDMEDMDSDLDLDIESSGEIVYAM

SEQ ID NO: 9697 - protein, 122 aa, Glycine max
  unsure (1)..(122): unsure at all Xaa locations
MSRTGPIAQDWEPVVVRKKLPNAAAKKDEKAVNAARRAGVDIDIAKKHNAGTNKAAHTTTSLNTKRLDDDTENLAHERVPSDLKKSIMQARTDKKLTQAQLAQLINEKPQVIQEYESGXAIP

SEQ ID NO: 9698 - protein, 303 aa, Oryza sativa
  unsure (1)..(303): unsure at all Xaa locations
MAASSSSPPPPSSLPRWSAAARRSRRRPGPARTXFNPKSFNPSMAVVIVVLVTAFFFLGFFSIYIRRCAGGPXWVGPGGMASAAAAVDVRVRGLDPAVLGAFPTMAYADVKAHKAGKGALECAVCLSEFDDDETLRLLPRCSHAFHADCIDAWLASHVTCPVCRANLAFDAGVPPPPLAPPHALTTGQDVAAAPPQPAAPEQVTVDVVVADADVKRALRSKSGRRPPQFPRSHTTGHSLAAAAAVPATADDAAERYTLRLPDHVLREIVTSARLRRTTPPLXVPHHRRRRRRRPLSCKKKKKX

SEQ ID NO: 9699 - protein, 182 aa, Triticum aestivum
MAETEYRCFVGGLAWATDDHNLQQAFSQYGEILDAKIINDRETGRSRGFGFVTFGSEESMRQAIEEMNGKELDGRNITVNEAQSRRSGGGGGGGGYGGQRGGSGGYGGGGGGYGGQGGGGYGQGGGGGYGQGGGGGYGQGGGGYGGQRGGGGYGGGGGGYGGGGGGYGGQRGGGDSGGQWRN

SEQ ID NO: 9700 - protein, 423 aa, Streptomyces avermitilis MA-4680
MTITQPDLSVFETVESEVRSYCRGWPTVFDRAQGSRMYDEDGHAYLDFFAGAGSLNYGHNNPVLKRALIDYLERDGVTHGLDMSTAAKRAFLESFQNLILRPRDLPYKVMFPGPTGTNAVESALKLARKVKGREAIVSFTNAFHGMSLGSLAVTGNAFKRAGAGIPLVHGTPMPFDNYFDGKVPDFLWFERLLEDQGSGLNKPAAVIVETVQGEGGINVARPEWLRALAELCKRQDMLLIVDDIQMGCGRTGAFFSFEEAGVTPDIVTVSKSISGYGLPMSLCLFKPELDIWEPGEHNGTFRGNNPAFVTAAAALQTYWADGSAMEKQTLARGEQVEQALISITEENLADVKEYRGRGLVWGIEFKDKDRAGRIAQRAFELGLLIETSGPESEVVKLLPALTITPEELDEGLRTLARAVRETA

SEQ ID NO: 9701 - protein, 168 aa, Brassica oleracea
FRCVQQGDDENGKTGVSLSKDITDVAGRTVKKHIATLGPLILPLSEKLLFSVTFMGKKLFKDKIKHYYVPDFKLAIDHFCIHAGGKAVIDVLEKNLGLAPIDVEASRSTLHRFGNTSSSSIWYELAYIEAKGRMKKGNKVWQIALGSGFKCNSAVWVALNNVKASTNS

SEQ ID NO: 9702 - protein, 180 aa, Xanthomonas axonopodis pv. citri str. 306
MSYSLTGKTVAVLATDGFEQSELTEPKRLLESWGAKVEVIAPGDSAQIRAWNHTDWGDSVAVDRQLEQATAESYDALVLPGGVLNPDTLRTDKQAIAFIRAFSTAQKPVAAICHGPWLLLESDLVRDREVTSWPSVKTDLINAGARWQDAEVVVDGQLITSRKPDDIPAFAAAVAKALAA

SEQ ID NO: 9703 - protein, 486 aa, Listeria monocytogenes EGD-e
MKKETHGEIRRDLKTRHLSMIAIGGSIGTGLFLASGNAIHTAGPGGALVAYVAIGIMVYFLMTSLGEMATYMPVSGSFSTYASRFVDPAFGFALGWNYWFNWAITLAVDISTAAIIVQFWLPNTPAWLWSAIFLILIFGLNALSVKAYGESEYWFSIIKVATVIIFLIVGVLTIVGILGGEVIGFSNFTAGDAPFKGGFFAILGTFLIAGFSFQGTEMVGIAAGESATPETSVPKAIKQVFWRILLFYIFAIFIIGMIIPYTNPNLLSAEATDVAISPFTLVFEKAGLAFAASVMNAVILTSVLSAGNSGLYASTRMLWAMARDKKAPKFLGKVNRRGIPMAALIVTTIVGAMTFITTLTENGTVIYTWLLSASGLTGFIAWVGIAISHYRFRKAFIKQGHDLSELKYKAKFFPFGPILALVLCILVIVGQDYAAFLKPEFTNPAWWQKIGISYIGLPIFLVFWLSFKFTNKTKVIPLEDCKFDQK

SEQ ID NO: 9704 - protein, 429 aa, Phaseolus vulgaris
MAQILAPSTQWQMRFTKSSRHASPITSNTWSSLLMKQNKKTSSAKFRVLAVKSDGSTINRLEGLLNLDITPFTDKIIAEYIWIGGTGIDVRSKSRTISKPVEHPSELPKWNYDGSSTGQAPGEDSEVILYPQAIFKDPFRGGNNILVICDAYTPAGEPIPTNKRHRAAEVFSNPRVIAEVPWFGIEQEYTLLQTNVNWPLGWPVGGYPGPQGPYYCSAGADKSFGRDISDAHYKACLFAGINISGTNGEVMPGQWEYQVGPSVGIEAGDHIWASRYILERITEQAGVVLSLDPKPIEGDWNGAGCHTNYSTKSMREDGGFEVIKKAILNLSLRHKEHISAYGEGNERRLTGKHETASINTFSWGVANRGCSIRVGRDTEKNGKGYLEDRRPASNMDPYVVTSLLAESTLLWEPTLEAEALAAQKLALKV

SEQ ID NO: 9705 - protein, 186 aa, Azotobacter vinelandii
MTQSLKGKRVAFLVTDGFEQVELTGPREALEKAGARTLIAAARPGQVTGWKHTTPADRFPVEHGFDTLRIEDCDALVLPGGVVNGDNIRLDEMAQELVRDAARADKPIAAICHGGWLLISADLVKGKTLTSWPSLRDDLQNAGAKWVDRPVVVDGHLITSRRPDDIPAFSQALIEMLGGKTAQSAA

SEQ ID NO: 9706 - protein, 80 aa, Glycine max
SLTFKTPDNVNHSSINFAYAGGGAGGTMTGVLTASYDKAVEMFIDEKIISLDIFKVVELICDKHQIELLFSPFLGEIIHY

SEQ ID NO: 9707 - protein, 89 aa, Glycine max
MVMAWKWIVRRTRESKPFFLAFATICGVVPGVIGYGVMQLTNTRNEKLESHLRTNARPESLCIFSRLLVDTVVAVLAGVKPFVLLYVCH

SEQ ID NO: 9708 - protein, 182 aa, Zea mays; identical to SEQ ID NO: 2422

SEQ ID NO: 9709 - protein, 605 aa, Listeria monocytogenes
MGETITVSTPIKQIFPDDAFAETIKDNLKKKSVTDAVTQNELNSIDQIIANNSDIKSVQGIQYLPNVTKLFLNGNKLTDIKPLTNLKNLGWLFLDENKIKDLSSLKDLKKLKSLSLEHNGISDINGLVHLPQLESLYLGNNKITDITVLSRLTKLDTLSLEDNQISDIVPLAGLTKLQNLYLSKNHISDLRALAGLKNLDVLELFSQECLNKPINHQSNLVVPNTVKNTDGSLVTPEIISDDGDYEKPNVKWHLPEFTNEVSFIFYQPVTIGKAKARFHGRVTQPLKEVYTVSYDVDGTVIKTKVEAGTRITAPKPPTKQGYVFKGWYTEKNGGHEWNFNTDYMSGNDFTLYAVFKAETTEKTVNLTRYVKYIRGNAGIYKLPREDNSLKQGTLASHRCKALTVDREARNGGKLWYRLKNIGWTKAENLSLDRYDKMEYDKGVTAYARVRNASGNSVWTKPYNTAGAKHVNKLSVYQGKNMRILREAKTPITTWYQFSIGGKVIGWVDTRALNTFYKQSMEKPTRLTRYVSANKAGESYYKVPVADNPVKRGTLAKYKNQKLIVDCQATIEGQLWYRIRTSSTFIGWTKAANLRAQKLEHHHHHH

SEQ ID NO: 9710 - protein, 612 aa, Nitrosomonas europaea ATCC 19718
MNPTTHTLPTHNLDMISVETARTLDGLFRERVRRSPHATAYRDYDVSEEIWRDYTWDDMANAVKRWQMALSQENLSPGDRVAVMARNCPQWVMFEQAALGLGLVVVPLYTEDRAENAAWCLDNAGTALLLLENMTRWEAMNEAMTGLQQLKRIVILDASPEDVRQTGDKRAIALQDWLPETPGDIPSVQNDPHVLATIIYTSGTTGRPKGVMLSHNNILSNAYSSAQVVTVRPDDVLLSFLPLSHTFERTAGYYVPMLCGATVAYARSIRQLQDDLLIIRPTILISVPRIYERIYAGIQAKLAEGPAISRLLFKLAVDIGYSRFERQQKRVGWRISHLLWPLLDKLVARKVMEKLGGRLWQVMSGGAALSPEISRVFIGLGLPILQGYGLTETSPVVCANRLDDNLPSSVGRPAPGVEVRLGEQNALLIRGPNVMLGYWNNPEATHAILSADGWLNSGDTASIDAQSRVTITGRLKDIIVTSTGEKIPPADMEAAILRDPIFEQVMIVGEGRSYLSALTVLSKRGWEVVATHCNAKNDPHALACDEYAEEIILEKIARQISGFPGYAKVHRALLISEPWTVENEMLTPTLKLKRKKIYEHYQGEIDQLYASR

SEQ ID NO: 9711 - protein, 422 aa, Halobacterium sp. NRC-1
MSYDKIEVPEGGAKVSYDEAADELDVPDTPIIPIIHGDGIGKDVGPIAQDVLSAAAEATGHDIEWMEVYAGESAREMYDENLPEETVEAIREHRVAIKGPLTTPVGAGFRSLNVALRQTLDLYANVRPTYYLDGVPSPMKAPEEMDMVTFRENTEDVYAGIEWEAGTDEAEQVRSFVEDEMDFDDVMHDGDIGIGLKPISEKGSKRLVREAIDYAIENDRDTVTLVHKGNIMKFTEGQFGDWGMEVAEEEYPDDEVFAAPDSLWEEQDEVDIPEDAVMVEERLADAMLQWMQLRTDEFDVLAMPNLNGDYLSDAAGAQIGGLGIAPGANFGAGRCLAEPVHGSAPKRAGQDKANPTALILSGRLLFEYIGWDDASTLVRDAVEDTIESGTVTYDLARQRDDAEEVSSTTYAEAVIDRIEDLA

SEQ ID NO: 9712 - protein, 323 aa, Glycine max
  unsure (1)..(323): unsure at all Xaa locations
MAPKKVLLLCGDFMEDYEAMVPFQALQAFGLAVDAVCPGXKSGDVWRTAVHTYSETVGHNFSLNATFDEVDAASYDGLWVPGGRAPEYLAHVPGVVELVTKFVSLGKQIASICHGQLILAAAGVVKGRTCTAFPPVKPVLVAAGAHWVEPDTEAATVVDGDLITAATYEGHPELIRHFVKALGGKISGFDKKILFICGDYMEDYEVKVPFQSLQALGCHVDAVCPSKKAGDTCPTAVHDFEGDQTYVIKPGHTFALTATFDDVDPSGYDALVIPGGRAPEYLALNESVIALVKYFFENKKPVASICHGQQILSAAGVLKVLLL

SEQ ID NO: 9713 - protein, 368 aa, Ipomoea batatas
MAFRFSLLFLCTLLATTSLVFAAEDDDGDDILIRQVVGDGDGDLLNADHHFTVFKRRFGKAYASDEEHDYRLSVFKANMRRAKRHQELDPAAVHGVTQFSDLTPTEFRRKFLGLNRRLKFPADAKTAPILPTDELPSDFDWRDHGAVTPVKNQGTCGSCWSFSTTGALEGANFLATGKLVSLSEQQLVDCDHECDPEEAGSCDSGCNGGLMNSAFEYTLKAGGLMREEDYPYTGNDLQVCRFDKTKIAAKVANFSVVSLDEDQIAANLVKNGPLAVAINAVFMQTYIGGVSCPYICSKRLDHGVLLVGYGSAGYAPIRMKEKPYWIIKNSWGESWGENGYYKICRGRNVCGVDSMVSTVAAVSTTTSD

SEQ ID NO: 9714 - protein, 153 aa, Emericella nidulans
VKAVAVLRGDSKVSGTVTFEQADESSNTTVSWNITGNDPNAERGFHIHQFGDNTNGCTSAGPHFNPFGKTHGAPEDEVRHVGDLGNFKTDAEGNSKGSKTDKLIKLIGAESVLGRTLAVHAGTDDLGRGDSEESKKTGNAGARPACGVIGIAA

SEQ ID NO: 9715 - protein, 382 aa, Thermoplasma acidophilum
MSVKIGLVGEPNVGKSTFFSAATQNEAEIGDFPFTTVKPNLGMTFFTVKCPDTEIGARCNPREGYCENGIRHVPVQVIDVPGLIEGASEGRGMGNEFMDAIRDVDAIVLIVDVSSGSVDEIRKSITLVTDEIRKWFADRIYSDWEHFSRRSEAAGERREVALRRKLALFGVSEKKIYEILETEFFPARLSIWTMDDAYNLASAILKHAKPIIYAGNKGDKIDANTIGKIKVSIPDIYVVSAEYELAVKRARNAGLIDSVLTGFNITGGNQKQRDALAMIDRWFRTPDVIRIHDLIEKVVKDTLHYIVVYPVYDENKWTDKAGNVLPDAYVMIQGSTALDLAFRVHTDIGEGFIRAINGRTKMVLGKDYVLKDSDVIKIISKK

SEQ ID NO: 9716 - protein, 344 aa, Solanum tuberosum
MMSSRFAGTALRQLGPVLFASAPGARAAAEPAYALLAGAPAAAPTRAAVWLVRFPLSRAASTMSAPAAPEGETAAKGDVDVTKKAEGDTEQKAVVSYWGVPPSRVTKEDGSPWRWACFRPWEAYESDMSIDLKKHHAPTTFLDKMAFWTVKSLRWPTDIFFQRRYGCRAMMLETVAAVPGMVGGLLLHLKSLRRFEHSGGWIKALLEEAENERMHLMTFMEVSQPRWYERALVLAVQGVFFNAYFLGYLLSPKFAHRVVGYLEEEAIHSYTEFLKEIDKGTIDNVPAPAIALDYWRLPPGSTLRDVVMVVRADEAHHRDVNHFASDVHYQGHQLKEAPAPLGYH

SEQ ID NO: 9717 - protein, 613 aa, Neurospora crassa
MATQQSPPFKVDRYVVIHVATTCDEHGVYVTKDSAEVIELGWILLDANNLEEIHRESVLVKPVNTPITPLCTSLTTLTWEHVRNAGTFRDAINRFDAFASEHLTGPNLDFVFVTLEAWDLRVQLPREARDKAVVLPPYLQHSRTFDLRTEYQRWQQHHPESLPFGPSSLANICAALEVEAVQSSAPIKHNLPFHLQALAPASPRRAMEEAVTLARVLRSLIRKSQPAHEHPDVLTRPMDARADVRAFLSERSKVLHMSGLPHDTTQSELESWFTQYGGRPIAFWTLRTPEQHKPTGTGFAVFSSHEEAAESLCMNGRALNEKAIEVSPSSSRVLDRASEILTPFPPSKNRPRPGDWTCPSCGFSNFQRRTACFRCSFPAVSAGPTGEMGYGYGYGPPAMMPAPPHMGHHGHGGGHGRMGGSGVVPFRAGDWKCGNEVCGYHNFAKNVCCLRCGASRAGAAVVADSGYPSPLDAQTSYGMNQGSMGGNSAPGPFASASGFNSAGGYGQHFGGPPSTYALPSGLGGGAAPYPSLNTHFGPAPGSHSAGPFDSRAAEAAFQSASNGPASAGPGNNFYSQTESDPFAFLSSGIGSLSVSNQDARQNGGAAPASKSPA

SEQ ID NO: 9718 - protein, 352 aa, Bacillus subtilis subsp. subtilis str. 168
MTEQTIAHKQKQLTKQVAAFAQPETKNSLIQLLNTFIPFFGLWFLAYLSLDVSYLLTLALTVIAAGFLTRIFIIFHDCCHQSFFKQKRYNHILGFLTGVLTLFPYLQWQHSHSIHHATSSNLDKRGTGDIWMLTVNEYKAASRRTKLAYRLYRNPFIMFILGPIYVFLITNRFNKKGARRKERVNTYLTNLAIVALAAACCLIFGWQSFLLVQGPIFLISGSIGVWLFYVQHTFEDSYFEADENWSYVQAAVEGSSFYKLPKLLQWLTGNIGYHHVHHLSPKVPNYKLEVAHEHHEPLKNVPTITLKTSLQSLAFRLWDEDNKQFVSFRAIKHIPVSLPPDSPEKQKLRKNA

SEQ ID NO: 9719 - protein, 139 aa, Leptolyngbya sp. PCC 7375
LYRFDDDGHGEVVAEEKCEEMEPYLGLHYPESDIPKTARQMFLSNWIRVIPDAAATAVDLYPMDNPVTQQPTDLTHSILRSAYSCHLEYLHNMGVGASLTISLMKDNKLWGLIACHHRTAKYVPYELRKACEFLGRVIF

SEQ ID NO: 9720 - protein, 93 aa, Oryza sativa; identical to SEQ ID NO: 7352

SEQ ID NO: 9721 - protein, 188 aa, Medicago sativa
AWHSAGTFDSKTKTGGPFGTIKHQAELAHGANNGLDIAVRLLEPLKEQFPIISYADFYQLAGVVAVEITGGPEVPFHPGREDKPEPPPEGRLPDATKGSDHLRDVFGKAMGLSDQDIVALSGGHTIGAAHKERSGFEGPWTSNPLIFDNSYFKELLGGEKEGLLQLPSDKALLSDPVFRPLVEKYAAG

SEQ ID NO: 9722 - protein, 414 aa, Oryza sativa
  unsure (1)..(414): unsure at all Xaa locations
MAPPSMDYWLGFFRGAGDSIFDAIDAAIAVAASDHPAALRSRRDAIAERLYTAHLVPGAPPAGXXPAGGGAAAADAPTAQLLLHPEGAASVPSLCSSDRAEVITDDGAVPRRDDDPVAAETERIKAILLNDQEKSEATLLELLRRLQQLELTVDTLTCTEIGKAVSSYRKHNSKQIRHLVRLLIEGWKRIVDEWMSSRDAIVDHTPQSMHPSGLEQDERGLSSPYEGALFATPSTSIRLSEFFDGMDDDGNTRSNGGRDNGRLYTRNQEPARRPLPPMAQQYDPDQSWKQEQSAXEAVETTGTEQWADXESNSSRRCLQGPQTQSPVLXRPQPRTKQHQDASPAQGRSQPMPSDAKLEVTKRKLQEGYQEFDNAKKQRTIQMVENLPKQANRNWQPNGRPRNNSNFNNNRNWSR

SEQ ID NO: 9723 - protein, 113 aa, Oryza sativa
  unsure (1)..(113): unsure at all Xaa locations
PKQKKPPLFKSFFKGPKPGGKGPISDYCKGPGKPSKKFAASIKQRGYDLPEVRAYGQKLXKAGFQKVIAKNRPDQFPDVLKREPAKVLKNQKXXPEFRPRCFRLLXSWKVQLP

SEQ ID NO: 9724 - protein, 158 aa, Oryza sativa; identical to SEQ ID NO: 804

SEQ ID NO: 9725 - protein, 363 aa, Oryza sativa (japonica cultivar-group)
MERVSCVPLLRRLLLLAAAGLAGAEPQVPCYFVFGDSLVDNGNNNNIASMARANYPPYGVDFPGGATGRFSNGLTTADAISRLLGFDDYIPPYAGATSEQLLTGVNFASAAAGIRDDTGQQLGERISFSAQLQNYQAAVRQLVSILGGEDAAANRLSQCIFTVGMGSNDYLNNYFMPAFYPTSRQYTPEQYADVLINQYAQQLRTLYNYGARKVAVFGVGQVGCSPNELAQNSRNGVTCIERINSAVRMFNRRVVVLVNQFNRLLPGALFTYINCYGIFESIMRTPVEHGLAVTNRGCCGVGRNNGQVTCLPYQAPCANRDEYLFWDAFHPTEAANIFVGRRAYSAAMRSDVYPVDLSTLAQL

SEQ ID NO: 9726 - protein, 245 aa, Salacia impressifolia
ALSIAGAVQSQKLAVRAISQIQSLPGGDIKLLCDTVVESVRDLTGYDRVMVYKFHEDEHGEVVAESKRPDLEPYIGLHYPATDIPQASRFLFKQNRVRMIVDCNASPVRVIQDDGLMQPLCLVGSTLRAPHGCHAQYMENMGSIASLAMAVIINGNDEEVIGGRNPTRLWGLVVCHHTSARCIPFPLRYACEFLMQAFGLQLKMELQLAAQLLEKHVLKTQTLLCDMLLRDSPTGIVTQSPSIMD

SEQ ID NO: 9727 - protein, 285 aa, Oceanobacillus iheyensis HTE831
MAIQWFPGHMAKAKREVEEKLKLVDFVIELVDARAPLSSQNPMLKQVLNNKPKLIVLMKKDLADQEVTKRWVDKFNEDGTQAIDVNVNHKGDIQKVIQQAKLLGQDKMEKLKRKGIQPRPARAMIVGIPNVGKSTLINRLANKKIAKTGDRPGITKQQLWIKVKKDFELLDTPGILWPKFEEEVVGYRLAAIGTIKDQLLPLPDVTAFIIRYMSEHYPNQLKDRYQLEEIEDMVEVFESIGRIRGALESGGQVNYDKVADIVIRDLRVGRLGTITLEQPEDSSNS

SEQ ID NO: 9728 - protein, 485 aa, Agrobacterium tumefaciens str. C58 (Cereon)
MHSGKTAPAEREVFVEEDLGYHKALKPRQIQMIAIGGAIGTGLFLGAGGRLAQAGPALVFVYALCGFFAFLVLRALGELIMHRPSSGSFVSYAREFYGEKMAFAAGWMYWLNWAMTSVADVTAVALYMNFFKQYVPWLAGIDQWVFAMTALVVVLAMNMLSVKVFGELEFWFSLIKVLALAIFLVVGVYFVIFGTPIEGHVTGFSLITDNGGFFPNGILPAFVIIQGVVFAYASIELIGTAAGETEDPRKVMPRAIRAVVLRLVVFYVGSVLLFTLLLPYTAYKAGESPFVTFFGSIGVEGADVIMNLVVLTAVLSSLNAGLYSTGRILHSMAVSGSAPAALAKMNKNGVPYGGIAVTAVVTVLGVALNAVVPSSAFEIALNLSALGIICAWAVIVLCQLKLWQLSQRGEIVRPDFRMFGAPYTGILTLIFLFGVLVLMAFDYPVGSWTIASLIVIIPALVIGWYLLRDRIYRLAAERAGSGVSH

SEQ ID NO: 9729 - protein, 114 aa, Triticum aestivum
  unsure (1)..(114): unsure at all Xaa locations
FFPPLNSNPRHDTAAAAGGAATEASGVLPSCSPLWPLRSASVAAPKAAAGERRRLPPFPDASAATEPLRRWNKKPLKNRETVSFPLVGRLVETGRWGAMLLNHALMGVDXDPTP

SEQ ID NO: 9730 - protein, 355 aa, Oceanobacillus iheyensis HTE831
MVTPILEAIGIEYPIIQAPMAGGITTPELVANVSKNGGLGMIAAGYLNPDQLKVAIHEVKNRVDQPFGVNLFVPNDVTYSSQHVENMQLMMKNVYDELQITDYNVDEFPKYKDQQAVFEQHLQVILDETIKVCSFTFGLPNEDQIKQLKQAGVYTIGTATTVKEALIIQDLGMDAVVMQGSEAGGHRSNFISSFHEGNIGLMALVPQAVQEIKIPIIAAGGIMNGSGIRACLQLGAQAAQMGTAFLTLKESGAQDLHKNAILYATEDELVLTKAFSGKWARGIRNEFTEEMNANEAMILPFPIQNSLTKPIRKEAAKQNQAAYMSLWSGQAPRLATDDDVSTFMNRLIKELNEGD

SEQ ID NO: 9731 - protein, 184 aa, Glycine max
  unsure (1)..(184): unsure at all Xaa locations
MAGVGRNMVAPLLVLNXLIMYLIVIGFASWNLNHFINGLTNRPGVGGNGATFYFLVFAILAGVVGAASKLAGVHHVRTWRGDSLATSASSSLVAWAITALAFGLACKEIHIGGYRGWRLRVLEAFVIILAFTQLLYVLALHSGLFGNQLGGNHAGGYPAEHAYGAGGDPHNKGMGMGTGGVARV

SEQ ID NO: 9732 - protein, 157 aa, Triticum aestivum
MAVALALAVALAVASLHAEAVWLDVPQSGTKCVSEEIQSNVVVLADYSIMFESHPHSHPTIAVKVTSPYGNTLHHSENATAGQFAFTTAEAGNYLACFWIDSAEKGSRVSVNLDWKIGIATKDWDAIAKKEKIEGVELELRKLEVAVQAIHQNLIYL

SEQ ID NO: 9733 - protein, 173 aa, Helicobacter pylori
MNLEKLEISHDANALCVVIEISKHSNIKYELDKESGALMVDRVLYGAQNYPANYGFVPNTLGSDGDPVDALVLSDVAFQAGSVVKARLVGVLNMEDESGMDEKLLALPIDKIDPTHSYVKDINDLSKHTLYKIKHFFETYKDLEPNKWVKVKGFENKESAIKVLEKAIKAYQG

SEQ ID NO: 9734 - protein, 58 aa, Glycine max
KTKDERCVQRSYWIEHTTDLSVESMMLDSNASDLDKEERPEVLSLLPAYEGKSVVELG

SEQ ID NO: 9735 - protein, 358 aa, Tuber borchii
MSENSTIVSNTANLVKFLNLDQKGSILAEYIWIDGANGVRSKTKTLFKKPSSVEDLPEWNFDGSSTGQAPGEDSDIYLRPVAIFPDPFRMGDNILVLAECWNADGSPNKFNHRHECAKIMEAHKDQKPWFGLEQEYTLFDLYGNPYGWPKGGFPGPQGPYYCGVGTGKVYCRDIVEAHYKACLFAGIKISGINAEVLPSQWEFQVGPCVGIEMGDHLWISRYLLHRVAEEFGVKISFHPKPIPGDWNGSGLHTNVSTQAMRDEGGMKAIEEAIQKLSTRHAEHIAVYGDDNTLRLTGRHETGNIDAFSYGVADRGSSIRIPRSCAKEGKGYFEDRRPASNACPYQITGIMMETICGGI

SEQ ID NO: 9736 - protein, 120 aa, Petunia axillaris
MSTSNASTSGVRKGAWTEEEDLLLRECIEKYGEGKWHLVPVRAGLNRCRKSCRLRRLNYLRPHIKRGDFSLDEVDLILRLHKLLGNRWSLIAGRLPGRTANDVKNYWNTDLRKKLIAPHD

SEQ ID NO: 9737 - protein, 185 aa, Glycine max
MASEVIEYRCFVGGLAWATDSDALEKAFSHYGEIVESKVIIDRETGRSRGFGFVTFASEQAMKDAIEGMNGQNLDGRSITVNEAQSRGSGGGGGGYGGGGGYGGGGYSRGGGGYGGGGRREGGGGGYNRNGGGGGYGGGGGYGGGGGHGGGGGYGGGGRDRGYGGDGGSRYSRGGGASDGGSWRN

SEQ ID NO: 9738 - protein, 169 aa, Synechocystis sp. PCC 6803
MTAQANNTIYGFSANALDGSPVALRDFEGKVLLIVNTASQCGFTPQYQGLQALYNRFGDRGFTVLGFPCNQFGQQEPGGSGEIKNFCETRYGVTFPLFEKVEVNGPNAHPLFKFLTAASPGMAIPFLGGAEDIKWNFTKFLVDRQGKVVKRYGSIAKPDEIAADIEKLL

SEQ ID NO: 9739 - protein, 540 aa, Amorpha fruticosa
MAFETEEPKEFIFRSKLPEIPISKHLPLHSYCFENLSEFGSRPCLISAPTGDVYTYYDVELTARRVASGLNKLGVQQGDVIMLLLPNSPEFVFSFLGASYRGAMITAANPFFTSAEIAKQAKASNTKLLITQASYYDKVKDLDVKLVFVDSPPDGHMHYSELREADESDMPEVKTNPDDVVALPYSSGTTGLPKGVMLSHKGLATSIAQQVDGENPNLYFHNEDVILCVLPLFHIYSLNSVLLCGLRAKAAILLMPKFEINALLGLIQKHRVTIAPIVPPIVLAIAKSPDLEKYDLSSIRVLKSGGASLGKELEDTVRAKFPKAKLGQGYGMTEAGPVLTMCLAFAKEPIDVKPGACGTVVRNAEMKIVDPETGNSLPRNQSGEICIRGDQIMKGYLNDQEATQRTIDKEGWLHTGDIGYIDDDDELFIVDRLKELIKYKGFQVAPAELEALLLSHPKITDAAVVPMKDEAAGEVPVAFVVRSNGHTDTTEDEIKQFISKQVVFYKRISRVFFIDAIPKSPSGKILRKDLRAKLAAGVPN

SEQ ID NO: 9740 - protein, 243 aa, Oryza sativa
MMNALGLSVAATSTGSPFHDVCCYGAGIAGNIFALVLFISPLPTFKRIVRNGSTEQFSAMPYIYSLLNCLICLWYGLPFVSYGVVLVATVNSIGALFQLAYTATFIAFADAKNRVKVSSLLVMVFGVFALIVYVSLALFDHQTRQLFVGYLSVASLIFMFASPLSIINPLIRTSGVEYMPFYLSLSMFLMSVSFFAYGVLLHDFFIYIPNGIGTVLGVIQLVLYGYFRKGSREDSLPLLVTHT

SEQ ID NO: 9741 - protein, 529 aa, Neurospora crassa
MDSHAGLDGVLQPQVLKLTLRTLPSPFISFVVIPILSILGWYIISWATNPLKKYPGPFLAGFTNWWRLYQTRTGRYHEIVYDLHKKYGPIVRIGPNTLDLDYPELIKTIYSTDGKWLKTEFYHNNSAIVNGKITYHIFSTTSPTEHAKMKRPVAKYYSTSYVQALEPHVDVVLNDFCKYVEERFINVPGGPKELDFGEWLGYHAWDLISSVTFSRRFGYMEHGSDFDGTIEKAEAALRYFQTVGQIPILDYFLDKNPIKRVGPPNLVHPARIAVQSFVARLQGKDENYDPKNPDYLQHFIDSKESHPDLVDDNQIISDVLVNLLAGADTTAIALRAVFYYMLKNRSVYNRVSEEIQAAGFDRSKPVPYSGARQLPYLEACVREALRIHPAAAMLLERYVPADGITLPDGSFVPAGTAVGLNPWVVSRNKSIFGEDSDTFRPERWLQQPGEDDEAFHVRMQKWNAADLTFGNGSRICTGRNFAMFELYKVCATLLHRFEIELADPTKEWKVWGSWFTIQKDVIAKMKVRG

SEQ ID NO: 9742 - protein, 357 aa, Saccharomyces cerevisiae
MALERELLVATQAVRKASLLTKRIQSEVISHKDSTTITKNDNSPVTTGDYAAQTIIINAIKSNFPDDKVVGEESSSGLSDAFVSGILNEIKANDEVYNKNYKKDDFLFTNDQFPLKSLEDVRQIIDFGNYEGGRKGRFWCLDPIDGTKGFLRGEQFAVCLALIVDGVVQLGCIGCPNLVLSSYGAQDLKGHESFGYIFRAVRGLGAFYSPSSDAESWTKIHVRHLKDTKDMITLEGVEKGHSSHDEQTAIKNKLNISKSLHLDSQAKYCLLALGLADVYLRLPIKLSYQEKIWDHAAGNVIVHEAGGIHTDAMEDVPLDFGNGRTLATKGVIASSGPRELHDLVVSTSCDVIQSRNA

SEQ ID NO: 9743 - protein, 133 aa, Citrullus lanatus
  unsure (1)..(133): unsure at all Xaa locations
ATXXAVAVLXGTSNVEGVVTLTQEDDGPTTVNVRISGLXEXLHGFXLFGDTTNGXIXXGPXFNPDKTHGAPEDEIRHAGDLATIVDSQIPLSGPNSVVGXALVVHELEDDLGXGGHELSLTXGNAGGXLAXGV

SEQ ID NO: 9744 - protein, 355 aa, Ralstonia metallidurans
MREVLPARPIQESTMPDFAMQYRRLGASNLNVSTLCLGTMMFADQTDEAEAARIVASAREHGVNFIDTADVYSKGASEQMVGRLLAGSRHDWVLATKLGNAMGSGPNQSNYSRTWIMRSVEDSLTRLATDYIDILYLHRDFAGANLEEPVRAMGDLIRAGKIRYWAVSNFRGWRIAEIAALCDRLGVPRPVACQPYYNLLNRVPEVEILPACQHFGLGVVPYSPIARGVLTGKYLPGQAPGAETRAGRADRRIMETEFREESLVIAQTLKSHAEGRGLTPGQFATAWVLANPIISSVIAGPRTLAQFEDYFGAVAAAITPAEEAMVDGLVPRGHASTHGYNDPGYPFGGRPVAAA

SEQ ID NO: 9745 - protein, 450 aa, Brassica napus
MRGVIPNYHHSYTFIFFVILVLFPHVFSTNTLSPNENLTISSNKTLVSPGDVFELGFFKTTTRNSPDGTDRPDGTDRWYLGIWYKTTSGHRTYVWVANRDNALHNSMGTLKISHASLVLLDHSNTPVWSTNFTGVAHLPVTAELLANGNFVLRDSKTNDLDRFIWQSFDYPVDTLLPEMKLGRNLIGSENEKILTSWKSPTDPSSGDYSFILETEGFLHEFYLLKNEFKVYRTGPWNGVRFNGIPKMQNWSYIDNSFIDNNEEVAYSFQVNNNHNIHTRFRMSSTGYLQVITWTKTVPQRNMFWSFPEDTCDLYKVCGPYAYCDMHTSPTCNCIKGFVPKNAGRWDLRDMSGGCVRSSKLSCGEGDRFLRMSQMKLPETSEAVVDKRIGLKECREKCVRDCNCTGYANMDIMNGGSGCVMWTGELDDMRKYNAGGQDLYVKVAAASLVPS

SEQ ID NO: 9746 - protein, 370 aa, Saccharomyces cerevisiae
MAEASIEKTQILQKYLELDQRGRIIAEYVWIDGTGNLRSKGRTLKKRITSIDQLPEWNFDGSSTNQAPGHDSDIYLKPVAYYPDPFRRGDNIVVLAACYNNDGTPNKFNHRHEAAKLFAAHKDEEIWFGLEQEYTLFDMYDDVYGWPKGGYPAPQGPYYCGVGAGKVYARDMIEAHYRACLYAGLEISGINAEVMPSQWEFQVGPCTGIDMGDQLWMARYFLHRVAEEFGIKISFHPKPLKGDWNGAGCHTNVSTKEMRQPGGMKYIEQAIEKLSKRHAEHIKLYGSDNDMRLTGRHETASMTAFSSGVANRGSSIRIPRSVAKEGYGYFEDRRPASNIDPYLVTGIMCETVCGAIDNADMTKEFERESS

SEQ ID NO: 9747 - protein, 414 aa, Methanocaldococcus jannaschii
MIYVTFTPYGAFGVKDNKEVSGLEDIEYKKLFNEEEIPDIMFKLKTQPNKIADELKEEWGDEIKLETLSTEPFNIGEFLRNNLFKVGKELGYFNNYDEFRKKMHYWSTELTKKVIKSYAQQKDKIIIQVAEAISDLDKTLNLLSERLREWYSLYFPELDHLVNKHEVYANLITKLGKRKNFTKSQLKKILPSKLAGKIAEAAKNSMGGELEDYDLDVIVKFAEEINHLYEKRKELYNYLEKLMNEEAPNITKLAGVSLGARLIGLAGGLEKLAKMPASTIQVLGAEKALFAHLRMGVEPPKHGIIYNHPLIQGSPHWQRGKIARALACKLAIAARADYVGDYIADELLEKLNKRVEEIRRKYPKPPKKKKKEKPKAKKKEKKGKKEKSKKKKDKKKDKKGKKERKVIGKTKSRK

SEQ ID NO: 9748 - protein, 165 aa, Euphorbia esula
MSADIEYRCFVGGLAWATTDQSLQEAFSPYGEILDSKIINDRETGRSRGFGFVTFNNEKSMRDAIQGMNSQELDGRNTTVNEAQSRGNGRSGGGGGYSRGGGGGGYGSGGGRRERGYGGGGGGYNSISTGGSGGYGGGRDQGYGSGGGGSRYSTGGGESDGNWRN

SEQ ID NO: 9749 - protein, 194 aa, Oryza sativa (japonica cultivar-group)
MLNLRRATAAAAVDGLWFSFFSTTTTAGGAMEEEKAASPVSRHIMPHLLNIYGSCATARDFEIYAAHATFEDPLMRAHGVKQIKSAFYTLPKLFGESKIVEYTITENETAPGKVEILIDNKQHYKFLGRAIDLASLITLDVEDGKVVKHQDWWDKKPLKNRDTVSFPVVGRLAEATRRGAMLLTHALMGCGKDP

SEQ ID NO: 9750 - protein, 633 aa, Picea abies
MMTVDTSSIEPVGKIAPRSSEETESVCVEAAAATVTHIQSNNETRRRAPFRSEMTESGTSISSVVNSIACNENINSLEHEASSKAVELDGDVLSSNSTQVPRSNEGNHKIFGFSLKIETQNLTSRGNLLNVKANDEQQKDPACVTRHFFPLHNGQPSEVLMPTECTGGNPFTESHWTTVTSRLPESTEPRKKQAENNKPIKKSRRGPRSRSSQYRGVTFYRRTGRWESHIWDCGKQVYLGGFDTAHAAARAYDRAAIKFRGVDADINFTLTDYQEDLDQTSKLSKEEFVHILRRQSTGFSRGSSKYRGVTLHKCGRWEARMGQFLGKKYIYLGLFDSEEDAARAYDKAAIRCNGKDAVTNFDPSSYENEILEEGRESQTSTGFDQNLDLSLGIGHVTTQLKISPSYKSRVEEDSQLNRIEAVTYSNLSQDSKILSCLTSKGAENAVPEFQSLPRGHAVYWNSQTLQVPDAMKHKQSHTREDNAYEQTAISGSQLYPDHLSNCKRLNMEGLKEQSLGVPSSTVSFWPMKQQSGWTWQLHASGPTTPVFTTNRSPASGFSPQIHTAFVPSTHGCHKMGVHWAAQSTDPCMVQTPSPHLATRLTSGPDSGDHPVGLTLDLPGKKIKRSSVQRDKVD

SEQ ID NO: 9751 - protein, 485 aa, Glycine max
MNDAFQKSYWIEHTTDLSVESMMLDSNASDLDKEERPEVLSLLPPYEGKSVVELGAGIGRFTVELAKKAGQLLAVDFIESAIKKNESINGHHKNVKFMCADVTSPNLYISEGSVDLIFSNWLLMYLSDKEVENLAARMIKWLKVGGYVFFRESCFHQSGDSKRKYNPTHYREPRFYTKVFKECHISDDTRNSFELSLVGCKCIGAYVRNKKNQNQICWLWKKVRSQDDRGFQRFLDSVEYNHKDILLYESVFGQGFVSTGGLETTKEFVAKLGLKPGQKVLDVGCGTGGGDIYMAENFDVEVVGIDLSINVISLAIERAIGLKCSVEFECADCTKKTYPENTFDVIYSRDTLLHIKDKPPLFRSFYKWLKRGGTLIITDYCKSEGSPSLGYAEYIKKGGYHIHDMKTYCQMLENAGFDDVVAEDRTNLFMKTLQQELNALESKKDDFIDEFSEEDYNGITERWKAKQMRGADGEQIWGLFVAKKE

SEQ ID NO: 9752 - protein, 238 aa, Pseudomonas aeruginosa PAO1
MTNHRTALVTGATRGIGLALARRLAASGWSVVGIARHASDDFPGRLLCCDLADPAQTAETLRGLLSESAVDALVNNAGIALPQSLENLDLAALQQVFDLNVRVAVQLAQACLPGLKRSPAGRIVNLCSRAIHGARERTAYAAAKSALVGVTRTWALELAPLGITVNAVAPGPIETELFRQTRPVGGEEERRILSTIPMQRLGRPDEVAALIEFLLSEGASFVTGQVIGVDGGGSLGGR

SEQ ID NO: 9753 - protein, 255 aa, Prochlorococcus marinus str. MIT 9313
MLSMLMLFSNPTLVQWLWAFALNALLIALAQRLPLLTSAGWIHAGALGTILWGCLGWRGWLAVVIYLVLGSMVTRLGMAQKKLAGLAEGRGGRRGPENVWGSAATGAVVAILIKLGLGSQSLLMIGFAASFAAKLADTFGSEIGKRWGRTTVLITTLRSVPAGTDGAISLEGTLASALGSLLMTFVMVSLSLLPFGFQAILVALIGLLATLMESLLGAIAQNKISWLSNELVNGLQTSFAAVFAIAIAAWLGLAA

SEQ ID NO: 9754 - protein, 369 aa, Proteus vulgaris
MKSRAAVAFAPGKPLEIVEIDVAPPKKGEVLIKNTHTGVCHTDAFTLSGNDPEGVFPVVLGHEGAGVVVEVGEGVTSVKPGDHVIPLYTAECGECEFCQSGKTNLCVSVRETQGKGLMPDGTTRFSYNGQPLYHYMGCSTFSEYTVVAEVSLAKINPEANHEHVCLLGCGVTTGIGAVHNTAKVQPGDSVAIFGLGAIGLAAVQGARQAKAGRIIAIDTNPAKFELARQFGATDCINPNDHDKPIKDVLLEINKWGIDHTFECIGNVNVMRAALESAHRGWGQSIVIGVAGAGQEISTRPFQLVTGRVWKGSAFGGVKGRTQLPAMVEDAMKGEIELEPFVTHTMTLDEINEAFDLMHEGKSIRTVIRY

SEQ ID NO: 9755 - protein, 214 aa, Brucella melitensis 16M
MPRIHAKLSSHVFQIFREETMSGKKILMLCGDFGEDYETMVPFQTLLTVGHTVHAVCPGKKAGDHIATAIHDFEGHQTYTEKPGHNFTLNATFADVKPENYDALVIPGGRGPEYLRLDEKVIAVVKHFFAANKPVAAVCHGAQLLAAARVLEGRTCSAYPACRPEVELAGGKYADIAIDQAVTDGNLVTSPAWPAHPAWLSQFLAVLGTKITHG

SEQ ID NO: 9756 - protein, 113 aa, Zea mays
LQKEQQKAMMNEMVGKLTSACWDKCITSAPGSKFSSGESTCLTNCAQRFLDMSVLIAKRFEMQQRVKVCLSLLKLDFVHLLLLNKISHGIPVSILVETILLDGCDFEHGLVVI

SEQ ID NO: 9757 - protein, 306 aa, Mycobacterium leprae
MLCLKMRRFWRTVVEVTSQNSQALAQASGAFTLGGDLKVNRLGFGAMRLTGKGVWGPPVDRYEAVRVLRRAVELGVNFIDTADSYGPYVSEEIIAEALHPYKGLVIATKAGLLRTGRDVWIPLGNPSYLRQELEMSLRRLNVDTIDLFQLHRIDPNFPLADQVGELFTLKNEGKIRHIGLSEINLDQLTAAQQITEIVSVQNMYNLSARAAEPLLDAVTSRGIGFIPWSPLAAGPLAAPDGPLQRIAVNHHATPSQLALAWLLKRSPVMLPIPGTSRVAHLEENVAAAEISLSDDEFEMLSAAGAQ

SEQ ID NO: 9758 - protein, 392 aa, Madagasikaria andersonii
DLEPVNPADVPVTAAGALKSYKLAAKAISRLQSLPSGNISLLCDVLVKEVRDLTGYDRVMVYKFHEDEHGEVVSECRRSDLESYLGLHYPATDIPQASRFLFMKNKVRMICDCVAPPVKVIQDERLPQPLSLCASTLRSPHGCHAQYMTNMGIVASLVMSVTVNEEDDMVDGDQPQMARKLWGLVVCHHTSTRFVPFPLRYACEFLIQVFGVQINKEVELAAQVREKHILQIQTMLCDMLLRDAPVAIITQSPNVMDLVKCDGAALYFKNKTWLLGVTPTEEQIRGIAEWLLEYHSGNTGLSTDSLMEAGYPGASALGDAVCGMAAVSINSRDFLLWFRSHTAKEIKWGGAKHDPGDKDDGRKMHPRSSFKAFLEVVKWRSMPWEDMEMDAI

SEQ ID NO: 9759 - protein, 73 aa, SINNINGIA BARBATA
  unsure (1)..(73): unsure at all Xaa locations
ISGTNGEVMPGQWEFQVGPSVGIEXGDHIWCARYLLEXITXQAGVVLSLXPXPXEGXWNGAECXTNXSTKSMR

SEQ ID NO: 9760 - protein, 438 aa, Petroselinum crispum
MASWVISECGLRPLPRIYARPRSGASCFNSKNPVKNLRFLDENVKISMTGSRNWGLRVSVPMSVPSVSEEEERFESLVEEENEFDPGAAPPFKLSDVRAAIPKHCWVKDPVRSMSYVLRDVLIVFGLAVAASFVNNWAVWPLYWIAQGTMFWALFVLGHDCGHGSFSNDAKLNSVVGHILHSSILVPYHGWRISHRTHHQNHGHVENDESWHPLSEKLFNSLDDLTRKFRFTLPFPMLAYPFYLWGRSPGKKGSHYDPSSDLFVPNERKDVITSTVCWTAMAALLVGLNFVMGPVKMLMLYGIPYWIFVMWLDFVTYLHHHGHDDKLPWYRGKEWSYLRGGLTTLDRDYGWINNIHHDIGTHVVHHLFPQIPHYHLIEATEAAKPVFGKYYREPKKSGPVPFHLLATLWKSFKKDHFVSDTGDVVYYQAHPEIAKTQK

SEQ ID NO: 9761 - protein, 188 aa, Zea mays
MVNLRTQKRLASAVIGCGERKIWLDPNEQSEISNANSRQTIRKLISDGLIIRKPVTQHSRSRARELNLARREGRHRGYGKRKGTADARMPSQVLWMRRLRVLRRLLVKYRASGKIDKHLYHELYHSSKGNAFKHKRALVEHIHRAKAEKARETALQEEMDAKRAKNKAARERKQERAAAKRNALLAEE

SEQ ID NO: 9762 - protein, 330 aa, Glycine max
MGWRGILGFEYGIVQAPLGPDISAPPLVAAVANAGALGLLRAPDWESPDYLRELIKTTRTLTDKPFGVGVVLAFPFEENLNVILEEKVAVLQVYWGDCTRELVNKAHSAGIKVVPQVGNIEGAKQAIEAGADGIIVQGLEAGGHVIGQDGLITLVPRVVDLVGDREIPVIAAGGIVDARGYVAALALGAQGVCLGTRFLATEESNAHPTYKRKLLELDETAYTDVFGRARWPGAPQRVLQTPFYKEWRSLPPHESEANKPVIGHSTINGVDKEIRRFAGTVPNKTTTGDLESMVMYAGQGVGLIKEILPAGEVVKRLVEGAQLIMQQNFK

SEQ ID NO: 9763 - protein, 220 aa, Pyrus communis
CDFEPVKPYEVPMTAAGALQSYKLAAKAIAAIARLQSLPSGSMERLCDTMVQEVSELTGYDRVMAYKFRDDDHGEVVSEITKPGLEPYLGLHYPSTDIPQASRFLFMKNKVRMIVDCCAKQVKVLQDEKVPFDLTLCGSTLRAPHSCHLQYMKNMDSIASLVMAVVVNEGDDEVASPDSVQPQKRKRLWGLVVCHNTSLRFVPFPLRYACEFLAQVFAIP

SEQ ID NO: 9764 - protein, 58 aa, Glycine max
GAPLQELTDLVKEVAPAARRRNAKLSFAFVFPDKTGRFKVQEVGKTLSYGNGRLDDDR

SEQ ID NO: 9765 - protein, 479 aa, Bacillus anthracis str. A2012
  unsure (1)..(479): unsure at all Xaa locations
ESEENMLPRNNTNNELKRTMKSRHLFMIALGGVIGTELFNGSGFIISQAGPGGSVLAFMAGGLLMYFVMLCLGELAVAMPVSGSFQEYATKFINPATGFTIGWLYWLSWANTTGLEFTTAGITMQRWFPDIPVWVWCLIFGVTIFMINALSARSYAETEFWFSSIKVSAIIAFIILGGAAMFGLIDLKGDEPAPLLSNFVNHGGLFPNGLAAILLTMVTVNYSFQGTELVGIAAGESEDPAKTLPRSIRNIIWRTMFFFVLAIFVLVALIPWEEAGLTKSPFVAVFDNISIPYAADIMNFVILTAVLSVANSGLYAATRMLWSLSKNEMAPAFLKKLSSRGIPLNALILTISISAFSLLTSVVAAETVYLWLISISGVITIIVWMSICVSQFFFRKHYVADGGRLEDLKFKTPLYPLVPILGFGLYGIILVSLIFIPDQRLGIYCTVPFIIFCYTYYHFKVKKRISTNTSSENKXSETI

SEQ ID NO: 9766 - protein, 152 aa, Zea mays; identical to SEQ ID NO: 1713

SEQ ID NO: 9767 - protein, 332 aa, Salmonella enterica subsp. enterica serovar Typhi
MIYQPDENRYHTMEYRRCGRSGVKLPAISLGLWHNFGDTTRVENSRALLQRAFDLGITHFDLANNYGPPPGSAECNFGRILQEDFLPWRDELVISTKAGYTMWDGPYGDWGSRKYLIASLDQSLKRMGLEYVDIFYHHRPDPETPLKETMKALDHLVRHGKALYVGISNYPADLARQAIDILEDLGTPCLIHQPKYSLFERWVEDGLLTLLQEKGVGSIAFSPLAGGQLTDRYLNGIPEDSRAASGSRFLKPEQITADKLEKVRRLNELAARRGQKLSQMALAWVLRNDNVTSVLIGASKPSQIEDAVGMLANRRFSAAECAEIDAILEGRF

SEQ ID NO: 9768 - protein, 307 aa, Antirrhinum majus
MEILAPSSYFSSSSWFLEESRSTTRWTAAENKAFENALAVFDENTPNRWERVAERVPGKTVGDVMRQYKELEDDVSSIEAGFVPVPGYSTSSPFTLEWGSGHGFDGFKQSYGTGGRKSSSGRPSEQERKKGVPWTEEEHKLFLMGLKKYGKGDWRNISRNFVITRTPTQVASHAQKYFIRQLSGGKDKRRASIHDITTVNLSDNQTPSPDNKKPPSSPDHSMAQQQTSSTSIHKLPFQWDQTSNETIMGFASSGHHGNMFQSNPFGMNSYGFKMQGQQMQRGGFCDTYLGSQNMAFQMQSGLHFPNA

SEQ ID NO: 9769 - protein, 343 aa, Streptomyces coelicolor A3(2)
MTFKAEYIWIDGTEPTAKLRSKTKIITAAPAGLDALPVWGFDGSSTNQAEGSSSDCVLKPVFSCPDPIRGGEDILVLCEVLDTDMTPHPSNTRAALAELSERFAAQEPVFGIEQEYTFFKGTRPLGFPEGGFPAAQGGYYCGVGSDEIFGRDVVEAHLENCLKAGLGISGINAEVMPGQWEFQVGPLAPLEVSDQLWVARWLLYRTAEDFEVSATLDPKPVKGDWNGAGAHTNFSTKAMREGYDAIITAAESLGEGSKPMDHVKNYGAGIDDRLTGLHETAPWNEYSYGVSDRGASVRIPWQVEKDGKGYIEDRRPNANVDPYVVTRLLVDTCCTALEKAGQV

SEQ ID NO: 9770 - protein, 176 aa, Sinorhizobium meliloti
MPLYALGPLRPQTPTEGSYWVAPDANIIGQVELGEDVGIWFGATLRGDNEPIRIGARTNIQEAVIIHVDPGHPVSIGEGCTIGHRAIVHGCTIGDNSLIGMGATILNGAKIGRNCLVGANALVTEGKEFPDNSLIVGAPAKMVRTLDDAAVEGLKRSAEHYVKNWQRYAAQFTLLD

SEQ ID NO: 9771 - protein, 518 aa, Oryza sativa (japonica cultivar-group)
MDASAGGGGNSLPTAGADGAKRRVCYFYDAEVGNYYYGQGHPMKPHRIRMTHALLAHYGLLDQMQVLKPHPARDRDLCRFHADDYVAFLRSVTPETQQDQIRALKRFNVGEDCPVFDGLYSFCQTYAGGSVGGAVKLNHGHDIAINWAGGLHHAKKCEASGFCYVNDIVLAILELLKYHQRVLYVDIDIHHGDGVEEAFYTTDRVMTVSFHKFGDYFPGTGDIRDIGHSKGKYYSLNVPLDDGIDDESYQSLFKPIMGKVMEVFRPGAVVLQCGADSLSGDRLGCFNLSIRGHAECVRFMRSFNVPLLLLGGGGYTIRNVARCWCYETGVALGHELTDKMPPNEYFEYFGPDYTLHVAPSNMENKNTRQQLDDIRSRLLDNLSKLRHAPSVQFQERPPEAELPEQDEDQEDPDERHHADSDVEMDDVKPLDDSGRRSSIQNVRVKRESAETDAADQDGNRVAAENTKGTEPAADGVGSSKQTVPTDASAMAIDEPGSLKVEPDNSNKLQDQPSVHQKT

SEQ ID NO: 9772 - protein, 339 aa, Oryza sativa (japonica cultivar-group)
MERYEVIKDIGSGNFGVAKLVRDVRTKELFAVKFIERGQKIDENVQREIMNHRSLRHPNIVRFKEVVLTPTHLAIVMEYAAGGELFERICSAGRFSEDEARFFFQQLISGVSYCHSMQICHRDLKLENTLLDGSIAPRLKICDFGYSKSSLLHSQPKSTVGTPAYIAPEVLARKEYDGKVADVWSCGVTLYVMLVGAYPFEDPDEPRNFRKTITRILSVQYMVPDYVRVSMECRHLLSRIFVANPEQRITIPEIKNHPWFLKNLPIEMTDEYQMSVQMNDINTPSQGLEEIMAIIQEARKPGDGSKFSGQIPGLGSMELDDVDTDDIDVEDSGDFVCAL

SEQ ID NO: 9773 - protein, 355 aa, Zea mays
LLFPAPPPSVLATPLSTACPAAPRRGQITSPPSACSRAGTKDGRTGHPWGTQKRSRYLVATMDHGGGGGSGIWIRAAVAVAAGAAIAARAVRRKSVDSSAVFVGVPAMVAHTVAGYRFAGLLLVFFFTSSRVTRVGEARKRALDPEFKEGGQRNWKQVLSNSGIASILVVLIASVTGGTDRCLDSKESTLVTALIGGVIGHYACCNGDTWSSELGILSKAEPRIITTFKRVRKGTNGGVTIDGLLAAAAAGFSIGLAFVLIGFFTTQCAPDVFWNQLLAIPLATAAGLCGSLIDSFLGATVQYSGFCSVRKKVVGVDGPTVTRISGMNILDNNGVNVVSVFLTTALTAVACTYIF

SEQ ID NO: 9774 - protein, 368 aa, Malus x domestica
MGKGGQSCNGVVRDAKPVEQENMAAWLVDVNTIKILPFKLPAIGPNDVRIRIKAVGICGSDIHYLKTMKCGDFQVKDPMVIGHECAGIVDKVGSEVKHLVPGDRVAVEPGISCARCQQCKGGRYNLCPDMKFFATPPVHGSLANQIVHPADLCFKLPENVSLEEGAMCEPLSVGVHACRRANVDPETTVLIIGAGPIGLVSVLAARAFGAPRIVIVDMDDKRLAMAKSLGADEAVKVSTKMEDLDDEVAEIKEAMISEVDVTFDCVGFNKTVSTGLNATRPGGKVCLVGMGHGVMTVPLTPAAAREVDVVGVFRYQKTWPLCLEFLRSGKIDVKPLITHRFGFTEKEVEEAFATSARGGNAIKVMFKL

SEQ ID NO: 9775 - protein, 370 aa, Pseudomonas syringae pv. syringae B728a
MIKSRAAVAFEAKKPLEIVEVDVAMPKAGEVLLRVVASGVCHTDAYTLSGADPEGIFPSILGHEGGAIVEAVGEGVTSVVVGDHVIPLYTPECRQCKFCRSGKTNLCQAIRATQGKGLMPDGTTRFSYKGEPIFHYMGTSTFSEYTVLPEISVAKIDKQAPLEKVCLLGCGVTTGIGAVLNTAKVKPGDTVAIFGLGGIGLSALIGAVKAKAARIIAIDINPAKFEIAKQLGATDCVNPKDFDRPIQEVIVDMTDGGVDFSFECIGNVQLMRAALESCHKGWGESVIIGVAGAGQEIATRPFQLVTGRVWRGSAFGGVRGRTELPSYVDMAQTGEIPLDTFITHTMGLEGINKAFDLMHEGKSIRTVIHF

SEQ ID NO: 9776 - protein, 503 aa, Yersinia pestis KIM
MFVPQPSNKPLSLMLAGLSVKKTAADSFMKCVVYSHQCVISATEGRMEQQLQNSSLKRGLKNRHIQLIALGGAIGTGLFLGIAQTINMAGPSVILGYAIGGFIAFLIMRQLGEMVVEEPVAGSFSHFAYKYWGDFAGFLSGWNYWAMFILVGMAELTAVGIYIQYWWPEIPTWVSAAVFFIIINAINLVNVRLYGETEFWFAIIKVAAIIGMIVFGAYLLASGSGGPAASVTNLWAQGGFMPHGFRGLIMAMAVIMFSFGGLEMVGITAAEAEDPRNSIPKATNQVVYRILIFYIGSLTVLLSLFPWNNVVEGGSPFVMIFDALDSPWVATALNVVVLTAALSVYNSGVYCNSRMLFGLASQGNAPKLLTKLNKRGVPIRSIALSALATSAGVVINYIMPGKAFELLMALVVSTLVINWVMICLAHLKFRKAKVKEGVVPRFKALWYPYGNYLCLVFLALILVIMYLTEGIRISVLMMPVWIALLWCGFVLTRRKCPKTVTSL

SEQ ID NO: 9777 - protein, 198 aa, Vitis vinifera
MARASVLVVLVVVSVLLYTSRVAESAAANSGSTSFIKAKCSATRYPALCVQSLSVYASTIQKSPKQLAHTALTVSLAKAQSAKAFVSKLGKIKGMKARELEAVQDCLEEMNDSIDRLSRSVQELEEAGKSKGQDFLWHMSNVDTWVSAALTDDNTCVDGFAGRALDGRVKASIRGWLVTVAQVTSNALALVNQFAAKN

SEQ ID NO: 9778 - protein, 130 aa, Zea mays
MALEWVVLGYAAAAEAIMVILLTMPGLDALRKGLIAVTRNLLKPFLSIIPFCLFLLMDIYWKYETRPSCDGDSCTPSEHLRHQKSIMKSQRNALLIASALVFYWILYSVTNLVVRIEQLNQRVERLRKRE

SEQ ID NO: 9779 - protein, 466 aa, Bifidobacterium longum NCC2705
MAAAGTPKDDTGLERKMESRHLTMISLGGVIGTGLFVSSGYAIHQAGPLGAILAYAAGSLLVYCVMVSLGELSVAMPYAGSFHMYAKRFIGPGTAFTIAILYWLNWAVALASEFTAAGLLMQRWFPHSPSWVWSAVFIVVVFALNIMSVRLYGEAEFWFASIKVFAIIAFIVIGLLAIFGAIPIAGHDSAPLLGNFVAGGWFPSGIAPIFSTLLTVVFAFSGTEVVGVAAGETKDPSRAIPKAVHTTVLRLAIFFIGSILVMAALIPWHQAGVDTSPFVLVFQSIGMPFAGDIMNFVVLTAVLSAANSGLYVCSRMVWSLAKERLIPERFARTNFRGVPVWAVLFSMAGSLLALLSSVIAASTVYLVLVAVSGLATLVVWFSVCVCHIRFRREWARDGHSADELGYRAPGFPVLPWLAIVMCIGALVLVVLDDTQRSTLYCMIPFVACCYAAYYALERQRKRENNA

SEQ ID NO: 9780 - protein, 245 aa, Paxistima canbyi
ALSIAGAVQSQKLAVRAISQLQSLPGGDIKLLCDTVVESVRDLTGYDRVMVYKFHEDEHGEVVAESKRPDLEPYIGLHYPATDIPQASRFLFKQNRVRTIVDCHASPVRVIQDDGLMQPLCLVGSTLRAPHGCHAQYMENMGSIASLAMAVIINGNDEEVIGGRNATRLWGLVVCHHTSARCIPFPLRYACEFLMQAFGLQLNMELQLAAQLSEKHVWKTRTLLCDMLLRDSPPAIVTQSPSIMD

SEQ ID NO: 9781 - protein, 460 aa, Triticum aestivum
FLRRRDRIAERLFNALLARPSCHGCTASTGSVPPATPAVAEDKGSVRRVPEKESKVDSSSLGAPGGGALGGGISEDEDSDSEDDERLRRAAASNYGHNYDDDNDVEEEQDAAAPAEEDHHAEDDDPEAEELEALTNEIDEESQIVGEVLRIKELLLHKQDHSDATLFDSLRRLQLMQLSVSTLKATEIGRAVNGLRKHSSQQIRHLALALIQDWKILVDEWVSTTVAARAGGPPRHGAPPAPENGQGSPPPPPLHAGAFFAPETAALQPPEFFDEMDEDGNLRHNNDARIGNKRENNGRRPVNHSTQRPQGSNLQAKPQGMLNKQSRPLSSDSGSMRPMKAATQQKPIGEMKYKQTQEHFGVERKPTMGHVDKSRLRAQPSSGVRLESARPKTQDGLESNVRLEAAKRRLQERYQEAENAKKQRTIQVMELGDIPKPKSNTRQPMVKSRNNIRSRVLGRR

SEQ ID NO: 9782 - protein, 699 aa, Saccharomyces cerevisiae
MTAQLQSESTSKIVLVTGGAGYIGSHTVVELIENGYDCVVADNLSNSTYDSVARLEVLTKHHIPFYEVDLCDRKGLEKVFKEYKIDSVIHFAGLKAVGESTQIPLRYYHNNILGTVVLLELMQQYNVSKFVFSSSATVYGDATRFPNMIPIPEECPLGPTNPYGHTKYAIENILNDLYNSDKKSWKFAILRYFNPIGAHPSGLIGEDPLGIPNNLLPYMAQVAVGRREKLYIFGDDYDSRDGTPIRDYIHVVDLAKGHIAALQYLEAYNENEGLCREWNLGSGKGSTVFEVYHAFCKASGIDLPYKVTGRRAGDVLNLTAKPDRAKRELKWQTELQVEDSCKDLWKWTTENPFGYQLRGVEARFSAEDMRYDARFVTIGAGTRFQATFANLGASIVDLKVNGQSVVLGYENEEGYLNPDSAYIGATIGRYANRISKGKFSLCNKDYQLTVNNGVNANHSSIGSFHRKRFLGPIIQNPSKDVFTAEYMLIDNEKDTEFPGDLLVTIQYTVNVAQKSLEMVYKGKLTAGEATPINLTNHSYFNLNKPYGDTIEGTEIMVRSKKSVDVDKNMIPTGNIVDREIATFNSTKPTVLGPKNPQFDCCFVVDENAKPSQINTLNNELTLIVKAFHPDSNITLEVLSTEPTYQFYTGDFLSAGYEARQGFAIEPGRYIDAINQENWKDCVTLKNGETYGSKIVYRFS

SEQ ID NO: 9783 - protein, 463 aa, Dioscorea elephantipes
SGKPFYAIMHRIDVGLVIDLEPVNPADVPVTAAAALKSYKLAAKAISRLQSLPSGNIPLLCDVLVKEVSELIGYDRVMAYKFHEDEHGEVIAECRRSDLEPYLGLHYPATDIPQASRFLFMKNKVRMICDCSAPPVKVIQDKRLPQPLSLGGSTLRAPHGCHAQYMANMGSIASLVMSVTINEDDDETGSGDQQQNGMKLWGLVGCHHTSPRFVPFPLRYACEFLLQVFGIQLNKEVELATQQREHILRTQLSCDMLLRDAPIGYLLNSPNVMDLVKCDGAALYYKNQFWLLEITPTEAQIRDIFAWLLEYHNSTTGLSTNSLTEAGYPGAVELGDAVCSMAATKITSKDFIFWFRSHTSKEIKWGGAKHDPGDRTDEGRKMHPRSSFKAFLEVVKRRSLPWEDVDMDAIHSLQLILRGSLQDEPVTDNSKTIVNATPDDAKQIQHMDELRIVTTEMVRLMET

SEQ ID NO: 9784 - protein, 113 aa, Zea luxurians
  unsure (1)..(113): unsure at all Xaa locations
MGRRACCAKEGVKRGAWTTKEDDALAAYVKAHGEGKWREVPXKAGLRRCGKSCRLRWLNYLRPNIRRGNISYDEEDLIIRLHKLLGNRWSLIAGRLPGRTDNEIKNYWNSTLV

SEQ ID NO: 9785 - protein, 394 aa, Schizosaccharomyces pombe
MKTHLLANKLYQKGLRRQNYLQICKLICHARTVLSDVSNVGKNNADEKDTKKAKRSFDESNLSTNEEADKPVESKFVKKLKVYSKNADPSVETLQKDRALMLMNHLSSNPLMAEEYAPEIFEYIRKLDLKCLPNPKYMDQQKELTWKMREILNEWLVEIHSNFCLMPETLYLAVNIIDRFLSRRSCSLSKFQLTGITALLIASKYEEVMCPSIQNFVYMTDGAFTVEDVCVAERYMLNVLNFDLSYPSPLNFLRKISQAEGYDAQTRTLGKYLTEIYLFDHDLLRYPMSKIAAAMYLSRRLLRRGPWTAKLVESSGGYEEHELKEIAYIMLHYHNKPLEHKAFFQKYSSKRFLKASIFVHQLVRQRYSVNRTDDDDLQSEPSSSLTNDGQRTLL

SEQ ID NO: 9786 - protein, 374 aa, Xylella fastidiosa Ann-1
MRIVGCRTLRSFEQAGWGSEDDICLLVLLCVVVFFCCCMGCFLILGSFREWSFMHYRRLGSTGLQLSVLSFGTWMTFGNQVARDEARNLVACAWDHGVNFFDGAETYAQGRAEQVLGDVIADLRLPRDGYCVSSKVFFGAVKEPRPTQCGLSRKHVHDACHAALKRLRVDYLDLFFCHRPDADTPIEETVRAMTTLIRQGKVLYWGTSEWSAAQIAEAIAIASREHLERPWVEQPQYNLLHRERVEREYVSLYAQGLGTTIWSPLASGLLTGKHNVGVVLGSRLVQPGYEWLQREVLGEGEARLVQARRFSEVAADLGQLPTQLAIAWCLRNPHVSTVILGASRVAQLKENLQALQVVAALDAAAWRCVEAAME

SEQ ID NO: 9787 - protein, 166 aa, Triticum aestivum
YPPATPPPPQQRRPSTRRNPAPEDDSGDDDPRREKKLRLVVGLHDGSAKGEKRRTATDGREEPSDSGPTTPLLDKKLLVFILDRLQKKDTYGVFSEPVDDEELPDYRDIVKHPMDFSTVRKKLDKGAYANLEQFEDDVFLITSNAMSYNSPDTVYYRQARSIQEVA

SEQ ID NO: 9788 - protein, 472 aa, Pseudomonas aeruginosa PAO1
MDGQHPHSGELKRGLKNRHIQLIALGGAIGTGLFLGSAGVLKSAGPSMILGYAIAGFIAFMIMRQLGEMIVEEPVAGSFSHFAHKYWGGFAGFLSGWNCWVLYILVGMSELTAVGKYIHYWWPEVPTWATAALFFVVVNAINLTNVKAFGEAEFWFAIIKVVAIIGMILLGCYLLFSGSGGPQASVSNLWAHGGFFPNGVSGLVMAMAIIMFSFGGLEMLGFTAAEADKPRTVIPKAINQVIYRILIFYIGALVVLLSLTPWDSLLQTLNASGDAYSGSPFVQIFSMIGSGTAAHLLNFVVLTAALSVYNSGTYCNGRMLLGLAEQGDAPRALARVDKRGVPVRALVVSALVTFLAVVVNYVIPHQALELLMSLVVAALVINWAMISMAHLKFRAQMDRQGTRTHFRAFWYPYGNYLCMAFVVFILGVMLLIPGIQVSVYAIPVWLLVMWACYRLKGAPRPMPGLRVKPVTE

SEQ ID NO: 9789 - protein, 424 aa, Methanosarcina acetivorans C2A
MVMDEAIENRRHKSFLNFQQKEKKMLYRKIPKNGDELSALGFGCMRLPIKEDGTIDEKRATSQLHYAIDHGVNYIDTAWMYHRGQSEPFLGRALADGYREKVKLATKLPSWIVESREDMDNLLNAQLEKLQTDHMDYYLLQGLVGETWDKLEAFGVVDFLDKAKSDGRIINAGFSFHGPTDDFKRIVDAYPWIFCQIQYNFMDEKNQAGTEGLVYAASKDLGIIVMEPLRGGNLANRVPTEVKEIWNEASVKHTPAEWALRWVWNHPEVTVVLSGMNEESHIEENLRTANEAFPNSFTEEELQLVKKVEQKYRQLVKIGCTGCRYCMPCPSGVNIPECFEIDNNLHMFGDADEARFTYAMRMGGIITNTEPEGLASQCIECGQCIEKCPQNLEIPDLLKTVAEELEGADFEQRIAMLRQAFMKR

SEQ ID NO: 9790 - protein, 452 aa, Sulfolobus tokodaii
MAEIREIRKIERERASIHSHISGLGLDEKGKAKFKADGLVGQTEAREAAGIVVQLIKQGKMAGKGVLFVGPPGTGKTALAVAIAKELGEDTPFTTMNASEVYSTELKKTEILTQAIRKSIGVRIKQRRIVYEGVVKDVKLKVARSRLNPYAVMPREAQIVLATKDEEKTLNVGDSIAEQLVQLNVKKGDVIWIDAQTGEVSKVGKAKGFEGAKTYDIETIRQVDIPTGPVKKEKETTITVTLHDLDLNVAARNISITALFSFFTEREINSEIRESVDKLVKDMINRGEAELVPGVLFIDDAHMLDIEAFSFLTKALEADLAPILILATNRGITKIRGTDIESPHGMPLDLLDRLLIIPTRPYTADEIREILKIRADEIDVHLEEKALETLTKLGVEYSLRYSVQLLEPSYVIAQRNGRNVIKEEDVLEASKLFSDFRRSVEYVKEYEKLLLK

SEQ ID NO: 9791 - protein, 222 aa, Medicago sativa
MAIHHHHHNHQQLQQHTSSLFDALYCDEEEKWEDDEGEVVDEGEQSDVTTTNYDILDSTSLLPLLLLEQNLFNEDEELNTLFSKEITQQETYYEDLKNVINFDSLSQPRREAVEWMLKVNAHYGFSALTATLAVNYLDRFLLSFHFQKEKPWMIQLVAVTCISLAAKVEETQVPLLLDLQVQDTKYVFEAKTIQRMELLILSTLKWKMHPVTTHSFLDPGNS

SEQ ID NO: 9792 - protein, 486 aa, Oryza sativa (japonica cultivar-group)
MANRRPVLVLLLMAAVWVAGVVVDARHDPAVAWVWRQSMVGGEGCGDKHSTATISGGGVGVGGGEGGGVGVGGGVGGGTGGGAAGGLGGGGGGGGGLGGSGGLGGGGMGGSGGFGGGGGGGVGGGVGAGFGSGGGVGAGGGLRGGGGVGAGGGGGFGGGAGGGGGIGAGGGFGGGAGAGGGVGGGGRFGGGGMGGGGGFGGGAGGGVGGGGELGGGGMGGGSGFGGGAGGGFGAGGGVGGGIGVGGGMGGGASGGIGGGAGGGMGGDIGGGAGGGVGGGGGGGMGGGGGFGGGGGVGGNTGRDFDGGKGNGLNGGDGASGGIGGGASGGFGGGAGIGEGVGNGFGVGAGAGTGLGSGFGWSGGAGGGFGTGGGSGFGGGLGGGGGIGGGLGVGGGTGGGSGANEGAGMGGGISSGAGAGGGLGVGGGGGAGGGIGASRGARGGSGAGGGAGMGGGVGARAGGGGEHKRGGGKHHGGSGSGVLGRFI

SEQ ID NO: 9793 - protein, 192 aa, Triticum aestivum
KRGRKPANGREEPLNHVEAERQRREKLNQRFYALRAVVPNVSKMDKASLLGDAISYINELRGKMTALESDKETLHSQIEALKKERDARPAAPSSGMHDNGARCHAVEIEAKILGLEAMIRVQCHKRNHPAAKLMTALRELDLDVYHASVSVVKDIMIQQVAVKSPPRRDSQDQLNAALYGRLAEPGTAMQIR

SEQ ID NO: 9794 - protein, 222 aa, Zea mays; identical to SEQ ID NO: 9178

SEQ ID NO: 9795 - protein, 452 aa, Glycine max
  unsure (1)..(452): unsure at all Xaa locations
MATWVLSECGLRXLPPVFPRPTRPIFXQKPSKFRFLSINKGVADLNLQPRGFTCYNSRERKWESGVSAPLKVATTEGEEEEGINGANGVVEEVPEFDPSAPPPFKLADIRASIPKHCWVKDPWKSMSYVVRDVIVVFGLAVAAAYLNNWVVWPLYWAAQGTMFWALFVLGHDCGHGSFSNNPKLNSVAGHLLHSSILVPYHGWRISHRTHHQNHGHVENDESWHPLPEKIFKSLDNVTRILRFTLPFPLLAYPIYLWSRSPGKTGSHFNPDSDLFVPSERKDVITSTVCWTAMAALLVGLGFVMGPVQLLKLYGIPYVIFVMWLDLVTYLHHHGHEDKLPWYRGEEWSYLRGGLTTIDRDYGWINNIHHDIGTHVIHHLFPQIPHYHLIEATEAAKPVLGLYYREPKKSSPLPIYLIGELLRSMKKDHFVSNTGDIVYYQTDPTLSSSSTSQ

SEQ ID NO: 9796 - protein, 312 aa, Hordeum vulgare subsp. spontaneum
MATAGKVIKCKAAVAWEAGKPLSMEEVEVAPPQAMEVRVKILYTALCHTDVYFWEAKGQTPVFPRILGHEAGGIVESVGEGVTELVPGDHVLPVFTGECKECAHCMSEESNLCDLLRINVDRGVMISDGQPRFTIDGKPIFHFLGTSTFSEYTVIHVGCVAKIDPEAPLDKVCLLSCGISTGLGATLNVAKPKKGMAVAIFGLGAVGLAAMEGARLSGASRIIGVDLNPAKHEQAKKFGCTDFVNPKDHTKPVQEVIVEMTDGGVDRAVECTGNADAMISAFECVHDGWGVAVLVGVAQKEAVFKTHPMNFL

SEQ ID NO: 9797 - protein, 583 aa, Alnus glutinosa
MEESKKSCFISDRVDYKGDPADRNTTGGWVPAALIVGIEVSERLSTMGIIVNLVTYLKGTMHQSSTTSSNSTSNVAGTSFLLCLLGGILADSFLGRYWTIAIFSVIHALGTCMLAISAALPELRPSECNLHHDFPLKCEEPSSFQMGILYTALYSMALGVGGIKSSVSGFGTEQFDQNDEKEMSEMAHFFNRFYLIISFGTLLAVTVLVYVQDQVGRSWGYGICSASMFLSIVAFLVGTKRYRYRECTGSPIIQILQVIVAAIRKRKAELPTDLSFLYDKASDKESTISHTDKYSCLDKGAIITGMDRGADGLTISNPWGLCTVTEVEEVKMLIRILPIMASTIIFWTIRAQLLSFSVQQAATMERTIENFPIPPASFNGFFVGSTIITLIMYDRLLPFLRQSSNGVQGFTNLQKIGIAIFLSILGMAAASFAEMKRLEVVRANRGSTSTSSTLPITAFYLLPQFVLVGIGDGFMYTGQLDFFITESPKGMKAISTGLFLTTNALGFFGSSILVTIITKVTGEEVGHGWLLSRINDSRLDFFYALLAVLGFINLVFYLVLASWYKPSPVEDAHQKINGKEEKV

SEQ ID NO: 9798 - protein, 147 aa, Triticum aestivum
MATSIARFSRRGVASSLIRRCFAAEAALATHTDPPKPKLTVSPSPSPDRVKWDYRGQRQIIPLGQWLPKVAVDAYVAPNAVLAGQVTVWDGSSVWNGAVLRGDLNKITLGFCSNVQERCVVHAAWSSPTGLPAETLIDRYVTVGAYS

SEQ ID NO: 9799 - protein, 545 aa, Oryza sativa
  unsure (1)..(545): unsure at all Xaa locations
VERLLHGVAAADKEPRPRRMSRYSPSASRRELVSRRHTSASAASLSSALEEEDVSSGDRLRSLVRRGELDEALRLVGSARRPDAGTCAALIKKLSASGRTAEARRVLXXACGPDVMAYNAMVAGYCGAGQLDAARRLVAEMPVEPDAYTYNTLIRGLCGRGRTANALAVLDEMLRRRCVPDVVTYTILLEATCKRSGYKQAMKLLDEMRDKGCTPDIVTYNVVVNGICQEGRVDDAIEFLKNLPSYGCEPNTVSYNIVLKGLCTAERWEDAEELMGEMGQKGCPPNVVTFNMLISFLCRKGLVEPALEVLEQIPKYGCTPNSLSYNPLLHAFCKQKKMDKAMAFLDLMVSRGCYPDIVSYNTLLTALCRSGEVDVAVELLHQLKDKGCAPVLISYNTVIDGLTKAGKTKEALELLNEMVSKGLQPDIITYSTIAAGLCREDRIEDAIRAFGKVQDMGIRPNTVLYNAIILGLCKRRLNTRAIDLFAYMIGNGCMPELTTYTILIEGLAYEGLIKEARDLLXNELCSRGVXLGKNLINKGTINCFD

SEQ ID NO: 9800 - protein, 1121 aa, Ceratodon purpureus
MSAPKKTYSSTTSAKSKHSVRVAQTTADAALEAVYEMSGDSGDSFDYSKSVGQSAESVPAGAVTAYLQRMQRGGLIQTFGCMVAVEEPNFCVIAYSENASEFLDLMPQAVPSMGEMDVLGIGTDIRTLFTPSSGAALEKAAATQDISLLNPITVHCRRSGKPLYAIAHRIDIGIVIDFEAVKMNDVSVSAAGALQSHKLAAKAITRLQALPGGDIGLLCDTVVEEVRELTGYDRVMAYKFHEDEHGEVVAEIRRMDLEPYLGLHYPATDIPQASRFLFMKNRVRVIADCCASPVKLIQDPDIKQPVSLAGSTLRAPHGCHAQYMGNMGSIASLVMAVIINDNEEDSRGAIQRGRKLWGLVVCHHTSPRTVPFPLRSACEFLMQVFGMQLNMEVELAAQLREKHILRTQTLLCDMLLRDAPIGIVSQTPNIMDLVKCDGAALYYGKRFWLLGTTPTENQIKDIAEWLLEYHKDSTGLSTDSLADRNYPGAHLLGDAVCGMAAAKITAKDFLFWFRSHTAKEVKWGGAKHDPAEKDDGRKMHPRSSFKAFLEVVKRRSLPWEDVEMDAIHSLQLILRGSFQDIDDSDTKTMIHARLNDLKLHGMDELSVVANEMVRLIETATAPILAVDSTGMINGWNAKIAHVTGLPVSEAMGRSLVKDLVLDESVVVVERLLYLASQGEEEQNVEIKLKTFGTQTEKEAVILIVNACSSRDVSDSVVGVCFVGQDVTGQKMFMDKFTRIQGDYKTIVKNPHPLIPPIFGGDEYGYCFEWNPAMEALTGWKHDELVGKLLVGEIFGMEMMCCRLKSQDSMTKFMISLNNAMDGTNTDKFSFSFCNREGKFVEALLSTNKRTNADGVITGVFCFLQIASSELQQALTVQRATEKVAIAKLKELAYIRQEIKNPLCGITFTRQLLEDTDLSDDQKQFLDTSAVCEQQLQKVLNDMDLESIEDGYLELDTAEFEMGTVMDAVISQGMTTSREKGLQIIRETPREISTMRLFGDQIRLQQVLSDFLINAIRFTPSSEGWVKIKVVPTRKRLGGNVHVMHLEFRVSHPGGGLPDELVLEMYDRGKGMTQEGLGLNMCRKLVRLMNGDVQYVRENAQCYFVVYVELPMAQRDDAASQM

SEQ ID NO: 9801 - protein, 380 aa, Candida boidinii
MSTVGKTITCKAAVAWKPGEDLSIETIEVAPPKAHEVRIKIEYTGVCHTDAYTLSGADAEGEFPVVFGHEGAGIVESVGEGVTSVKVGDSVICLYTPECRECKFCKSGKTNLCGKIRATQGKGLMPDGTSRFTCKGQPLLHYMGCSTFSQYTVVADISVVAVNPEAPKDRTCLLGCGITTGYRAATNTVKMNEGDNIAVFGVGCIGLSVIQGAVAKKAGKIIAIDINDGKTEWAEKFGATDFVNPTKLAEGETIVSKLIDMTDGGCDFTFDCTGTVQVMRNALEACHKGWGESVIIGVAAAGKEISTRPFQLVTGRVWRGCAFGGVKGRTQMPGIVEDYLSGTLKVDEFITHRHKLDDINKAFHDMHAGDCIRAVITMEE

SEQ ID NO: 9802 - protein, 877 aa, Streptococcus agalactiae NEM316
MKGQKIIALAGLVLSCHFALTACHTQEHKNSHHIKTKQVAKKKANKKKVSVKESHKKRKGVAGVDFPTDDGFLLTKDSKILSHPDSGIVVAHGNHSHFIFYSDLKGSKFSYLIPNANAKTNKKQAVRNFKAGAVAVNTLNDGYVFNPADIVSEDANGYVVRHGDHFHYIPKASLSQQKQVQASRAVSRLGNQNNSHYRVNSSKIAGLHHPTSDGFLFNGQGIKGTTPTGILVEHHNHLHFISFADLRKGGWGSIADRYQPQKKVDSKKQSPSSKKPRTENTLPKDIKDKLAYLARELHLDISRIRVLKTLNGEIGFEYPHDDHTHVIMAKDIDLSKPIPNPHHDDEDHHKGHHHDESDHKHEEHEHTKSNKLSDEDQKKLIYLAEKLGLNPNQIEVLTSEDGSIIFKYPHDDHSHTIASKDIEIGKPIPDGHHDHSHAKDKVGMATLKQIGFDDEIIQDILHADAPTPFPSNETNPEKMRQWLATVTKINIGQRTNPFQRFGLSLMPNIEVLGIGFTPINDMTPVLQFKKLKQLWMTNTGITDYSFLDKMPLLEGLDISQNGIKDLSFLTKYKQLSLIAAANNGITSLKPLAELPNLQFLVLSHNNISDLTPLSNLTKLQELHLDHNNVKNLSALSGKKDLKVLDLSNNKSADLSTLKTTSLETLLLNETNTSNLSFLKQNPKVSNLTINNAKLASLDGIEESDEIVKVEAEGNQIKSLVLKNKQGSLKFLNVTNNQLTSLEGVNNYTSLETLSVSKNKLESLDIKTPNKTVTNLDFSHNNVPTSQLKLNEKNIPEAVAKNFPAVVEGSMVGNGSLAEKAAMASKEDKQVSDNTNHQKNTEKSAQANADSKKENPKTHDEHHDHEETDHAHVGHHHH

SEQ ID NO: 9803 - protein, 445 aa, Sesbania rostrata
MASRPIVPQQPRGDAALGAGKQQKKNGAADGRNRKALGDIGNLVTVRGVEVKPNRPITRSFCAQLLANAQAAAAAENNKKQACPNVAGPPPVVEGVAVAKRVAPKPGQKKVTTKPKPEEVIEISPDEEVHKDNNKKKEGDANTKKKSHTYSSVLTARSKAACGLTNKPKEIIDIDAADTANELAAVEYIEDIYKFYKMVENESRPHDYMDSQPEINERMRAILVDWLIDVHSKFDLSLETLYLTINIVDRFLAVKTVPRRELQLVGISAMLMASKYEEIWPPEVNDFVCLSDRAYTHEQILFMEKIILGKLEWTLTVPTPFVFLVRFIKASVPDEALENMAHFLSELGMMHYATLMYCSSMVAASAVYAARCTLNKSPVWNETLKQHTGYSEEQLMDCARLLVSLHSTVGNGKLKVVYRKYSDPERGSVAVLPPAKNLLSEGKSL

SEQ ID NO: 9804 - protein, 174 aa, Pseudomonas syringae pv. syringae B728a
MKFRLGESRVQTDPQSWVAPNATLIGNVRLEAGASVWFNAVLRGDNELIHIGENSNVQDGTVMHTDMGSPLSIGKGVTIGHNAMLHGCSVDDYSLIGINAVILNGAKIGKYCIIGANSLIGENKVIPDGSLVMGTPGKVVRELTDMQKKMLEASAAHYVHNAQRYARDLVVQED

SEQ ID NO: 9805 - protein, 156 aa, Zea mays; identical to SEQ ID NO: 4434

SEQ ID NO: 9806 - protein, 320 aa, Streptomyces avermitilis MA-4680
MPYRRTGRSGLKLPALSLGLWHNFGPDRPVETQRQILRRAFDLGITHFDLANNYGPPPGAAESALGDALRADFAPYRDELVISTKAGHLMWPGPYGEWGSRKYLLSSLDQSLTRMGLDHVDIFYSHRPDPETPLEETMGALHSAVQQGKALYAGVSNYSPEQTREAARILGELGTPLLIHQPRYSMLDRRPEEGLLDTLDELQIGSIAYSPLEQGLLTGRYLDGIPEDSRAASDSPFLSADTVTEDLVRQLRALDDIAKSRGQTLAQLALAWVLRGGRVTSALIGASSARQVEDSVAATRTLDFDAEELARIEAIIKPRP

SEQ ID NO: 9807 - protein, 119 aa, Metrosideros excelsa
NKINRQVTFSKRRCGLLKKAHEISVLCDAEVALIVFSTKGKLFEYATDACMEKILERYERYSYAERQILTNNAETNGNWTLEHAKLKARMEILQKNQKNLMGEELDSLSLKELQNLEHQ

SEQ ID NO: 9808 - protein, 313 aa, Shewanella oneidensis MR-1
MAIQWYPGHMHKARKEIEEAMPQVDLVIEVLDARIPYSSENPMVSKLRGDKPCIKLLNKSDLADPEVTAQWIEYLEREQGVKATAITTLQPGMLKMLPDLCRKLVPSRDKTEKDIRTMIMGIPNVGKSTIINTLAGRVIAKTGNEPAVTKTQQRINLRNGIVLSDTPGILWPKVDNEASSYRLAVTGAIKDTAMEYEDVALFAAGYFLKAYPKEICERYNISELPKDDMALLEEIGRKRGALRPGGRIDLHKASELLLHEYRSGKIGLLSLETPAMAEIEKAEVERILAEKAAEKAAKLEAEKLKRSGKRHND

SEQ ID NO: 9809 - protein, 388 aa, Salmonella bongori
QNGKLNVPENPIIPFIEGDGIGVDVTPAMLKVVDAAVEKAYKGERKISWMEIYTGEKSTQVYGQDVWLPAETLDLIREYRVAIKGPLTTPVGGGIRSLNVALRQELDLYVCLRPVRYYQGTPSPVKHPELTDMVIFRENSEDIYAGIEWKADSADAEKVIKFLREEMGVKKIRFPEHCGIGIKPCSEEGTKRLVRAAIEYAITNDRDSVTLVHKGNIMKFTEGAFKDWGYQLARDEFGGELIDGGPWMKIKNPNTGKEIVVKDVIADAFLQQILLRPAEYDVIACMNLNGDYISDALAAQVGGIGIAPGANIGDECALFEATHGTAPKYAGQDKVNPGSIILSAEMMLRHMQWFEAADLIVKGMEGAIAAKTVTYDFERLMEGAKLLK

SEQ ID NO: 9810 - protein, 220 aa, Zea mays
YIGIVTIYGQLTSKTLCVFRRSTNLDSWTPDQLKMMAFGGNNRAHAFFKQHGWTDGGKVEAKYTSRAAELYRQMLTKEVAKSATTDNALPSSPVASEASKPPSDDFPEFKLPDVAAPPAENLNGKHEPKSPKAAPRSPKAATHSTFATSVKKPIGAKKVGGKTGGLGVRKLTTKPNESLYEQKPEEPKPAVPALAASTKKGGQALHSRFEYVENEPSGDR

SEQ ID NO: 9811 - protein, 185 aa, Glycine max
MASEVIEYRCFVGGLAWATDSDALEKAFSHYGEIVESKVIIDRETGRSRGFGFVTFASEQAMKDAIEGMNGQNLDGRSITVNEAQSRGRGGGGGGYGGGGGYGGGGYSRGGGGYGGGGRREGGGGGYNRNGGGGGYGGGGGYGGGGGHGGGGGYGGGGRDRGYGGDGGSRYSRGGGASDGGSWRN

SEQ ID NO: 9812 - protein, 172 aa, Talaromyces emersonii
PIPLDGGSKDGQEATPLATIAYSPDYIEATSYLRAVMAANEMSERALKLTQDVISMNPAHYTVWLYRAKILFALNKNLDDELTWLNKVSLTYLKNYQIWHHRQVIMSSREAFPTLPPKELDFLMEMFAQDAKNYHVWTYRHWLVRHFNLWDSEREIRDVETLIDADVRNNSA

SEQ ID NO: 9813 - protein, 206 aa, Pirellula sp.
MFREFRGRGKKMGLTGVSGWFTLRSQLSTTFGLVGLFWKRFPVKRARMREASCLVGDGLQGIRLVTNIYVGNLSFKATEEELRGAFEQYGEVSAVNIIMDRETGRSRGFAFVEMADAEGAKDAIENLNGHEIDGRSVTVNEARPREPRSGGGGGGGGYGGGGGGRGRGGGGGGYGGGGGNRGGGYGGGGGGYGGGGGGGYGGRGDR

SEQ ID NO: 9814 - protein, 293 aa, Thermosynechococcus elongatus BP-1
MLTPSALTIKACCSGSNSQVIIICPLSLKSMIRCCQYSRSAVLVDGILLLNPWWMGVLLNTLLGAIALLTRQKLLTPAGLFHAWLLGVLIWGTLSWQGYLIVMVYFLVGSAVTRLGMAEKEAAGIAEKRSGARGPENVWGSAFTGTVCALLLVLLPQWRQLFLVGFVASFSTKLSDTCASEVGKAYGQRTFLITTLQAVPRGTEGAVSLEGTLAGLVGATVIALLGWSLGLMGAITIPICILAAFFANVVESLVGATLQGRYPWLSNELVNGINTTVGAGLAMGAIALLRLGV

SEQ ID NO: 9815 - protein, 460 aa, Anthurium andraeanum
MGVLRAPMMVLLLLLALVAASSRGIVAERTEEEVRLLYEGWLVGNGKAYNLLGEKERRFEIFWDNLRYIDDHNRAENNHSYTLGLTRFADLTNEEYRSTYLGVKPGQVRPRRANRAPGRGRDLSANGDDLPQKVDWREKGAVAPIKDQGGCGSCWAFSTVAAVEGINQIVTGDLIVLSEQELVDCDTAYNEGCNGGLMDYAFQFIISNGGIDTEEDYPYKERDGLCDPNRKNAKVVSIDSYEDVLENDEHALKTAVAHQPVSVAIEGGGRSFQLYKSGIFDGRCGIDLDHGVVAVGYGTESGKDYWIVRNSWGKSWGEAGYIRMERNLPSSSSGKCGIAIEPSYPIKKGQNPPKPAPSPPSPVKPPTECDNYYSCPESTTCCCVYEYGKYCFAWGCCPLVNAVCCDDHSSCCPHDYPVCNVKQGICLASKNNPLGVKMLKRTPAKPHQAFSGAEGGRSSI

SEQ ID NO: 9816 - protein, 504 aa, Cucumis sativus
MDMNVPNYKLGKTLGIGSFGKVKIAEHALTGHKVAIKILNRRKIKNLDMEEKVRREIKILRLFMHPHIIRLYEVIETPSDIYVVMEYVKSGELFDYIVEKGRLQEDEARNFFQQIISGVEYCHRNMVVHRDLKPENLLLDSKCNVKIADFGLSNIMRDGHFLKTSCGSPNYAAPEVISGKLYAGPEVDVWSCGVILYALLCGTLPFDDENIPNLFKKIKGGIYTLPSHLSSGARELIPSMLVVDPMKRITIPEIRQHPWFQAHLPRYLAVPPPDTMQQAKKIDEDILQEVVKMGFDRNQLVESLRNRIQNEATVAYYLLLDNRFRVSSGYLGAEFQETMETGFNRMHPSDPTNPAVGHRLPGYMDYQGMGLRAQFPVERKWALGLQSRAHPREIMTEVLKALRELNVAWKKIGHYNMKCRWLPGIPGHHEGMINNPVHSNHYFGDKSTIIENDGVVKSPNVIKFEVQLYKTREEKYLLDLQRVQGPQFLFLDLCAAFLAQLRVL

SEQ ID NO: 9817 - protein, 398 aa, Zea mays; identical to SEQ ID NO: 1516

SEQ ID NO: 9818 - protein, 642 aa, Oryza sativa; identical to SEQ ID NO: 6026

SEQ ID NO: 9819 - protein, 380 aa, Glycine max
MVKDTKPLAYAANNGYQQKGSSFDFDPSAPPPFKIAEIRASIPKHCWVKNPWRSLSYVLRDVLVIAALVAAAIHFDNWLLWLIYCPIQGTMFWALFVLGHDCGHGSFSDSPLLNSLVGHILHSSILVPYHGWRISHRTHHQNHGHIEKDESWVPLTEKIYKNLDSMTRLIRFTVPFPLFVYPIYLFSRSPGKEGSHFNPYSNLFPPSERKGIAISTLCWATMFSLLIYLSFITSPLLVLKLYGIPYWIFVMWLDFVTYLHHHGHHQKLPWYRGKEWSYLRGGLTTVDRDYGWIYNIHHDIGTHVIHHLFPQIPHYHLVEATQAAKPVLGDYYREPERSAPLPFHLIKYLIQSMRQDHFVSDTGDVVYYQTDSLLLHSQRD

SEQ ID NO: 9820 - protein, 315 aa, Oryza sativa
  unsure (1)..(315): unsure at all Xaa locations
LNRTIVVQQTSQIFCANDVFHCVFXXAATTLTGLHFATTTLMTLVMKWLGHIQPSYLPLPELVKFVFFANLSIVGMNVSLMWNSVGFYQIAKLCIIPVLCILEILFDKVRYSRNTKLSIVLVLVGVAVCTVTDVSVNSKGLLAAVIAVWSTALQQHYVHHLQKKYSLGSFNLLGHTAPAQAASLLILGPFVDFWLTNRRVDTFNYTTIVTFFIVLSCTIAVGTNLSQFICIGRFTAVSFQVLGHMKTILVLTLGFLFFGKEGLNFHVVLGMMLAVIGMIWYGNASSKPGGKERQIYSVPSEKTQKSSQSELDQKV

SEQ ID NO: 9821 - protein, 143 aa, Pseudomonas synxantha
MIDTKKWVLITGGAGFIGSHLVDALLAGGYWVRVLDNLSTGKRSNLPLDNERVELLEGDVANAEEVARALVGVTAVVHLAAVASVQASVDDPVSTHQSNFVGTLNVCEGMRKAGVKRVVFASSAAVYGNNGEGASIDEQTVKP

SEQ ID NO: 9822 - protein, 198 aa, Zea mays
MAHDRRSVCATEGMNVKEECQRWFMEMKWKKVHRFVVYKIDERSRAVLVDKVGGPGEGYEELVAALPGDDCRYAVFDFDFVSVDTCQKSPPGNKGNRERLSRSDRRHSTAPLTSLTEGQRRLHHSDCSTTRQSESDRQSGLDKGATVNSAPPDPRARTRAKTRKTANSAPPDPRARTRAKTRKTANYRSARPEGSDSG

SEQ ID NO: 9823 - protein, 160 aa, Oryza sativa
  unsure (1)..(160): unsure at all Xaa locations
LLVDGHLRIFHWPDLNLLLGEPKAHKSFRDMDISLDSEFLVSTSTDGSARIWNINEGAPLVNLSRSSDEKIECCCFSRDGNKPFLFCTLVKGHNVVTVVLDISNWKRIGYKRLLEKHISTLSVSLDGKYLALXVHCFCLLLSHANTHPDYSNTVMXHLRA

SEQ ID NO: 9824 - protein, 345 aa, Saccharomyces cerevisiae
MEGVYFNIDNGFIEGVVRGYRNGLLSNNQYITLTQCDTLEDLKLQLSSTDYGNFLSSVSSESLTTSLIQEYASSKLYHEFNYIRDQSSGSTRKFMDYITYGYMIDNVALMITGTIHDRDKGEILQRCHPLGWFDTLPTLSVATDLESLYETVLVDTPLAPYFKNCFDTAEELDDMNIEIIRNKLYKAYLEDFYNFVTEEIPEPAKECMQTLLGFEADRRSINIALNSLQSSDIDPDLKSDLLPNIGKLYPLATFHLAQAQDFEGVRAALANVYEYRGFLETGNLEDHFYQLEMELCRDAFTQQFAISTVWAWMKSKEQEVRNITWIAECIAQNQRERINNYISVY

SEQ ID NO: 9825 - protein, 394 aa, Xylella fastidiosa Ann-1
MTKPIRNVAVLGATGSIGAAALDVLARHPRQFHVSLLAAGQRVDALLALCRTYRPDHAVIGDATLYTTLRDGLNAAGLATKAYAGEAALAELVASTTCDTVVAAIVGAAGLHSTLAAARAGKRLLLANKESLVLAGMLLMREASISGAEIIPIDSEHNAIFQCLRSRTTDGVHRVTLTASGGPFRGHNRTMLAKITPTQAMAHPTWSMGPKISVDSATLMNKGLEVIEAHHLFGLPSEQINVLVHPQSLVHSLVEFIDGSTLAQLSLPDMRTTLAVGLAWPERIGSGVQGLDLMKHNRLDFEHPDTETFSCLRLARDAMQTGGTAPAVLNAANEIAVSAFLQGRIGFLTIPALIEHALTTLPRYEADTLETLLTVDTETRRITHAALTHFPLPL

SEQ ID NO: 9826 - protein, 361 aa, Mycobacterium leprae
MSQTVRGVISRKKDEPVELVDIVIPDPGPGEAVVDVTACGVCHTDLTYREGGINDRYPFLLGHEAAGTVEVVGPGVTAVEPGDFVILNWRAVCGQCRACKRGRPSYCFDTFNAQQKMTLIDGTELTPALGIGAFADKTLVHSGQCTKVDPAADPAVAGLLGCGVMAGLGAAINTAAVSRDDTVAVIGCGGVGDAAISGAALVGANRIIAVDIDDTKLEWARTFGATHTVNALELEVVKTIQDLTSGFGVDVVIDTVGRPETWKQAFYARDLAGTVVLVGVPTPDMRLDMPLLDFFSHGGSLKSSWYGDCLPERDFPTLVDLYLQGRLPLGKFVSERIGLGDVEEAFHKIHGGKVLRSVVML

SEQ ID NO: 9827 - protein, 407 aa, Triticum aestivum
  unsure (1)..(407): unsure at all Xaa locations
VSSFGADQFDDTDPAERIQKGSFFNWFYFXINIGALISSSFLVWVQDNLGWGLGFGIPTVFMGLAIISFFAGTSLYRFQKPGGSPITRVCQVVAATLRKWNAPVPEDSSLLYELADGVSAIEGSRQLEHTDELRCLDKAATITDLDVKEDSFNNPWRVCTVTQVEELKILVRMFPVWATTIVFSAVYAQMSTMFVEQGMVLDPTIGSFKIPPASLSTFDVVSVIIWVPIYDSILVPIARRFTGKERGFSELQRMGIGLVISILAMSAAAVLEIKRLAIAREAHLVDQNVPVPLSILWQIPQYFLVGASEVFTFIGALEFFYDQSPDAMRSLCSALQLITTALGNYLSAFILTMVAYFTTRGGRPGWIPDNLNEGRLDYFFWLLAGLSFLNFLVYVLCANRFKSKKAA

SEQ ID NO: 9828 - protein, 360 aa, Amycolatopsis methanolica
PQTVRGVIARSKGAPVELTDIVIPDPGPSEVTALIATCAVCHTDLTYREGGINDEFPFLLGHEAAGTVESVGEGVDSVQPGDYVVLNWRAVCGQCRACKRGRPQYCFSTFNATQKMTLTDGTELTPALGIGAFADKTLVHAGQCTKVDPAADPAVAGLLGCGVMAGLGAAVNTGAVSRGDSVAVIGCGAVGDAVIAGARLAGANKIIAVDRDAKKLEWATELGATHTVNATETDVVEAVQALTGGFGADVVIDAVGRPETWKQAFYARDLAGTVVLVGVPTPDMRLEMPLLDFFSRGGALKSSWYGDCLPERDFPVLIDLHLQGRLPLDKFVTERISLDDVEKAFHTMHAGEVLRSVVVW

SEQ ID NO: 9829 - protein, 374 aa, Catha edulis
ASSIAGAVQSQKLAVRAISQLQSLPGGDIKLLCDTVVESVRDLTGYDRVMVYKFHEDEHGEVVAESKRPDLEPYIGLHYPASDIPQASRFLFKQNRVRMIVDCRASPVRVIQDDGLMRPLCLVGSTLRAPHGCHAQYMENMGSLASLAMAVIINGNDEEVTGGRNPTRLWGLVVCHHTSARCIPFPLRYACEFLMQAFGLQLNMELQLAAQSLEKHVLKTQTLLCDRFLRDPPTGIVTQSPSIMDLVKCDGAALYYQGNYYPLGVTPTEVQIKDIVEWLLAFHGDSTGLSTDSLADAGYPGAALLGDAVCGMAVAYITNKDFLFWFRSHTAKEIKWGGAKHHPEDKDDGQRMHPRSSFKAFLEVVKSRSLPWEN

SEQ ID NO: 9830 - protein, 486 aa, Triticum aestivum
MSTASADVGDAGDGASSAATAPAGRRIPPASSMPWVRNLRRFVGTGAGLGSEALMELETKRILLEIFKERQRKSAEAGSIPSFYKKKPEDGSISNRVQRLAKYRFLKKQSELLLNADDLDAMWVCLRENCVIDDATGAEKMNYEDFCHIATVCTEQIGQKCKRFFSPSNFMKFEKDDSGRIAILPFYLYVMRTVSLTQARIDMSELDEDSDGFLQPHEMEAYIRGLIPNLAQLRDMPSAFVQMYCRIAARKFFFFCDPHRRGKACIKKVLLSNCLQELMELHQESEEEVTDTEQAENWFSLTSAQRICDMFLALDKDTNGTLSKQELKEYADGTLTEIFVERVFDEHVRRSKVGGGNSREMDFESFLDFVLALENKDTPEGLTYLFRCLDLNGRGFLTTADIHTLFRDVHQKWIEGGNYELCIEDVRDEIWDMVKPADPLRIALADLLSCKQGGTIASMLIDVRGFWAHDNRENLLQEEEEQVEEA

SEQ ID NO: 9831 - protein, 183 aa, Glycine max
  unsure (1)..(183): unsure at all Xaa locations
MDLPFLDHYYQSPFFAFPLNIHSIVLGFASWCLNKFINGQTXHPSFGGNGATMFFLTFSILAAVLGIVSKLLGANHMRTWRSDSLASAGATSIVAWAVTALAFGLACKQINIGGHRGWGLRVVEAFIIILTLTQLLYLILIHAGLYSSRYGPGYRDTDYGNAHGVGGTTGDPMHKSAAAGTRV

SEQ ID NO: 9832 - protein, 314 aa, Picea abies
YLGLHYPATDIPQASRFLFMKNRVRMICDCCAPPVNVIQDKRLRQPLSLCGSTLRAPHGCHAQYMANMGSIASLVMSVTTNENGDDSEGGGQQQPQNRRKLWGLVVCHHTSPRVIPFPLRYACEFLMQVFGIQLNKEVELAAQLREKHILRVQPVLCDMLLRDAPVGIVSQTPNIMDLVKCDGAALLYGKRLWLLGTTPTEAQKLDIADWLLEHHRDSTGLSTDSLAEAGYPGAASPGDAVCGIAAARITSKDFLFWFRSHTAKEIIWGGAKHDPNDKDDGRRMHPRSSFKAFLEVVKRRSLPWEDVEMDAIHS

SEQ ID NO: 9833 - protein, 1123 aa, Solanum tuberosum
MSSSRPSQSSTTSSRSKHSARIIAQTSIDAKLHADFEESGDSFDYSSSVRVTNVAEGEQRPKSDKVTTAYLHQIQKGKFIQPFGCLLALDEKTLKVIAFSENAPEMLTMVSHAVPSVGEHPVLGIGIDIRTIFTGPSGAALQKALGFGEVSLLNPVLVHCKNSGKPFYAIVHRVTGSLIIDFEPVKPYEVPMTAAGALQSYKLAAKAITRLQSLPSGSMERLCDTMVQEVFELTGYDRVMGYKFHDDDHGEVVSEITKPGLEPYLGLHYPATDIPQAARFLFMKNKVRMICDCRAKHVKVVQDEKLPFDLTLCGSTLRAPHYCHLQYMENMNSIASLVMAVVVNDGDEEGESSDSSQSQKRKRLWGLVVSHNTTPRFAPFPLRYACEFLAQVFAILVNKELELENQFLEKNILRTQTLLCDMLMRDAPLGIVSQSPNIMDLIKCDGAALLYKNKIHRLGMNPSDFQLHDIVSWLCEYHTDSTGLSTDSLYDAGFPGALALGDAVCGMAAVRISDKDWLFWYRSHTAAEVRWGGAKHEPGEKDDGRKMHPRSSFKGFLEVVKTRSIPWKDYEMDRIHSLQLILRNAFKDADAVNSNTISIHTKLNDLKIDGMQELEAVTAEMVRLIETASVPIFAVDVDGQVNGWNTKVAELTGLPVDEAIGKHLLTLVEDSSVDTVNKMLELALQGQEERNVEFEIKTHGPSRDSSPISLIVNACASKDVRDSVVGVCFIAQDITGQKSIMDKFTRIEGDYRAIIQNPHPLIPPIFGTDQFGWCSEWNSAMTMLTGWRRDDVMDKMLLGEVFGTQAACCRLKNQEAFVNFGVILNNAITGQESEKIPFGFFARYGKYVECLLCVSKRLDKEGAVTGLFCFLQLASHELQQALHVQRLSEQTALKRLKVLAYIRRQIRNPLSGIIFSRKMLEGTSLGEEQKNILHTSAQCQRQLDKILDDTDLDSIIEGYLDLEMLEFKLHEVLVASISQVMMKSNGKNIMISNDMVEDLLNETLYGDSPRLQQVLANFLLVSVNSTPSGGKLSISGKLTKDRIGESVQLALLEFRIRHTGGGVPEELLSQMFGSEADASEEGISLLVSRKLVKLMNGEVQYLREAGRSTFIISVELAVATKSS

SEQ ID NO: 9834 - protein, 320 aa, Streptomyces viridochromogenes
MAALAYITALNQALHDEMARDDRVCVFGEDVRIGLTQVAKGLHERFGDGRVVDTPLSEQAFTSLATGAAMAGQRPVVEYQIPSLLYLVFEQIANQAHKFSLMTGGQVEVPVTYLVPGSGSRSGMAGQHSDHPYSLFAHVGIKTVLPATASDAYGLLLSAVRDPDPVAVFAPSALMGTVEEVSGELGPVPLGSARIHRTGEDVTVVATGQCVHVALAVAEAMADEASIEVVDPRTIYPVDWETIRASAEKTGRLVVIDDANRMCGFGGEVLATAAEQFDLTARPRRVTRPDGAVIPYALVLDQALLPDAAQLTDAIRAVLK

SEQ ID NO: 9835 - protein, 228 aa, Gossypium pilosum
  unsure (1)..(228): unsure at all Xaa locations
FTSLCHTDVYFWEAKGQTPLFPRIFGHEAGGIVESVGEGVTHLKPGDHVLPVFTGECGNCRHCKSKESNMCDLLRINTDRGVMLSDGKTRFSINGKPIYHFVGTSTFSEYTVAHVGSVAKINPAAPLDKVCILSCGISTGLGATLNVAKPAXGSTVAIFGLGAVGLAAAEGARIAGASRIIGVDLNPNRFEEAKKFGCTEFVNPKDHNKPVQEVLAEMTNGGVDRSVE

SEQ ID NO: 9836 - protein, 263 aa, Vicia faba
AHIITAVIGSGVLSLAWAIAQMGWVAGPAVLLAFSLITYFTSTLLADSYRSPDPVHGKRNYTYSEVVRSVLGGRKFQLCGLAQYINLVGVTIGYTITASISMVAVKRSNCYHKHGHEAKCYTSNNPFMIVFACIQIVLSQIPNFHKLSWLSILAAVMSFAYSAIGLGLSVAKVVGGGPAVRTSLTGVQVGVDVTGTEKVWRMFQAIGDIAFAYTYSNVLIEIQDTLKSSPPENQVMKRASLIGVLTTSMFYMLCGCLGYAAFG

SEQ ID NO: 9837 - protein, 364 aa, Buchnera aphidicola (Uroleucon erigeronensis)
MKKKYRIAVLPGDGIGPEVMQEAYKILNILKDHFLLPLEMKEFNIGGIAIDQEGIALPKNTLLGCENSDAILFGSVGGKKWDYLSIDKRPERAALLPLRKHFNLFSNLRPAKLYADLKYLSPLRSNIIKDGFDILCVRELTGGIYFGKPNGHSKKNDIEYAFDTEVYYDYEISRIAHLAFQLARNRKKKVCSLDKSNVLKSSILWKEIVEKISKNYPDVHLSHLYIDNAIMQIIKDPSQFDVILCSNLFGDIVSDECAAITGSIGMLPSASLNEKNFGLYEPAGGSAPDIAGKNIANPIAQILSVSMLVRHGMNLKKIADKIDESVVSVLKQGYRTADISNNSHNYLKTSEMGDIIANFLINGK

SEQ ID NO: 9838 - protein, 1128 aa, Oryza sativa; identical to SEQ ID NO: 1814

SEQ ID NO: 9839 - protein, 214 aa, Zea mays
  unsure (1)..(214): unsure at all Xaa locations
MAPPSRPVAVLAWGSGEDGQLGMGRCDEKDWARCIGALDAYAVSAVVAGSRNSLAICNDGSLFTWGWNQRGTLGHPPETKTESSPAHVDALIGVKIVQAAIGGWHCLAVDDKGRAYAWGGNEYGQCGEEPERKEDGTRALRRDIPIPQRCALKLKVRQVAAGGTHSVVLTQEGHVWTCGPPWPPGDIKKISTPVRXKGLEQVSLIAVGAFPPLA

SEQ ID NO: 9840 - protein, 411 aa, Neurospora crassa
MAEPIRNKRADPPIAPLRFSTPQNTPLNTAPISSHAQQPGVASIKEEDLDRAAAASIFAKDPRLVSLIQGRLGSLVGRSSGYIESLPTDVKRRVAGLKGIQKEHSKLEAEFQEEVLQLEKKYFAKFTPLYQQRAAIVNGQTEPTEDQVQAGEEDEEEEDEETEAAPQEEKATESAEKVSGIPEFWLSAMKNQISLAEMITDRDEEALKSLTDIRMEYLDKPGFRLIFEFAENEYFTNKTITKTYYYQNESGYGGDFIYDHAEGDKINWKEDKDLTVRVEQKKQRNKTTKQTRIVKKTVPTESFFNFFSPPKAPTDDDESTTSDIEERLELDYQLGEDIKEKLIPRAIDWFTGEALAFEELDEEDFEDAEFDDEDDEDDEDASEDQDDEDESDEDDEDGSKPKQEAAECKQS

SEQ ID NO: 9841 - protein, 453 aa, Nostoc sp. PCC 7120
MTVTQNLPNGPRIPRLLRLFKFITQPIQYVEDFAKVYGDNFTIWGSGESYFVYFSHPQALEQIFTNVSCFESSGGGSPLLELLLGKNSLILLEGDRHQRQRQLLTPPFHGERMRAYGQTIREITQQVTQAWQMGKPFNIRASMQEITMRVILRVVFGVDEGELFQELRQLLTTLLDFMGSPLMSSTFFFSFTQKDYGAWSPWGRMVRLIKKIDQLIYALIAQRRAEFGENRQDILSLLISARYDDGQPMSDVELRDELMTMLVAGHETTASALTWAFYWIDSVPEVREKLFQELDTLNDDSEPSIIAKLPYLTAVCQETLRFYPIVLNAFFRRTKNPMEIMGYKLPKATLVVPSIYLAHHREEVYPQSKQFRPERFLEKQFSPYEYLPFGGGNRRCIGLAFAQYEMKIVLATILSQFQVSRLSKRPVQPVRRGLTLAAPGGMKMVANKRMRNS

SEQ ID NO: 9842 - protein, 363 aa, Olimarabidopsis pumila
IRCKAAVAWEAGKPLVMEEVEVAPPQNHEVRIKILFTSLCHTDVYFWEAKGQTPLFPRIFGHEAGGIVESVGEGVTDLQPGDHVLPIFTGECGDCRHCHSGESNMCDLLRINTERGGMIHDGESRFSINGKPIHHFLGTSTFSEYTVVQSGQVAKINPDAPLDKVCIVSCGLSTGLGATLNVAKPKKGQSIAIFGLGAVGLAAAEGARIAGASRIIGVDLNSKRFDQAKEFGVTEFVNPRDHDKPVQQVIAEMTDGGVDRSVECTGSVQAMIQAFECVHDGWGVAVLVGVPSKDDAFKTHPMNLLNERTLKGTFFGNYKPKTDIPGVVEKYMNKELELEKFITHTVPFSEINKAFDYMLKGES

SEQ ID NO: 9843 - protein, 403 aa, Glycine max
HASAHASVRLREDDRRAVHGKRNYTYSDVVRSVLGGRKFQLCGLAQYINLVGVTIGYTITASISMVAVKRSNCFHKHGHHVKCYTSNNPFMILFACIQIVLSQIPNFHKLWWLSIVAAVMSFAYSSIGLGLSVAKVAGGGEPVRTTLTGVQVGVDVTGSEKVWRTFQAIGDIAFAYAYSNVLIEIQDTLKSSPPENKVMKRASLIGILTTTLFYVLCGCLGYAAFGNDAPGNFLTGFGFYEPFWLIDFANICIAVHLVGAYQVFCQPIFGFVENWGKERWPNSQFVNGEHALNFPLCGTFPVNFFRVVWRTTYVIITALIAMMFPFFNDFLGLIGSLSFWPLTVYFPIEMYIKQSKMQRFSFTWTWLKILSWACLIVSIISAAGSIQGLAQDLKKYQPFKAQQ

SEQ ID NO: 9844 - protein, 157 aa, Zea mays; identical to SEQ ID NO: 642

SEQ ID NO: 9845 - protein, 429 aa, Burkholderia fungorum
MTMKNAELKSRKDAATPRGVGVMCDFYAERAENAELWDIEGRRFIDFAAGIAVCNTGHRHPKIVAAIRDQLDHFTHTAYQIVPYASYVELAEKLNERAPGDYPKKTAFFTTGAEAVENAIKIARAATGRPGVIAFTGAFHGRTLMGMALTGKVAPYKIGFGPFPSDVFHAPFPNPLHGVTTADSLKAIEFLFKADIDPKRVAAIIFEPVQGEGGFYPAPAEFVRALRKLCNEHGILLIADEVQTGFARTGKLFAMNHYDVVPDLMTVAKSLAGGMPLSGVIGRADVMDAAAPGGLGGTYAGNPLAVAAAHAVLDIIDEEKLCERATLLGDRIKAKLIALQSDVPQIADVRGPGGMVAVEFCKAGTTEPDAEFTKRVQSRALERGLLLLVCGVYSNVVRFLFPLTIQEAVFDEALAILEDVIKDSVAITV

SEQ ID NO: 9846 - protein, 187 aa, Glycine max
  unsure (1)..(187): unsure at all Xaa locations
MEVRTNEVAKQRIEDEGYRAHNNPFGLNLFLFSSFCQPYMASLATVQDERCVQRSYWIEHTTDLSVESMMLDSNASDLDKEERPEVLSLLPAYEGKSVVELGAGIGRFTGELAKKAGQLLAVDFIESAIKKNESINGHHKNVKFMCADVTSXTCIFLKXSVDLXVSXWLLMYLSDKEVENLAXRMIK

SEQ ID NO: 9847 - protein, 302 aa, Sorghum bicolor
MASAAVPAATGGLKEDIAGLYDESSGVWERICGEHLHHGFYEPAGDATAVRPDVRRAQIRTIDEALAFAAVPDDLEKRPKTIVDVGCGIGGSSRYLARKYGAQCTGITLSPVQAERGNALTAAQGLSDQVSLQVADALEQPFPDGMFDLVWSMESGEHMPDKRKFVSELARVAAPGGTIIIVTCCHRNLNPSETSLKPDEQRLLKRISDAYCLADWFLPSDYVSIAKSLSLEDIRTADWSENVVPFWPAVIKLSLSWKGLTSALTCGWKTINGAMGILLLIQGYRKGLIKFTVITCRKPGPP

SEQ ID NO: 9848 - protein, 392 aa, Dinemandra ericoides
DLEPVNPADVPVTAAGALKSYKLAAKAISRLQSLPSGNIPLLCDVLVKEVRDLTGYDRVMVYKFHEDEHGEVVSECRRSDMESYLGLHYPATDIPQASRFLFMKNKVRMICDCLSPPVEVIQDERLPQPLSLCGSTLRSPHGCHAQYMANMGTIASLVMSVTVNEDDDMMDGDQQRMARKLWGLVVCHHTSPRFVPFPLRNACEFLIQVFGVQINKEVDLAAQVREKHILRIQTMLCDMLLRDAPVAIITQSPNVMDLVKCDGAALYYKNKFWLLGVTPTEAQIRDIAEWLPEYHRGNTGLSTDSLMEAGYPGASVLGDAVCGMAAVSITSRDFLFWFRSHTAKEIKWGGAKHDPGDKDDGRKMHPRSSFKAFLEVVKWRSLPWEDIEMDAI

SEQ ID NO: 9849 - protein, 347 aa, Staphylococcus epidermidis ATCC 12228
MSYKIVALPGDGIGPEILSGTLELLKLISEKYHFEYHLESHHFGGVSIDYYGTPLTNETLQSCKNADAILLGAIGGPKWTDPNNRPEHGLLKLRKSLNLFANIRPTFVTKGASHLSPLKQDIVEGTDLVIVRELTSGIYFGEPSYVKKTEALDSLKYSSQEIERIVRIAFNLANRRRKKLTSVDKENVLSSSKLWRQIVNDVKKDYPEVEVNHMLVDACSMHLITQPTQFDVIVTENLFGDILSDEASVIPGSLGLSPSASFGQTGTRLYEPIHGSAPDIANEDKANPFGMVLSLALCLRESLNQNDAANELESIVYSFIQSNKTTADLGGQYRTSKIFKLLKEKYL

SEQ ID NO: 9850 - protein, 797 aa, Streptomyces coelicolor A3(2)
MTADVAVETTPEIPLWNDPNHPVATRVDALVAAMTLEEKIAQLYGVWVGASDQGGEVAPHQHDMEEAVDLDALVPAGLGQLTRPFGTVPVDPALGALSLMRTQARITSAGRFGIPAVAHEECLAGFAAWGATAYPVPLSWGATFDPDAVRRMAAAIGRDMRSVGIHQGLAPVLDVVRDARWGRVEETIGEDPYLVGTIGTAYVQGLESAGIVATLKHFVGYSASRAGRNLAPSSVGTRERADVLLPPFEMAVREGGSRSVMSAYTDIDGVPAAADEALLTGLLRDTWGFEGTVVADYFGIAFLKTLHGITADWADAAGAALKAGLDVELPTVKTFGTPLVDAVTDGRVPEALIDRALRRVLGQKAELGLLDPDWSPVPPALDGVDLSHPEALRGRIDLDRPENRELAREIAEKAVVLLTNDGTLPLARPRRIALIGPNAAEATAVLGCYSFPRHVGVQHPEVPVGLDLPTLYDTLTAEFPDADITLARGTGVDDGEVSGIGEAVDAARAADVVVAVLGDRAGLFGRGTSGEGCDAESLTLPGAQQRLLDALLDSGTPVVTVLLAGRPYALGRAIAESAAIVQSFFPGEEGTAALAGVLSGRTSPTGRLPVSVPGSAGAQPTTYLGARLAQASEVSNIDPTPAFGFGHGLTYTTFAWSDLVAHTKEAPTDGAFSLELTVRNTGERHGTEVVQLYLHDPVASVVQPVQRLIGYTRVPLAPGEARRVRVEVPADLASFTGRDGRRIVEPGDLELRFAASSTEPRLTATVALTGPERRVDHTRRLHAVFAQETVEGAVEGA

SEQ ID NO: 9851 - protein, 391 aa, Zea mays
MATPLRATAVLAWGSGEDGQLGMGGNEEKDWPHFVEALGPYAVAAVVAGSRNSLAICDDGRLFTWGWNQRGTLGHPPETKTESSPGPVDALAGFKIVQAAIGGWHCLAVDDKGRAYAWGGNEYGQCGEEPERKEDGTRALRRDIPIPQRCALKLKVRQVAAGGTHSVVLTQEGHVWTWGQPWPPGDIKQISTPVRVQGLEKVRVIAVGAFHNLALTEDVILWAWGNNEYGQLGTGDTQPRSHPIRVEGLSDLSLVDIAAGGWHSTALTIQGEVYAWGRGEHGRLGFGDDKSSRMVPLKVELLAGEDIVQVSCGGTHSVALTRDGRMFSYGRGDHGRLGYGRKLTTGQPMGVDIDLPPPKTRSSRDGQWQAKYVACGGRHTLAIVVWAETTD

SEQ ID NO: 9852 - protein, 114 aa, Chloroflexus aurantiacus
MTALINQRGGSGTGMYVKLFVGNLAWSVDDATLEAFFQDYGDVRSARVINDRETGRSRGFGFVEMEVADVATVISQTNGRPINGREIRVNEAEDKGSRGPRSGGDRGGFGGRRY

SEQ ID NO: 9853 - protein, 350 aa, Acinetobacter calcoaceticus
MSYQVTIEPAGTIIQVEEDQTILDAALRQGVWLPFACGHGTCGTCKVQVTDGFYDVGEASPFALMDIEREENKVLACCCKPESDMVIEADVDEDEDFLGYLVQDYQAKVIEITDLSPTIKGVRLQLDRPMQFQAGQYINIQLPNIEGTRAFSIANTPSDKNLIELHIRKVQGGAATRYVHDELSVGEEMALSGPYGQFFVRKSDQQNVIFIAGGSGLSSLQSMILDLLEHGDTRIIYLFQGARDVAELYNREKFEQLVKEYPNFRYIPALNAPKPEDQWTGFTGYVHEAVANYFENKCSGHKAYLCGPPPMIDAAISTLMQSRLFEKDIHTERFLSAADGANGQSRFGTF

SEQ ID NO: 9854 - protein, 459 aa, Glycine max
MCISEGRNDGLQGFSNNVLNSQYLKAAQELLDEIVNVRKALKQTGLEKQQSFRDIGLDGSKDSDGKSTSQSVQISSGPNGSAANSSCELSPAERQNLLDKKTKLLSMLDEVDKRYRQYCHQMQIVVSSFDMVAGCGAAEPYTALALRTISRHFRCLRDAISGQIQVTQRNLGEQEGIPRLRYVDQQLRQQKALQQLGVMRQAWRPQRGLPETSVSVLRAWLFEHFLHPYPKDSEKIMLARQTGLTRNQVANWFINARVRLWKPMVEEMYKEEFGDSEMSSNLLSSEKTLKAPRDDVQASDNKREESQDNLINVDDSVQHHGLKLDHASELDRGIQSSDHGENAMDPRIGKLQGDQRFNMNNSNNNSPYYGDGCIMASTPATYDLPELGNIAVDGHVSLALELRNCESQGFGVSNDDMHKRHKKTLASSPETDLLDYHFTDPGKQQNKFGNPHLLHEFVV

SEQ ID NO: 9855 - protein, 192 aa, Clostridium thermocellum ATCC 27405
MVTGGAGYIGSHTVAELVEKKEEVIVVDNLEKGHRDAVAGAKLIVGDLRDKEFVKKVFLENDIEAVIHFAAYIEVGESVQNPLKYYNNNVIATLNLLTAMEEAKVDKIVFSSTAATYGEPENIPILETDRTLPTNPYGETKLAVEKALKWCDRAYGIKYIALRYFNASGAHESVEIGEDHSPESHLIPLVIQ

SEQ ID NO: 9856 - protein, 455 aa, Zea mays; identical to SEQ ID NO: 5124

SEQ ID NO: 9857 - protein, 126 aa, Triticum aestivum
  unsure (1)..(126): unsure at all Xaa locations
YVXYILDNTCTKLPVGQXKFASVVDLKGWGYANCDIRAKLAALEIMQNYYPERLGRVXLIHVPYVFMAAWXMXYPFIDDNTKXKFXFVADKDLDGTLRDAIDLSQLPEQYGGKLRLEGYKSWSTTL

SEQ ID NO: 9858 - protein, 116 aa, Zea mays
  unsure (1)..(116): unsure at all Xaa locations
MIRGDGGLGASVAWARDAWWVVSPRGMPGGGFPRGWHXGGFPGGGMPGGFPGGVPGNVDMSKILNDPDLMAAFSDPEVMAALQDVMNNPANFAKHQANPKVGPIIAKMMAKFNGSQ

SEQ ID NO: 9859 - protein, 392 aa, Neurospora crassa
MDTPYATEISIAIPTIQLAARISKHVLASANKGTIEKAEDLSPVTVADFAIQAYLTKVLSSSFPTDSFVGEESAAALRDNPDLLQRVYDVIHECVDEVSSSSNDKNESHAVMAEVVKRGAPESKDQVCELVDRCGDGGKDGLGADSGRTWVFDPIDGTKTFVCGEQYAINVALLEGGKQILSVVACPLLSRKATAPVGNASVFKGDDDEDGEEGCIVYAVRGFGAYVRPLFVGQGSGLTMCASESLKRHADGVTVSGLRSVSCWNTPGSGVDDAHKAATERLGVEFPGSDLLGWVPRWVTLALGLANMTVWVYKRRDRYAKIWDHAGAMLLFEEVGGMITDVDGKEIDLTKGRKLTGNFGFVAAPRSVHHVVLKAVRQTLKEQGKEALLTAA

SEQ ID NO: 9860 - protein, 106 aa, Glycine max
  unsure (1)..(106): unsure at all Xaa locations
MGGVGPLSQGGGPVVLRRXGPTAAAKRGEKARNAGRGSGAGIETLKKCNAGTNKAASSSTSLSTKRGGEETENLAHERVPTELKKAIMRARRGKKLTQAQVAQLSN

SEQ ID NO: 9861 - protein, 500 aa, Oryza sativa
  unsure (1)..(500): unsure at all Xaa locations
MNFIFLQIEKKHRMKSAVFRIRKISFHTHFVFFLHPQQHASGWLDLDTPTKNRIAFEPSSRQGDNSHNASLPPPHALRRAPIRRPPRRPPAMSTASGDGGDGGGGGDGASSAAGGGGRRIPPASSMPWVRNLRRFVGTGAGLGSEALMELETKRILLEIFKERQRKSMEAGAIPSFYKKKPEDGSISNRVQKLAKYRFLKKQSELLLNADDLDAMWVCLRENCVIDDATGAEKMNYEDFCHIATVCTEQIGQKCKRFFSPSNFMKFEKDDSGRIAILPFYLYVMRTVSLTQARIDMSELDEDSDGFLQPHEMEAYIRGLIPNLAQLRDMPSAFVQMYCRIAARKFFFFCDPHRRGKACIKKVLLSNCLQELMELHQESEEEVTDTEQAENWFSLTSAQRICDMFLALDKDTNGTLSKQELKEYADGTLTDIFIERVFDEHVRRSKVGGGNSREMDFESFLDFVLALENKDTPEGLTYLFRCLDLNGRGFLTTADIHTLFX

SEQ ID NO: 9862 - protein, 423 aa, Oryza sativa (japonica cultivar-group)
MRKKKKAFAVAAATTLLSPPRSSSSSSSTASSCIVPPRTESGKKKSKHRKRAKDGTGGDDDDAAVAAAPRKGSSIYKGVARHRGSGKYEAHLWDKQGWNPNQTRKRGRQGAYDTEEAAARTYDLAALKIWGSDHVLNFPIDTYRKELERMQRMTREEYLATLRRKSSGFSRGVSKYRGVAKHHHNGRWEARIGRAVGKKYLYLGTFDTQEEAATAYDLAAIQLRGRSAVTNFDASCYTYTDHLPPPPPPQPPSVCKTEPELEPPQPAAPPGSESLLRPKMEPCDDWEPPAICPSLRDADDADHAIAEILPALCMDRADFEARYPARRARDAAADGWSTSSDDVAAASVDDDVLRSLPDDVGFVDDVESLFLDAPGPAAAAAAAAMPDDVERAVQRAPSAASRRANAAAVSYAISSLASGRWWY

SEQ ID NO: 9863 - protein, 321 aa, Streptomyces coelicolor A3(2)
MSGKYLVTGGAGYVGSVVAQHLVEAGHEVVVLDNLSTGFREGVPAGASFVEGDIRDAAKWLDGSFDGVLHFAAFSQVGESVVKPEKYWDNNVGGTMALLEAMRGAGVRRLVFSSTAATYGEPEQVPIVESAPTRPTNPYGASKLAVDHMITGEAAAHGLGAVSLRYFNVAGAYGEYGERHDPESHLIPLVLQVAQGRREAISVYGDDYPTPDGTCVRDYIHVADLAEAHLLAVAAAAPGEHLICNLGNGNGFSVREVVETVRRVTGHPIPEIMAPRRGGDPAVLVASAGTAREKLGWNPSRADLAGIVSDAWEFAQRRAGQ

SEQ ID NO: 9864 - protein, 434 aa, Brassica rapa
TFSFLLVFVVMILFHPALSIYFNTLSSTESLTISTNRTLVSPGDVFELGFFRTNSRWYLGMWYKKLPYRTYVWVANRDNPLSSSIGTLKISGNNLVLLGHSNKSVWSTNLTRGNERSPVVAELLANGNFVMRDSNINDASGFLWQSFDFPTNTLLPEMKLGFKLKTGLNRFLTSWRSSNDPSSGNFSYKLEAQRLPEFYLWNEKFPWHRSGPWNGIEFSGIPEDKELSYMVYNFTENSEEVAYTFLMTNNSIYSRLTINSAGYFQRLTWDPLLGMWNVFWSSPVDLQCDSYRRCGPYAYCDVTTSPVCNCIQGFNPRFVERWDIRDWSAGCIRRTRLSCSGDGFTRMKNMKLPETTMAIVDRTIGLKECRKRCVRDCNCTAFANADIRNGGTGCVIWTVLLEDMRNYADGQDLYVRLAAADLVKKRNANGKIIS

SEQ ID NO: 9865 - protein, 226 aa, Triticum aestivum
FFLDPLRTGKIKIGDILSCSFLDDLLELRDEELSKESQETNWFSAPSALRVYGQYLNLDKDHNGMLSKEELSRYGTATMTNVFLDRVFQECLTYDGEMDYKTYLDFVLALENRKEPAALQYIFKLVDIENKGYLNVFSLNYFFRAIQELMKIHGQDPVSFQDVKDEIFDMVKPKDPLKISLQDLINSNQGDPVTPILIDLNGFWTYENKKGFVANDSEKFADLDDT

SEQ ID NO: 9866 - protein, 143 aa, Glycine max
MAMAFKMATTGMWVTDECKNSFMDMKWKKEHRYIVFKIDEGSRLVTVDKLGGPTEGYDDLTASLPTDDCRYAVFDFDFVTVDNCRKSKIFFIAWSPTASRIRAKILYATSKDGLRRALDGISYELQATDPTEMGFDVIRDIAK

SEQ ID NO: 9867 - protein, 340 aa, Zea mays
MVHCAKCNIEWNKNDGIFLVEVNRLLRPGGYFVWTSNLNTHRALRDKENQKKWTAIRDYAEGLCWEMLSQQDETIVWKKTNKRECYKSRKFGPELCGHDPESPYYQPLSPCISGTRSQRWIPIEHRTTWPSQARQNATELDIHGVHPEVFADDNSSWDTMVRNYWSLLSPLIFSDHPKRPGDEDPQPPFNMLRNVLDMNAHFGGFNAALLKAGKSVWVMNVVPTDAPNYLPLIFDRGFIGVQHDWCDAFPTYPRTYDMVHADGFLSLQKNHKHRCSTLDIFLEVDRILRPEGWVIIRDTAPLIEAARSVVTQLRWDARILDLDIASDEKLLVCQKPFLRK

SEQ ID NO: 9868 - protein, 256 aa, Brassica oleracea
MGRGRVQLKRIENKINRQVTFSKRRAGLFKKAHEISVLCDAEVALVVFSHKGKLFEYSTDSCMEKILERYERYSYAERQLIAPESDVNTNWSMEYNRLKAKIELLERNQRHYLGEDLQAMSPKELQNLEQQLDTALKHIRSRKNQLMYDSVNELQRKEKAIQEQNSMLSKQIKEREKVLMAQQEQWDQQNHGQNMPSPPPPQQHQIQHPYMLSHQPSPFLNMGGLYQEEDPMAMRRNDLDLSLEPVYNCNLGCFAA

SEQ ID NO: 9869 - protein, 682 aa, Zea mays
PILPSYTYTVGTPSNQRRGDDDCAASAFLPYRNRTNQSIIPLCSRRPSASKQGTDAAGMGSGVRALMRRKQVDSERTRAAGSAHQLRKELSVTQLVAIGVGSTIGAGVYVLVGTVAREHSGPALTLSFLIAGIAAALSAFCYAELASRCPSAGSAYHYSYICVGEGVAWLIGWALILEYTIGGSAVARGISPNLALFFGGQDSLPWILARHEIPWLDVVVDPCASFLVFVVTGLLCVGIKESSFVQGVVTVLNCFVMLFVIIAGSYIGFQTGWVGYKVAGGFFPYGANGMLAGSATVFFAYIGFDSVASTAEEVKNPQRDLPLGIGTALSICCSLYMLVSVVIVGLVPYFAMDPDTPISSAFAKHGMHWAMYLVTTGAVLALCSTLMGSILPQPRILMAMARDGLLPSFFSDVHKTTQVPVKSTVVTGICAAALAFFMDVSQLAGMVSVGTLLAFTIVAVSILILRYVPPDEVPLPSSLQASFRLSQENDEEKLRGTLGDDDHEQGSAEISDVVVEPITDPLIEKQLYASNLSEAKRRKTAACSITSVCIGVLILTTSASATFLPFPVRCSVCVLGGMLLLAGLGMLCWIDQDDGRHSFGHSGGFICPFVPLLPVMCILINTYLLINLGGGTWMRVGVWLVMGVFVYIFYGRTHSSLTDVVYVPVAEANEIYGSSSSLGFVA

SEQ ID NO: 9870 - protein, 601 aa, Vibrio cholerae
MTNLDFHIVKRIRQRIAQGGDNAALKHKQNGQWQAINWHQFGEQLDELSMALLAQGIGVQDKIAIFSNNMPRWTIADFAALQIRAVTVPIYPTNTPEQAAYILQNADVKVVFVGEQAQFDAALSQFEQCPELRLIVAMNANIDLKQASCAMHWDEFVAQSHHQDRAPLDALIEQANYDDLFTLIYTSGTTGTPKGVMLDYRNIGAQLEGHDQRLNLTQEDVSLCFLPLSHVFERAWTAYVLYKGATNCYLQDVAHVREALAEVRPTVMCAVPRFYEKIFSAIHEKVVKAPLVRKVLFTWAVNMGAKMAVCRQQQRQPSWMLKQSHQFADKLVLSKLRALLGGRINFMPCGGAKLDETIGRFFHAIGINVKLGYGMTETTATVSCWDDHCFNPDSIGLSMPGAQVKIGENNEILVRGPMVMRGYYKLDKETTESFDEQGFLKTGDAGHIDENGNLFITDRIKELMKTSGGKYIAPQVIEGAIGKDHFIEQIAVIADTRKFVSALIVPCFDSLEEYAKELNIKYHDRLELIKHSQVLEMFEKRVNELQKELAKFEQVKKFRLLPKAFSMDSGELTPTQKLRRKVINDRYQDEIEEMYQDSPKK

SEQ ID NO: 9871 - protein, 573 aa, Saccharomyces castellii
MSERKMENLTGTMHQLNFNLPNQPNRGSTSQFASLDNFSTPTKYKNDKLNGSPIPPGARRYEIDDSDSKMDIDGSSYNDIDITNSPKKLPQGFQTMASNNKTQRLVSVCKMYFLDYYCDMFDYVISRRQRTKKVLEYLEQKKNENVDLNSLNNEWNGYIQREHQVLRKRRLKPKHKDFEMITQVGQGGYGQVYLPGKKDTNEVCALKILNKKLLFKLNETNHVLTERDILTTTRSQWLVKLLYAFQDTQNLYLAMEFVPGGDFRTLLINTRFLKSTHARFYISEMFLAVNALHDLGYTHRDLKPENFLIDAKGHIKLTDFGLAAGTISNDRIQSMKVRLEEVKNLEFPEFSDKSIEDRRQMYQKYRETEVNYANSMVGSPDYMALEVLEGKKYDFTVDYWSLSCMLFESLVGYTPFSGSSTNETYENLRHWKKTLRRPMLDNGRPAFSDRTWDFITRLIADPINRLRSFEHVKRMTYFESVDFNTLRDLSPPFIPQLDNETDAGYFDDFTNEADMAKYADVFKRQNKLSTMVNDADIDSKLVGFTFRHRYGKNGSSGVLYNGLEQSDPFSTFY

SEQ ID NO: 9872 - protein, 350 aa, Glycine max
RLNFLFNCEQSKIQSLAGQHSDILESLSPNVRKRVEVLREIQGQHDELEAKFFEERAALEAKYQKLYQPLYTKRYEIVNGTTEVEEGAVKETAPDNEEDQEKGVPAFWLTAMKNNEVLAEEISERDEGALKYLKDIKWSRIENPKGFKLDFFFDTNPYFTNSVLTKTYHMIDEDEPILEKAIGTEIQWHPGKCLTQKILKKKPKKGSKNAKPITKTENCESFFNFFNPPQVPEDDEDIDEDVAEELQNQMEQDYDIGSTIRDKIIPHAVSWFTGEAIQGDEFGDLEDDEDDEDIEEDDDEDEEDDDDDDDDDDDEEESKTKKKSSAPKKSGRAQLGDGQQGERPPECKQQ

SEQ ID NO: 9873 - protein, 357 aa, Mycobacterium tuberculosis H37Rv
MSLSLGIVGLPNVGKSTLFNALTRNNVVAANYPFATIEPNEGVVSLPDPRLDKLAELFGSQRVVPAPVTFVDIAGLVKGASEGAGLGNKFLAHIRECDAICQVVRVFVDDDVTHVTGRVDPQSDIEVVETELILADLQTLERATGRLEKEARTNKARKPVYDAALRAQQVLDAGKTLFAAGVDAAALRELNLLTTKPFLYVFNADEAVLTDPARVGELRALVAPADAVFLDAAIESELTELDDESAAELLESIGQSERGLDALARAGFHTLKLQTFLTAGPKEARAWTIHQGDTAPKAAGVIHSDFEKGFIKAEIVSYDDLVAAGSMAAAKAAGKVRIEGKDYVMADGDVVEFRFNV

SEQ ID NO: 9874 - protein, 321 aa, Glycine max
MRIGSPSSSSSRCSRFWSSALRSKRLVSPAEKAARDSSDLGLSRRLGVLDLVLLGIGASIGAGIFVVTGTVARDAGPGVTISFILAGASCVINALCYAELATRFPAVVGGAYLYAYTAFNELTAFLVFGQLMLDYHIGAASIARSLASYLINILELFPVFKDNIPKWIGHGEDIGDVLSINVLAPILLVLLTFILCRGVQESSVVNSLMTVTKIIIVIIVIFAGAFEVDVSNWSPFAPNGLKAIFTGATVVFFAYVGFDAVANSAEESKRPQRDLPIGIIGSLLICIALYIGVCLVITGMGAYNLLGEDAPLAEAFSSKGL

SEQ ID NO: 9875 - protein, 227 aa, Oryza sativa
  unsure (1)..(227): unsure at all Xaa locations
RAKLTPLGAXLGPRPPRRAXDRVRWDYRGQRQLVPLGQWMPKVAVDAYVAPEAVLAGQVTVYDGASVWSGAVLRGDLNKITLGFCANVQERCVLHAAWSAPTGLPADTLVDRYVTVGAYCLLRSCTIEPECIIGQHSILMEGSLVETNSILEAGSVLPPGRRIPTGELWAGNPARFVRKLTNEEIMEIPKLAVAINDLMQSHFSEFLPYSTAYLEVEKLKKSFSIPL

SEQ ID NO: 9876 - protein, 52 aa, Oryza sativa
  unsure (1)..(52): unsure at all Xaa locations
XTMYMKVKGNMFKNKXVLMESIHKXKAEKAXXKTLSDQFXAKLAKSKASREX

SEQ ID NO: 9877 - protein, 166 aa, Nostoc punctiforme
MIRSSVSNCPVPIDQQPLNEYEELKTSWLFRDSTLDLRDYITKIAWIWGLSWLIAAPVAATSFPPHKYIAHFILCGAAAASVGVVLALVRLYLGWFYVCDRLGSPTVFYEESGWYDGQTWTKPQEILNRDRLIVAYEIKPILRRLQFTFAGLAGMYVTGTIVWHLF

SEQ ID NO: 9878 - protein, 329 aa, Brassica napus
MSYVVRELAIVFALAAGAAYLNNWLVWPLYWIAQGTMFWALFVLGHDCGHGSFSNDPRLNSVVGHLLHSSILVPYHGWRISHRTHHQNHGHVENDESWHPMSEKIYKSLDKPTRFFRFTLPLVMLAYPFYLWARSPGKKGSHYHPDSDLFLPKERNDVLTSTACWTAMAVLLVCLNFVMGPMQMLKLYVIPYWINVMWLDFVTYLHHHGHEDKLPWYRGKEWSYLRGGLTTLDRDYGLINNIHHDIGTHVIHHLFPQIPHYHLVEATEAAKPVLGKYYREPDKSGPLPLHLLGILAKSIKEDHFVSDEGDVVYYEADPNLYGEIKVTAE

SEQ ID NO: 9879 - protein, 667 aa, Streptococcus pneumoniae
MFASKSERKVHYSIRKFSIGVASVVVASLVMGSVVHATENEGITQVATSYNKANESQTEHRKAAKQVDEDIKKMLSEIQEYIKKMLSEIQLDKRKDTQNRTLNRKLSAIQTKYLYELRVLKEKSKKEELTSKTKKELDAAFEKFKKEPELTKKLAEAKQKAKAQKEEDFRNYPTNTYKTLELEIAEFDVKVKEAELELVKEEAKPRNEEKIKQAKEKVESKKAEATRLEEIKTERKKAEEEAKRKAEESEKKAAGSQQKVVTKEQGKPKRRAKRGVSGELATPDKKENDASLPDSSVGEETLPSPPLIWEMKVSRHRKVEEAKKKAEDQKEEDRRNYPTNTYKTLELEIAESDVEVKKAELELVKEEAKEPNPAPAPQPAPAPEKPAEKPAPAPAPENPAPAPEKPAPAPEKPAPAPEKPAPTPETPKTGWKQENGMWYFYNTDGSMATGWLQNNGSWYYLNSNGAMATGWLQNNGSWYYLNSNGAMATGWLQYNGSWYYLNANGDMATGWFQYNGSWYYLNANGDMATGWFQYNGSWYYLNANGDMATGWFQYNGSWYYLNANGDMATGWLQYNGSWYYLNSNGAMVTGWLQNNGSWYYLNANGSMATDWVKDGDTWYYLEASGAMKASQWFKVSDKWYYVNGSGALAVNTTVDSYRVNANGEWVN

SEQ ID NO: 9880 - protein, 111 aa, Glycine max
QVMLVGLLTKNAATCVCIWELQKMTLLWKEVDRMPNIWCLDFYGKHVRMTCLGNKGLLMLSLRSKQMNRLVTYNIAKKEWLKVPGCVVPRGRKRQWIACGTAFHPCLTAVV

SEQ ID NO: 9881 - protein, 152 aa, Glycine max
MAKGVAVLNSSEGVKGTIFFTHEGNGATTVTGTVSGLKPGLHGFHVHALGDTTNGCMSTGPHFNPDGKTHGAPEDANRHAGDLGNIIVGDDGTATFTITDSQIPLSGPNSIVGRAVVVHADPDDLGKGGHELSLSTGNAGGRVACGIIGLQG

SEQ ID NO: 9882 - protein, 426 aa, Pseudomonas aeruginosa UCBPP-PA14
MSKTNESLLKRRQAAVPRGVGQIHPVVAERAENSTVWDVEGREYIDFAGGIAVLNTGHLHPKVIAAVQEQLGKLSHTCFQVLAYEPYIELAEEIAKRVPGDFPKKTLLVTSGSEAVENAVKIARAATGRAGVIAFTGAYHGRTMMTLGLTGKVVPYSAGMGLMPGGIFRALAPCELHGVSEDDSIASIERIFKNDAQPQDIAAIIIEPVQGEGGFYVNSKSFMQRLRALCDQHGILLIADEVQTGAGRTGTFFATEQLGIVPDLTTFAKSVGGGFPISGVAGKAEIMDAIAPGGLGGTYAGSPIACAAALAVLKVFEEEKLLERSQALGERLKAGLREIQAKHKVIGDVRGLGSMVAIELFEGGDTHKPAAELVSKIVVRAREKGLILLSCGTYYNVIRFLMPVTIPDAQLEKGLAILAECFDELA

SEQ ID NO: 9883 - protein, 391 aa, Oryza sativa
  unsure (1)..(391): unsure at all Xaa locations
MAFDAFTDKNAVFRRLKAKPENKMCFDCSAKNPTWASVTYGIFLCLDCSAVHRSLGVHITFVRSTNLDSWTPDQLKMMAFGGNNRAHAFFKQHGWTDGGKVDAKYTSRAAELYRQILQKEVAKSSAXXNVLPSSPVAASQPQNPSDDFPEFKLPEAPAENTNGKQEPDVTNSQKAPTHSVKKSIGAKKIGGKTGGLGVKKLTTKPSESLYDQKPEEPKPAAPVMTTSTTKSGPSLHSRFEYVENEPAVDSRNGGTQMTGHVAPPKSSNFFQEYGMDNGFQKKTSTAATKTQIQETDEARKKFSNAKAISSSQFFGNQSREEKDAQMSLQKFAGSSSISSADLFGRRDNDSNLDLSAADLINRISFQNMAGETGKKLTSIASNFISDLDRIL

SEQ ID NO: 9884 - protein, 458 aa, Bacillus cereus ATCC 14579
MKRGLEARHIQMIALGGTIGVGLFMGSASTIKWTGPSVMLAYAIAGIFIFFIMRAMGEMLYMEPSTGSFATFGHKYIHPLAGYMTAWSNWFQWVIVGMSEIIAVGAYMQYWFPDLPAWIPGIIAMVILGAANLISVKSFGEFEFWFAMIKIVTILLMIIAGFGLIFFGIGNGGEAIGISNLWSNGGFFTGGFSGFFFALSLVVGAYQGVELIGITAGEAKDPKKTLTRAIQSTIWRILIFYIGAIFVIVTVYPWDQLSTIGSPFVATFAKVGITAAAGLINFVVITAAMSGCNSGIYSAGRMLYTLGVNGQAPKYFTKLSGNGVPLFGTVGVIIGLAVGVVLSYIAPKNLFVYVYSASVLPGMVPWFVILISQINFRKEKGAEMKDHPFKMPFAPVTNYLTIAFLIMVLIGMWFNDDTRISLVVGIIFLAIVTISFYAFGIGKRAPLDVQNNKEISSK

SEQ ID NO: 9885 - protein, 463 aa, Lactobacillus gasseri
MVLMENKKNHPPKLKRSMTAGQMEMISLGGAIGVGLFMGSTSTIKWTGPSVLLAYMFVELILYIVMRALGEMLYVSPGTGSFADYATEYISPLAGYLAEWANVFQYIVVGISEVVAATEYLKFWWPQVNVFWSGIIIIALLLLANLASAKAYGALEFWFAMIKVVTIILMIILGLFVILLGVGNHGKPLGFSNLWSHSGFFTGGVKGFFFSMAIIAGSYEGIELIGISAGEVANPQEAIVKSVKSVLWRILIFYVGAIFVIVTIYPWNQLSNIGSPFVETFTKVGITAAAGIINFVVLTAALSGANSGIYSSSRMLFKLSHEGEAPKIFGKLSKHIVPDRAIIGITVGILVGFVLNLIVSTMNKSMGELFVIVYSSSVLPGMVAWFVILIAELKFRKSNTHLMDKHPFKLPLYPYSNYFAFMMLLIIVIFMFINPETRVSVTVGAGVLVLAAIVYAIKHRKKK

SEQ ID NO: 9886 - protein, 264 aa, Lycopersicon esculentum
MLELRLVQGSLLKKVLESIKDLVNDANFDCSATGFSLQAMDSSHVALVALLLRSEGFEHYRCDRNISMGMNLTNMAKMLKCAGNDDIITIKADDGSDTVTFMFESPTQDKIADFEMKLMDIDSEHLGIPEAEYHAIVRMPSAEFGRICKDLSSIGDTVVISVTKEGVKFSTRGDIGTANIVCRQNTTVDKPEEATVIEMNEPVSLTFALRYLNSFTKASPLSNTVTISLSSELPVVVEYKIAEMGYVRYYLAPKIEEDEEETKP

SEQ ID NO: 9887 - protein, 205 aa, Vitis vinifera
QVVGTVVAVIVYVITAWWLMATIPNHCDTTMLPADSPWRCPMDNVFFDASVIWGLIGTRRIFGNLGAYSNVNWFFLLGAIAPLLVWLMHKAFPKKKWIPLIHMPVLLGSTAMMPPASAVNFTSWIIVGFLSGFVIFRLKPKLWERYNYVVSGGLDAGTAFMTILIFLTLGSGNVSIDWRGNNPEGCPLASCPTARGIVVDGCPVF

SEQ ID NO: 9888 - protein, 156 aa, Glycine max
MAATRPVQCLLRRVCRGSRTIGVATEVNASSSSQKIIDKEYEHSAHNYHPLPIVFAQAKGTSVWDPEGNKYLDFLSGYSAVNQGHCHPKILKALQEQAQRLTVSSRAFYNDRFPVFAEYVTNMFGYDMVLPMNTGAGGVETALKLARKWGYEKKRI

SEQ ID NO: 9889 - protein, 396 aa, Deinococcus radiodurans
MSGVRLTVLGSTGSIGTQTLDVARQRGYTVGTLAAGRNLDLLAEQVREFRPALVSVDGSILAEARERLSGVRVIADPSEAAVAQADVVVNAMSGLIGLPPTRAALEAGQAVALATKEAMVTSAHLMWEAAAAGGGRVVPVDSEHTGVYQCLTGEDMGDVAELILTASGGPFRDGPADLSAVTPEQALKHPSWSMGPKVTIDSATLMNKGLEVMECASLYGLPLSQVGVVVHPQSIVHAAVRLRDGSLKAQFGPADMRLPIAYAIDAAPSGMQHPGDVRGARRGEEVGEHLGWPLLGQWEFRAPDLTRFPCLALAYRAGEAGGLLPVALNAADEVAVDAFLHGRIGFLDIPQLIERVLDETPGGALTWDSLTETDAWARARAQELCAYGVGGAGVGA

SEQ ID NO: 9890 - protein, 132 aa, Zea mays; identical to SEQ ID NO: 6770

SEQ ID NO: 9891 - protein, 1137 aa, Lycopersicon esculentum
MESQSSENRRGGGGRTSLNQNKQNNNKDSGLNTSSAASNMKNNASKAALAQYNADAKLMAEFEQSSVSGKSFDYSKSVLFPPHEANEEEITSYLSRIQRGGLVQPFGCMVAIEEPTFKIIGYSENCYDMLGFKPTKMKLGLIGVDARNLFTPSSGDSLAKVMASREISLLNPIWVHSRTTHKPFYAILHRIDVGIVIDLEPANSSDPALLLAGAVQSQKLAVRSISRLQSLPGGDIGVLCDTAVEDVQKLTGYDRVMVYKFHDDNHGEIVSEIRRSDLEPYLGLHYPATDIPQAARFLFKQNRVRMICDCNAQPVKVVQSEELKQPICLVNSTLRSPHECHSKYMANMGSISSLVMAILINSGDSMKLWGLIVCHHTSPRYVPFPLRYACEFFTQAFGLQLNMELQLASQLAEKKTLQMQTLLCDMLLRDVPFGVVTQSPSIMDLVKCDGAALYCGGKCWLLGVTPTEAQVKDIAQWLLVAHKDSTGLSTDCLADAGYPGAALLGDAVCGMATARITSKDFLFWFRSHTAKEVKWGGAKHHPDDKDDGGKMHPRSSFNAFLEVVKSRSLPWEIPEINAIHSLQIIMRESIQENENSSLKTLTTSQQNDADGPSMDELSSVAMEMVRLIETATAPIFGVDPSGLINGWNEKIADLTGLHASEAVGMSLINDITHEDSRGTVEKVLHRALLGEEEKNVEIKLRRFGKDPPGSVIYLVINACTSRDHKNGVVGVSFVAQDVTPEKFIMDKFIQLRGDYEAIVQSLSPLIPPIFASDENACCSEWNAAMERLTGWTKYEVMGRTLPGEVFGGLCRLTGQDALTKFMILFYQAISGHDTKKLPFGFFNRRGEFLEVFLTANKRTDEHGNVCGCFCFLQPMTIDPEASDERQDSKDSLWKYKEYVYVLQQMKNPLNGIQFTHKLLEATGVSDNQKQLLETSEACEKQILSVIDNMDFGGIEDGKVQLNMEEFVLGNVVDAIVSQVMIFLKEKNLQLLHDIPDQIKTLPLYGDQIKLQRVLSDFLLSVVHHAPSPDGWVEIKVLPGLKLIQDGNELIHLQLRMTHPGQGLPAALIDDMSGERNRWTTQEGIALNVAQKLLNVMNGHVRYVRGEDKCYFLIDVELQTLKPTQHGPKLEVTQEIEI

SEQ ID NO: 9892 - protein, 124 aa, Zea mays
  unsure (1)..(124): unsure at all Xaa locations
EMDSYMGGXMPILAQLTDMPPAFNQMYCRIASQKYIFFCDPHRRGRACIKKILLITCLXDLMELHQESEEEVXHTEQAENFSLTSAQRICDMFLALDKDMSGSLGCQELKEYAEGTLPEIFIER

SEQ ID NO: 9893 - protein, 745 aa, Geobacillus stearothermophilus
MENQNRQNAAQCPFHGSVTNQSSNRTTNKDWWPNQLNLSILHQHDRKTNPHDEEFNYAEEFQKLDYWALKEDLRKLMTESQDWWPADYGHYGPLFIRMAWHSAGTYRTGDGRGGASTGTQRFAPLNSWPNNANLDKARRLLWPIKKKYGNKISWADLFILAGNVAIESMGGKTIGFGGGRVDVWHPEEDVYWGSEKEWLASERYSGDRELENPLAAVQMGLTYVNPEGPDGKPDPKAAARDIRETFRRMGMNDEETVALIAGGHTFGKAHGAGPATHVGPEPEAAPIEAQGLGWISSYGKGKGSDTITSGIEGAWTPTPTQWDTSYFDMLFGYDWWLTKSPAGAWQWMAVDPDEKDLAPDAEDPSKKVPTMMMTTDLALRFDPEYEKIARRFHQNPEEFAEAFARAWFKLTHRDMGPKTRYLGPEVPKEDFIWQDPIPEVDYELTEAEIEEIKAKILNSGLTVSELVKTAWASASTFRNSDKRGGANGARIRLAPQKDWEVNEPERLAKVLSVYEDIQRELPKKVSIADLIVLGGSAAVEKAARDAGFDVKVPFFPGRGDATQEQTDVESFAVLEPFADGFRNYQKQEYSVPPEELLVDKAQLLGLTAPEMTVLVGGLRVLGANYRDLPHGVFTDRIGVLTNDFFVNLLDMNYEWVPTDSGIYEIRDRKTGEVRWTATRVDLIFGSNSILRSYAEFYAQDDNQEKFVRDFINAWVKVMNADRFDLVKKARESVTALQHTSPVDLS

SEQ ID NO: 9894 - protein, 613 aa, Triticum aestivum
MPEAPSAQPAPASGYAPGAHREALDFIEHVTANAGKVQQRVLAEILAQNETAEYLRRYGVSSSSSPLDPVDAFRRCVPLVTYEDLQPDILRIANGDSSPILSGKPISEFLTSSGTSGGERKLMPTIADELDRRSLLYSLLMPVMSQSLPGLDKGKAMYLLFVKAESRTPGGLAARPVLTSYYRSRQFLDRPHDPSSAYTSPNKAILCVDSYQSMYAQLLCGLVHRTDVLRVGAVFASGLLRAIRFLEKHWPLLCHDIRTGELDPEITDHAVRDAVGRLLHANPALASEIEAECSKPSWEGIIRRLWPRTKYIDVIVTGAMSQYIQTLEFYGGGLPLICTMYASSECYFGLNLNPMCKPGDVAYTLIPTMCHFEFLPVHCSNANAEPSHRDLVDLVDVKLGHDYELVVTTFSGLCRYRVGDVLRVAGFKNEAPMFSFVRRRNVALSIDSDKTDETELHTAVSSAVQHLAPFGASLVEYTSYADTAAIPGHYVLFWELREGSTAVPASVFEECCLSVEEALNSVYRQCRACDRSIGPLEIRVVSEGTFEKLMDYALSQGASINQYKAPRCVRPGPVVELLDARMQASYFSPKCPKWSPGNKQWNTSKELLSIGDA

SEQ ID NO: 9895 - protein, 380 aa, Zea mays; identical to SEQ ID NO: 7409

SEQ ID NO: 9896 - protein, 481 aa, Emericella nidulans
MPRSAIVQEYNPTPTLSVDRKSAQHQHEGIIARPSGYRVSWHANPAVELHHFGQSHPMKPWRLTLTKQLVLAYGMHHAMDLYHCRAATVEELSDFHTSDYLDFLQTVVPGDMNDAQSKDFSENIVRFNFGDDCPIFDGLFQYCSLYAGASLDAARKLCNNQADIAINWSGGLHHAKKAEASGFCYVNDIVLAILQLLRIHPRVMYIDIDVHHGDGVEQAFWSTDRVLTVSFHKYDKENFFPGTGPLDSTGPTHPLNPGAHHAVNVPLHDGIDDESYVQLFKDVVGACVSKFRPAAIVLQCGADSLGCDRLGCFNLNVAAHGACVAYTKTFGLPMLVVGGGGYTPRNVSRAWAHETSILIDAQDKINPVIPSNVAFRNHFGPDFSLFPPLSEMRKLENKNSRAYLATIVQTITEQLRYLQAAPSVQMSVIPPDLLGLREETEKEIEEEIAKLEEKREEAEGGKNSRRRDAEKGAGLRGELYS

SEQ ID NO: 9897 - protein, 90 aa, Glycine soja
GINISGTNGEVMPGQWEYQVGPSVGIEAGDHIWASRYILERITEQAGVVLSLDPKPIEGDWNGAGCHTNYSTKSMREDGGFEVIKKAILN

SEQ ID NO: 9898 - protein, 487 aa, Berberis stolonifera
MDYIVGFVSISLVALLYFLLFKPKHTNLPPSPPAWPIVGHLPDLISKNSPPFLDYMSNIAQKYGPLIHLKFGLHSSIFASTKEAAMEVLQTNDKVLSGRQPLPCFRIKPHIDYSILWSDSNSYWKKGRKILHTEIFSQKMLQAQEKNRERVAGNLVNFIMTKVGDVVELRSWLFGCALNVLGHVVFSKDVFEYSDQSDEVGMDKLIHGMLMTGGDFDVASYFPVLARFDLHGLKRKMDEQFKLLIKIWEGEVLARRANRNPEPKDMLDVLIANDFNEHQINAMFMETFGPGSDTNSNIIEWALAQLIKNPDKLAKLREELDRVVGRSSTVKESHFSELPYLQACVKETMRLYPPISIMIPHRCMETCQVMGYTIPKGMDVHVNAHAIGRDPKDWKDPLKFQPERFLDSDIEYNGKQFQFIPFGSGRRICPGRPLAVRIIPLVLASLVHAFGWELPDGVPNEKLDMEELFTLSLCMAKPLRVIPKVRI

SEQ ID NO: 9899 - protein, 330 aa, Bacillus anthracis str. A2012
MNSILICGGAGYIGSHAVKKLVDEGLSVVVVDNLQTGHEDAITEGAKFYNGDLRDKAFLRDVFTQENIEAVMHFAADSLVGVSMEKPLQYYNNNVYGALCLLEVMDEFKVDKFIFSSTAATYGEVDVDLITEETMTNPTNTYGETKLAIEKMLHWYSQASNLRYKIFRYFNVAGATPNGIIGEDHRPETHLIPLVLQVALGQREKIMMFGDDYNTPDGTCIRDYIHVEDLVAAHFLGLKDLQNGGESDFYNLGNGNGFSVKEIVDAVREVTNHEIPAEVAPRRAGDPARLVASSQKAKEKLGWDPRYVNVKTIIEHAWNWHQKQPNGYEK

SEQ ID NO: 9900 - protein, 162 aa, Zea mays
  unsure (1)..(162): unsure at all Xaa locations
MVYMWEMVNKYMELAHRVDEALGFMSAAGLPLDHPIMTTAEFWTSHECLLLPYEQALTREDSTTGLYYDCSAHFLWVGERTRQLDGAHVEFLRGIANPLGIKVNLMLNXSNSCXPLIRAVRGAGQIVTWVTDPMHGNTMKAPCGLKTRSFDSPAGLEGPNRP

SEQ ID NO: 9901 - protein, 341 aa, Streptomyces avermitilis MA-4680
MLGCVIHGRGDLRVDELPEPAAGPGQALVAVRYGGVCGSDLHYWRHGGVGDFRLREPMVLGHEVVGTVLSYGPGAAGPAPGTAVAVHPATPCGVCPECADGRANVCRDTRYLGSAARMPHVQGGFAARVVVPAAQVRALPEGLDLRRAALAEPLSVALHAVRRAGPVAGRPVLVTGAGPIGCLVVAAAKAAGAGRVTVTDLLPRALSYAAGVGADDVVRADDPADAGWPDSVDVAVEASGVAAGLDTCLRLVRRGGVVVQLGMLPPGQTPFAGNLVVSREIELRGAFRFADEFDEALTLLAREPAFDSLISAVVPLEEAESAFALAADRGEACKVLLDFGV

SEQ ID NO: 9902 - protein, 374 aa, Streptomyces avermitilis MA-4680
MHDMLLIALFAFLGAAAAGLCGAGVLVLIRRRSLTVSLAVVSAVAVTAMLAGTLAVAWAMFLSAHDLTVVTTVVAMAAVVSLATALLLGRWVVARSRELALAARSFGDGGDFAAPDGPATAELDALARELAATSARLAESRDRERALESSRRELVAWISHDLRTPLAGLRAMSEALEDGVAADPDRYLRQIRTEVERLNDMVGDLFELSRIHAGTLALSPSRISLYDLVGDALAGADPLARELGVRLVGDRVEPVPVEVDGKEMSRVLGNLLINAIRRTPADGTVAIAAERSPGGVVLSVTDGCGGIPEEDLPRVFDTGWRGTHARTPPAGAGLGLAIVRGIVEAHQGQAAVRNIPGGCRFEVTLPTARAQPQP

SEQ ID NO: 9903 - protein, 117 aa, Leavenworthia crassa
GMIHDGESRFSINGKPIHHFLGTSTFSEYTVVHSGQVAKINPKAPLDKVCIVSCGLSTGLGATLNVAKPKKGQSVAVFGLGAVGLAAAEGARIAGASRIIGVDLNSKRFEEARKFGV

SEQ ID NO: 9904 - protein, 437 aa, Pseudomonas syringae pv. syringae B728a
MATAETSSLRRAITAPMLTLFILGDVLGAGVYALAGTIAGRVGGAIWAPLLIALCFALLTAASYAELVTKYPRAGGAAVYAEKAFGKPLLSFLVGFSMVAAGVTSAAGLAVAFAGDYFQALLDWPAQWVCVAFLVTVGLLNARGIKESLSANLVMTVIELSGLLMVIAAAIWFVSQGQGVPQRVFELDSASPATAILGASLLAFYSFVGFETSANLAEEIKDVRKVYPRALFGALLAAGAVYILVGMGAAMVLPVEQLKDSQAPLMDVVSASGLGIPAPWFAVIALIAVANGALLTMIMASRLTFGMAREGLLPAVMGSVLPKRRTPGLAILATTLVAIALSFTSTLTILAETVVLLLLFVFLSVNIAVLVLKRDKVEAGHFQVHWVIPLLGILSCLLLLTQQGPETWLRAGIMLAVGAALYGLTRLGSSALASHPR

SEQ ID NO: 9905 - protein, 347 aa, Streptomyces avermitilis MA-4680
MMPTTAEPAPVQSDSNSSAPLHTELGRTRLRISRLALGTVNIGGRVEEPEARRLMDHALAQGITLFDTANTYGWRVHKGYTEEVIGRWLADRPARREQVVLATKVGDPMGSGPNDHGLSVRNIVAACDASLRRLRTDWIDLYQLHHIDRRAGWDEVWQAMDLLITQGKVRYVGSSNFAGWDIASAQEAARRRNALGLASEQCVYNLVTRHAELEVIPAASAYGVGVLVWSPLHGGLLGGVLRKTRENTAVKSAQGRAVEALEHHRTTIAAYEDVCADHGLDPAHVGMAWVLSRPGVTGLVIGPRTEQHVDGALHALRTPLPEPVLARLEELFPPVGRGGSAPDAWLS

SEQ ID NO: 9906 - protein, 130 aa, Glycine max
  unsure (1)..(130): unsure at all Xaa locations
SLFLSNLKLVHYMKIPPLFMYSSHLIXTLLSYILNLSLSXFIFYIINYICIDHKLHHYTPFTYPNYILTFYASFIFPLILPNNLFLPHXLYINLLFLFLIXTFLPLPILFFIKIFPYNKFIPLINIPFIT

SEQ ID NO: 9907 - protein, 297 aa, Nicotiana tabacum
MGEKPKSGGVWPTVKPFVNGGASGMLATCVIQPIDMIKVRIQLGQGSAVDVTKTMLKNEGFGAFYKGLSAGLLRQATYTTARLGSFRSLTNKAIEANEGKPLPLYQKALCGLTAGAIGACVGSPADLALIRMQADATLPLAQRRHYTNAFHALSRIVADEGVLALWKGAGPTVVRAMALNMGMLASYDQSVEFCRDNLGMSEAATVVGASSVSGFFAAACSLPFDYVKTQIQKMQPDAEGKLPYSGSFDCAMKTLKAGGPFKFYTGFPVYCVRIAPHVMMTWIFLNQIQKAEKKLGL

SEQ ID NO: 9908 - protein, 1123 aa, Physcomitrella patens
MSTPKKTYSSTSSAKSKAHSVRVAQTTADAALQAVFEKSGDSGDSFDYSKSVSKSTAESLPSGAVTAYLQRMQRGGLTQSFGCMIAVEGTGFRVIAYSENAPEILDLVPQAVPSVGEMDTLRIGTDVRTLFTASSVASLEKAAEAQEMSLLNPITVNCRRSGKQLYAIAHRIDIGIVIDFEAVKTDDHLVSAAGALQSHKLAAKAITRLQALPGGNIGLLCDTVVEEVRELTGYDRVMAYRFHEDEHGEVVAEIRRADLEPYLGLHYPGTDIPQASRFLFMKNKVRIIADCSAPPVKVIQDPTLRQPVSLAGSTLRSPHGCHAQYMGNMGSIASLVMAVIINDNEEDSHGSVQRGRKLWGLVVCHHTSPRTVPFPLRSACGFLMQVFGLQLNMEVELAAQLREKHILRTQTLLCDMLLRDAPIGIVSQIPNIMDLVKCDGAALYYGKRFWLLGTTPTESQIKDIAEWLLEYHKDSTGLSTDSLADANYPAAHLLGDAVCGMAAAKITAKDFLFWFRSHTAKEIKWGGAKHDPGEKDDGRKMHPRSSFKAFLEVVKRRSLPWEDVEMDAIHSLQLILRGSFQDIDDSDTKTMIHARLNDLKLHDMDELSVVANEMVRLIETATAPILAVDSNGMINGWNAKIAQVTGLPVSEAHGRSLVKDLVTDESVAVVERLLYLALRGEEEQNVEIKLKTFGTQTEKGVVILIVDACSSIHVSENVVGVCFVGQDVTGQKMFMDKFTRIQGDYKTIVQNPHPLIPPIFGADEFGYCFEWNPAMEGLTGWKKDEVVGKLLVGEIFGMQMMCCRMKSQDAMTKFMIALNTAMDGQSTDKFTFSFFDREGKYVDVLLSTNKRTNADGVITGVFCFLQIASSELQQALKVQRATEKVAVAKLKELAYIRQEIKNPLCGITFTRQLLEDTDLSDDQQQFLDTSAVCEQQLQKVLNDMDLESIEDGYLELDTAEFEMGTVMNAVISQGMTTSREKGLQIFRETPREINTMRLLGDQIRLQQVLSDFLLNTVRFTPSPEGWVKIKVVPTRKRLGGSVHVVHLEFRVSHPGAGLPEELVLEMYDRGKGMTQEGLGLNMCRKLVRLMNGDVHYVREAMQCYFVVNVELPMAQRDDASSQM

SEQ ID NO: 9909 - protein, 324 aa, Synechocystis sp. PCC 6803
MAETLLFAALRQALDEEMGRDVNVLVLGEDVGLYGGSYKVTKDLYEKYGEMRVLDTPIAENSFTGMAVGAAMTGLRPVIEGMNMGFLLLAFNQIANNAGMLRYTSGGNYQIPMVIRGPGGVGRQLGAEHSQRLEAYFHAVPGLKIVACSTPYNAKGLLKAAIRDNNPVLFFEHVLLYNLKENLPDYEYIVPLDKAEVVRPGKDVTILTYSRMRHHCLQALKTLEKEGYDPEIIDLISLKPFDMETISASVKKTHRVIIVEECMKTGGIGAELIALINDHLFDELDGPVVRLSSQDIPTPYNGMLERLTIVQPPQIVDAVKAIIG

SEQ ID NO: 9910 - protein, 467 aa, Pseudomonas putida
MQQAQGLKRGLNARHIRFMALGSAIGTGLFYGSASAIQMAGPAVLLAYLIGGAAVFMVMRALGEMAVHNPVAGSFGHYASTYLGPMAGFILGWTYAFEMVIVAIADVTAFGIYMGFWFPEVARWIWVLGIVFLIGGLNLCNVKVFGEMEFWLSLLKVGAIVAMILAGLGIMAFGFSQVGTGHAVGVSNLFDHGGFMPNGVGGLIASFAVVMFAFGGIEIIGVTAGEAKDPQRVIPKAINAVPLRILLFYVLTLFVLMCLYPWPQIGSEGSPFVQIFSNLGIGSAAAVLNVVVISAAISAINSDIFGAGRMMYGLAHQGHAPRSFGKLSKHGVPWMTVVVMGAALLIGVLLNYLIPENVFLLIASIATFATVWVWLMILLTQVAMRRSMSREEVAQLKFPVPFWPYGPAMAIAFMVFIFGVLGYFPDTQAALIVGVIWVVFLVASYLLWCKPRAGQGQPVAEPVELHR

SEQ ID NO: 9911 - protein, 349 aa, Oryza sativa; identical to SEQ ID NO: 5587

SEQ ID NO: 9912 - protein, 294 aa, Saccharomyces cerevisiae
TTPLVHVASVEKGRSYEDFQKVYNAIALKLREDDEYDNYIGYGPVLVRLAWHTSGTWDKHDNTGGSYGGTYRFKKEFNDPSNAGLQNGFKFLEPIHKEFPWISSGDLFSLGGVTAVQEMQGPKIPWRCGRVDTPEDTTPDNGRLPDADKDADYVRTFFQRLNMNDREVVALMGAHALGKTHLKNSGYEGPWGAANNVFTNEFYLNLLNEDWKLEKNDANNEQWDSKSGYMMLPTDYSLIQDPKYLSIVKEYANDQDKFFKDFSKAFEKLLEDGITFPKDAPSPFIFKTLEEQGL

SEQ ID NO: 9913 - protein, 105 aa, Parthenium argentatum
FNEVEFQTASGQMIDLITTLVGEKDLSKYLLPIHRRIVQYKTAYYSFYLPVACALLMAGESLDNHVNVKNILIEMGIYFQVQDDYLDCFADPEVLGKIGTDIQEF

SEQ ID NO: 9914 - protein, 248 aa, Neisseria meningitidis MC58
MSTQDLNGKIALVTGASRGIGAAIADTLAAAGAKVIGTATSESGAAAISERLAQWGGEGRVLNSAEPETIESLIADIEKAFGKLDILVNNAGITRDNLLMRMKEEEWDDIMQVNLKSVFRASKAVLRGMMKQRSGRIINITSVVGVMGNAGQTNYAAAKAGLIGFSKSMAREVGSRGITVNCVAPGFIDTDMTRALPEETRQTFTAQTALGRFGDAQDIADAVLFLASDQAKYITGQTLHVNGGMLMP

SEQ ID NO: 9915 - protein, 429 aa, Phaseolus vulgaris
MAQILAPSTQWQMRFTKSSRHASPITSNTWSSLLMKQNKKTSSAKFRVLAVKSDGSTINRLEGLLNLDITPFTDKIIAEYIWIGGTGIDVRSKSRTISKPVEHPSELPKWNYDGSSTGQAPGEDSEVILYPQAIFKDPFRGGNNILVICDAYTPAGEPIPTNKRHRAAEVFSNPRVIAEVPWFGIEQEYTLLQTNVNWPLGWPVGGYPGPQGPYYCSAGADKSFGRDISDAHYKACLFAGINISGTNGEVMPGQWEYQVGPSVGIEAGDHIWASRYILERITEQAGVVLSLDPKPIEGDWNGAGCHTNYSTKSMREDGGFEVIKKAILNLSLRHKEHISAYGEGNERRLTGKMETASINTFSWGVANRGCSIRVGRDTEKNGKGYLEDRRPASNMDPYVVTSLLAESTLLWEPTLEAEALAAQKLALKV

SEQ ID NO: 9916 - protein, 171 aa, Zea mays
  unsure (1)..(171): unsure at all Xaa locations
LSGSTGXLAGCLVALKQLLPNLELPMCFFWKIKAKWMPFFVVCFSSIMAFIVPDSINFLPTLVSGMYVSWLYLRYFQRNPLTGLKGDPSDDFSFPSLFPAAMRPVTDPVANLFDRMLCARSRPLEVALPISDPTKASRRRERGERVLEERLAADNAGDTEASPRGHGTAED

SEQ ID NO: 9917 - protein, 1171 aa, Oryza sativa; identical to SEQ ID NO: 2303

SEQ ID NO: 9918 - protein, 564 aa, Brassica napus
MQNLLEKLRPLVGARAWDYCVLWRLNEDQRFVKWMGCCCGGTQLIEEAGTEEFSFGSCRDVMFHHPRTKSCEVLSHLPSSIPLDSGIYAETLLTNQTGWLTESSEPGFMQETICTRVLVPIPGGLVELFATRHVAEDQNVVDFVMGHCNMLMDETVTINMMVGDEVESKPYGMLLPGDIHQKGSSKDEEMMNLPSPYDISADQIRLNFLPQMNDYESQQHLKMKSDYDHHHQTLGYDLPENGNNMNPFNTVAEEGMSVMGEASLLVNEQQVGNDKEMNENATGSDCSDQIDDEDDPKCKKKTGKHTQAKNLHAERRRRKKLNDRLYALRSLVPRITKLDRASILGDAINYVKELQNEAKELQDELEDNSETEDGSNRQQGGMSMNGTVLTGFHQGLSCNSNLPDMKQDVDLENCNDKGQEMEPQVDVAHLDGREFFVKVICEYKPGGFTRLMEALDSLGLEVTNANTTRFLSLVSNVFKVEKNDSEMVPAEHVRNSLLEITRNTSRGWHDDQMATGSIQNEKNEVGYQHYDDHHHHGGHHQLHDHQMNQSAHHHLQHINHYQNQ

SEQ ID NO: 9919 - protein, 182 aa, Glycine max
CHYCCRNFPTSQALGGHQNAHKRERQHAKRAHLQSTMVQGSTFSDAHHVYNLMNYRYGSSIPTPPPPTMPYPTWNNNNNNTRFYGTTTTTSFSHHHQHQQQPINGSPLAFWRIPNGTTINNNNPSFSHERSSTLPPLFATEEIANVRASSQVVVGASGPMTTQNRYVYDSKQRDHVSLDLHL

SEQ ID NO: 9920 - protein, 111 aa, Glycine max
MEFCPSCGNMLQYELPYMGRPSRFFCSACPYVCHIENRVEIKRKQRLVRKEIEPIFSEDDMTNAPSTEATCPFCGHGKAAFKEFQTRSADEPATLFYKCLNNDCKKQWREG

SEQ ID NO: 9921 - protein, 355 aa, Azoarcus evansii
MIPEFIDTWQMTEPGKLQKTRVPMPELGPGDVVVKIAGCGVCHTDLSYFYMGVPTVQKPPLSLGHEISGTVIGGEASMIGKEVIVPAVIPCGECELCNTGRGNRCLSQKMPGNSMGIYGGYSSHIVAQSKYLCVVENRGGTPLEHLAVVADAVTTPYQAAVRADLKKDDLVIVIGAAGGVGSFMVQTAKGMGAKAVIGIDINEEKLVMMKDFGADFVINPKDKSAKDIKELFKGFCKERGLPSNYGWKIFEVTGSKPGQELALSLLSFTGKLVIVGYGTAETTYMLSKLMAFDAEIIGTWGCPPDPYAAVRDMCLDGRIKLGPFVETRPMSQIEQVFDEAHHGKLKRPVILTPDF

SEQ ID NO: 9922 - protein, 281 aa, Oryza sativa
MLFRFVSCNVQLCGIIELPHWVRKKRTRRKSDGPDSIAETIKWWKEQNQKLQEENSSRKAPAKGSKKGCMAGKGGPENSNCAYRGVRQRTWGKWVAEIREPNRGRRLWLGSFPTALEAAHAYDEAARAMYGPTARVNFADNSTDANSGCTSAPSLMMSNGPATIPSDEKDELESPPFIVANGPAVLYQPDKKDVLERVVPEVQDVKTEGSNGLKRVCQERKNMEVCESEGIVLHKEVNISYDYFNVHEVVEMIIVELSADQKTEVHEEYQEGDDGFSLFSY

SEQ ID NO: 9923 - protein, 353 aa, Acinetobacter sp.
MSYQVTIEPAGTIIQVEEDQTILDAALRQGVWLPFACGHGTCGTCKVQVTDGFYDVGEASPFALMDIEREENKVLACCCKPESDMVIEADVDEDEDFLGYLVQDYQAKVIEITDLSPTIKGVRLQLDRPMQFQAGQYINIQLPNIEGTRAFSIANTPSEANLIELHIRKVQGGAATRYVHDELSVGEEMALSGPYGQFFVRKSDQQNVIFIAGGSGLSSPQSMILDLLEQGDTRIIYLFQGARDVAELYNREKFEQLVKEYPNFRYIPALNAPKPEDQWTGFTGYVHEAVANYFENKCSGHKAYLCGPPPMIDAAISTLMQSRLFEKDIHTERFLSAADGANGQSRSALFRHI

SEQ ID NO: 9924 - protein, 480 aa, Lactococcus lactis subsp. lactis
MIKFFNSMIFKGVVAHLLLFVILFMSSFDYNFAHLSTFIGYYLFSLVFVLVFLNQQHRMIVNVSKQMNDIKNGYLNRDKIPKGTSEINELYDEILKLGEDIVRTQNNLENQRNQLDSILAYMVDGVIATDRRGNIIMANKSALHYLNTDNDLLMQKNIVEVLKITDQYNFYDLLEKEPEITIETHDSGNESISLHIKFALFRRESGFISGIIAVLHDMTEQDKAERERRLFVSNVSHELRTPLTSVKAYLEALEDGAIEDKETASSFINVSLTETNRMIRMISDLLTLSRMDQDRIVLNKEMINLIAFLDYQINRLDQILETESNDLISSNFTLVRKYSEQPIWVEIDTDKIAQVIDNIIGNAIKYSPKGGTITISVEKRESDVLISISDQGMGIPKSDLLKIFDRFYRVDNASRNSKVGGTGLGLSIVHDIVKIHGGTIFASSEGEGKGTTFSFTLPYSLEAADDWDDGTDEFEFEDNE

SEQ ID NO: 9925 - protein, 363 aa, Buchnera aphidicola (Rhopalosiphum padi)
MKKKFRIAVLPGDGIGPEIMREAYKILNILEKNFSLPLEIREFSVGGIAIDREGIALPEETLRGCENSDAILFGSVGGKKWDYLPIESRPERASLLPLRKHFNLFSNLRPAKLYSDLKNLSPLRSNIVRNGFDILCVRELTGGIYFGKPKGRSKNENGEYSFDTEIYYDFEIKRIAHLAFELASSRRCKVCSIDKSNVLASSILWREIVEEVSKNYPNIILSHLYIDNACMQIIKNPSQFDVLLCSNIFGDIISDECAMITGSIGMLPSASLNSKKFGLYEPAGGSAPDIEGKNIANPIAQILSLSMLIRHSMNLNEIADKIDSSVYRALKAGYRTLDISDGKNYIKTNEMGDIIAKFLINGK

SEQ ID NO: 9926 - protein, 794 aa, Nicotiana tabacum
MAILDKKTHLFFSLVLLCFLISLSPISSLSTVAISKTSNQTLICALISSSSFPQQSSLNCTSFPEGIQIPLNPSVYFSGIVGGNGFLCGLTSSYSSSTSIMVCWRFLNNGTNLSYKSIYLGPLITNLDSGNSHICGIVNGTNNRLECWQWHEFNSSNRSLMTSNLAVGEDFVCGLLTFGQIQCLGSFRNVTDAIPSGNYSEIASGSQHVCAISKNNSLVCWGNMVGEKPIGQFKSLALGDNRSCALRINGKVVCWGETGFSLPSSLSGEFFETLEAKQDIFCGIVTSNYSLFCWGNDIFNSNPAVFNGVGVVPGPCTTSCPCVPLPNYESFCGRGLMICQHCVGQDSSVNPPIVNGSGPSLPPLPPQPMPSPTPSQTSGRSDPWSRRNVAFLVVGCVGSLMMLSVLVILFFKYCKIRGCRVHDSGRLDEAGSPPQQGSQTSRVQDQQGTPQPPVLEKRLSQLISIGNGGHLDEFSLQVLLQVTNNFSDEHKIGSGSFGAVYHATLEDGREVAIKRAEASASSSYAGGTKYRQEDKDNAFLNELEFLSRLNHKNLVKLLGYCEDNNERVLIFEYMNNGTLHDHLHGLESSPLMSWVGRIKVALDAARGIEYLHEYAVPTVIHRDIKSSNILLDVTWNAKVSDFGLSLMGPQDDETHLSMRAAGTVGYMDPEYYRLQQLTTKSDVYSFGVMLLELLSGYKAIHKNENKVPRNVVDFVVPYIVQDEIHRVLDRRVPPPTPFEIESVAYVGYLAADCTTLEGRDRPTMTQVVNTLERALKACLATPIFSRSNTDDSST

SEQ ID NO: 9927 - protein, 433 aa, Escherichia coli
MMGLAYLTPMTVFDTFGIVSGISDGHVPASYLLALAGVLFTAISYGKLVRQFPEAGSAYTYAQKSINPHVGFMVGWSSLLDYLFLPMINVLLAKIYLSALFPEVPPWVWVVTFVAILTAANLKSVNLVANFNTLFVLVQISIMVVFIFLVVQGLHKGEGVGTVWSLQPFISENAHLIPIITGATIVCFSFLGFDAVTTLSEETPDAARVIPKAIFLTAVYGGVIFIAASFFMQLFFPDISRFKDPDAALPEIALYVGGKLFQSIFLCTTFVNTLASGLASHASVSRLLYVMGRDNVFPERVFGYVHPKWRTPALNVIMVGIVALSALFFDLVTATALINFGALVAFTFVNLSVFNHFWRRKGMNKSWKDHFHYLLMPLVGALTVGVLWVNLESTSLTLGLVWASLGGAYLWYLIRRYRKVPLYDGDRTPVSET

SEQ ID NO: 9928 - protein, 464 aa, Triticum aestivum
  unsure (1)..(464): unsure at all Xaa locations
AICTGPGLGSSLRLRPSTPAPSPPPPSLLPPSPPLLLFLLHPEEARARARSAWWLARDGDPTPGAADRSSVFRKLRAKSDNKMCFDCNAKNPTWASVTYGVFLCIDXCSAVHRSLGVHVSXFVRSTNLDSWTPXESVKMMVYXGNNRAXAFFKQHGRTEDGKIGGXYTSRRLLTYTEHVATSXSRFLKVPQKSGNNSRPPSXSQLLRCSSQAGAFPEFKLAEVPKDRXRQSLERSLEIRPAGLGGPKKLGAMSEGLGVKKPNTKSNERQYDRKPEEPKPALPTITACXHEVKKVAHPYIARFQYLSQXPSTETKTGGGNKTGHVAAPKXSSDFFHEYGMDNGFQRKTGTAASKTQIEETDEARKKFSNAKASSSSQSFGNTDREQKEAQLSLQKFSGSSSISSADLFGRDTNDSDLDASAADLINRISFQATQDLSSLKNMAGETGKKLTSFVSNFITDLDRIL

SEQ ID NO: 9929 - protein, 325 aa, Triticum aestivum
  unsure (1)..(325): unsure at all Xaa locations
MSFVHSPLLAGAWMSILVTSVGICNQDETLIDKHGLRFAHTWTVMHFATVTLLTLVMKWLGYVQPFHLPLSELVKFVFFANLSIVGMNVSLMWNSVGFYQIAKLSIIPLLCIMEVLFENFRYSRDTKLSIXVVLVGVGXVCTVSDVSVNAQGLVAAVIAVCGTALQQHYVNYLQRKYSLNSLKLLGHTAPAQAASLLILGPFVDFWLTRNRIDTFHYTSTVTFFIVLSCVISVGTNLSQFICIGRFTAVTFQVIGHMKTILVLTLGFLLFGKEGLNFHVAFGMILAIVGMIWYSSASSKPGGKERQGLASEKAQKSPQSELDDKV

SEQ ID NO: 9930 - protein, 858 aa, Coccidioides posadasii
MWLGWLPAVFVLVAGGAAEKEWAFSPPYYPSPWASGQGEWSEAYNKAREFVSQLTLTEKVNLTTGVGWMQEACVGNVGSIPRLGFRSLCMQDGPLGIRFADHVSAFPAGINVGATWSKSLAYLRGKAMGEEHRDKGVDVQLGPAVGPLGRSPDGGRNWEGFSPDPVLSGYLVAETIKGIQDAGVIACVKHFIVNEQERFRQAPEAQGYGFNISESSSSNVDDVTMHELYLWPFADAVRAGVGSVMCSYNQINNSYGCSNSYTQNKLLKGELGFQGFIMSDWQAHHSGVGDDLAGLDMSMPGDTLFLTGKSYWGPNLTIAVTNGTIPQWRLDDMAVRIMAAYYKVRRDQTQVPINFNSWTRDEFGYLHAGGQEGYGRVNQMVNVRGRHAVIARKVASASTVLLKNRGVLPLKGKEKLTAVIGEDAGPNLWGPNGCPDRGCANGTLAMGWGSGTADFPYLVTPAQAIENEVITKGVGEAMSVFDNYATSQIESVVSQATVSLVFVNAGAGEGFISVDGNEGDRKNLTLWKNGDELIKTVASMCNNTVVVMHTAGPVLVNKWYDHPNVTAILWAGLPGQESGNALGDVIYGRVNPGAKSPFTWAATSEDYGVSILKEPNAATKAPQIDFEEGIFIDYRAFDKSNTKPIYEFGFGLSYTTFTFSDLEVQPLRANPYVPTSGFTDSAPVFGNSTDHLQFPAGFDPVHLYIYPWLNSTDLKESSMDRDYGLPTEKYVPPGATDGGPQALLPAGGGPGGNPGLYEELYRVSVTITNTGSVTGDEVPQLYLSLGGPNDAKIVLRGFDRVTLRPGENTVWQTTLTRRDISNWDPVTQNWVVTSHPKMIYVGNSSRNQPLSAPLAPSS

SEQ ID NO: 9931 - protein, 199 aa, Fusobacterium nucleatum subsp. nucleatum ATCC 25586
MGNLKNHLMKYERRPIMKIYDFKVKNRKGEDISLENYKGKVLLIVNTATRCGFTPQYDELEALYSKYNKDGFEVLDFPCNQFGNQAPESNEEIHTFCQLNYKVKFDQFAKVEVNGENAIPLFKYLKEEKGFAGFDSKHKLTSVLTEMLSKNDPDFAKKSDIKWNFTKFLVDKSGNVVARFEPTTSAEVIEQEIKKLLEV

SEQ ID NO: 9932 - protein, 253 aa, Zea mays
SARGFLFEPIQGEAGVVIPPDGYLKGVRDLCSKHNVLMIADEIQTGIARTGKMLACDWENIRPDMVILGKALGAGVVPVSAVLADRDVMLCIRPGEHGSTFGGNPLASAVAVASLKVVRDEGLVERAAKLGQEFRDQLQKVQQKFPQILREVRGRGLLNAVDLNNDALSPASAYDICIKLKERGILAKPTHDTIIRLAPPLTISPEELAEASKALSDVLEHDLPQLQLQKQIKKPESEAEKPVCDRCGRDLYG

SEQ ID NO: 9933 - protein, 389 aa, Oryza sativa
  unsure (1)..(389): unsure at all Xaa locations
MGYVGQHGVATLRRYKYSGVDHSLVAKYILQPFWSRFVNLFPLWFPPNMITLTGFMFLLTSAFLGFFYSPHLDTAPPRWVHLAHGMLLFLYQTFDAVDGKQARRTNSSSPLGELFDHGCDALACAFEALAFGSTAMCGKATFWYWFIAAVPFYCATWEHFFTNTLILPIVNGPTEGLMLIYLCHFFTFFTGAEWWAQDFRKSIPLLNWVPLVPEVPVYGXIALFLMIAFAVIPTIGSNIHNVYKVVEARKGSMLLALAMLFPFGLLLAGVLVWSYLSPSDIMRNQPHLLVIGTGFAFGFLXXMILAHLCDEPKGLKTGMCMSLAYFPFAIANALTARLDDGNPLVDEQLVLLMYCLFTVALYMHFATSVIHEITNALGIHCFRITRKKA

SEQ ID NO: 9934 - protein, 364 aa, Glycine max
ASLVCLIILPVIFVQGKPSKAVVDSLALFGAGAMLGDAFLHQLPHAFGGEHSHSHGDHGDHDHHDSSGHDHAHSLADLSIGISILAGIVLFLLVEKLVRYVEENSGRANSWTHGHHHHHHNSKEKLKDDNSSTANFQSESNNAKEERLIDERKEDDQVSLDSLKGDNPSQSESSLRKRIGSNVTKGDNLDDNTVDSATYNVKSSNVKEPVRSPTSLVFGYLNLFSDGVHNFTDGMALGSAFLLYGSVGGWSRTMFLLAHELPQEIGDFGILIRSGFSIPKALFFNFLSALVALAGTALALLWGKDPGQSSLIEGFTAGGFIYIAIAGVLAEMNNGGNTTLRSTVVQIISLTIGMAVALGISLVE

SEQ ID NO: 9935 - protein, 245 aa, Goupia glabra
ALSIAGAVQSQKLAVRAISQLQSLPGGDIKVLCDTVVESVRELTGYDRVMVYKFHEDEHGEVVAENKRPDLEPYIGLHYPSTDIPQASRFLFKQNRVRMIVDCHATPVRVIQDKGLMQPLCLVGSTLRAPHGCHAQYMANMGSTASLAMAVIITGNDEEAIGGRNSMRLWGLVVCHHTSARCIPFPLRYACEFLMQAFGLQLNMELQLASQLSEKRVLRTQTLLCDMLLRDSPTGIVTQSPSIMD

SEQ ID NO: 9936 - protein, 559 aa, Trichodesmium erythraeum IMS101
MTNESYSGIVDNFLKTNNMKPITILGSTGSIGTQTLNIVAHNPNKFRVIGLAAGSNVEILAQQVRQFCPQIVAINDKSKFRELQEAIADLQPQPILVADQDGVIQVARYGESEVVVTGIVGCAGLLPTIAAIEAGKDIALANKETLIAAGPVVNPLIEKYRVKLLPADSEHSAIFQCLQGLPLEGLRRIILTASGGAFRDWPIEKLSKVKVADAIKHPNWSMGKKITVDSATMMNKGLEVIEAHYLFGLNYDNIDIVIHPQSIIHSLIELQDTSVLAQLGWPDMRLPLLYALSWPERIYTDWKQLDLVKAGSLTFKEPDNLKYPCIQLAYTAGRMGGSMPGVLNAANEQAVALFLEEKIAFLDIPKLIEYVCEKHNSNYQENPSLDDILAADKWARKEVLAASSIVNNSLINLSLVNLEENPTEIFTKIENEQIEFNDFYQRGLAKYEQQDYQSALAEFDRAIDIDSSHIDAYIYRGDAKDKLEDYEGAIADYNEAIKIDSSHPKAYYSRENVLRKAGDSREAIADYDQAIKLDPNYTPTKNWSHVHVNSETTEKLRQE

SEQ ID NO: 9937 - protein, 292 aa, Caulobacter crescentus CB15
MSNKRFSLALHGGAGAKRGHDYGVEIAHMRGLVEAARDRLAAGAGALDVAVETVVGLEASGLYIAGKGASPNADGEYELDASLMDGATLRAGSVAALQGFKSPILAARAVMEHTPHVMLAGQGAIAFAREQGLETVEDPDAWFTRAGAFEDNHPPDALPTGTVGCVVRDGEGRLAAATSTAGVFGKRPGRVGDSPIIGAGAWADGHAAVSCTGQGEYFIRAAVAAQIAHRVRFGGEALDAAAQAAIDSVAALGGHGGLIAVDRDGNIAMPFVSSGLKRAALMPDGTIVSAAF

SEQ ID NO: 9938 - protein, 484 aa, Staphylococcus aureus subsp. aureus Mu50
MEDNKMNRSLNSRHISMIAIGGAIGTGLFVATGNIISQAGPGGAILAYLVIGVMLYFLMSSIGELATFYPVSGSFSSYSTRFIDSSLGFTMGWLYWALWSLVTSVDVIVASNVLYFWDTFKFFHPITWSLIFITILLLLNIFSVKSFGETEFWLSLIKVLTIIVFVIFGFLMIFGILGGHTYGFENYTKGQAPFVGGISGFLGVLLVAGFSVGGTEVVAVTAGESDDPKKSMPKAIKQVFWRILLFYVLSIAVIGAIIPYTDPSLLRASSSISQSPFTIVFDRVGIAFAASVINAVILTSLLSAANSGVYTTGRMLYSLSSDKKAPQFLSKLNKTTKLPLRALLTTYAVVVIVIIYANFNSNAVFNLLEIIGSMIIVVWGSSIWSQIRLRQAIKKQGQDPNKVLPYKAPFYPLGPIIVITTLLFLLFGGSVEYILKDQWLNAFKNFLPLIILALIYFIHKIIHKTKFVKLETINLKPHDYDNQN

SEQ ID NO: 9939 - protein, 139 aa, Pennisetum glaucum
KKHVMSERKRREKLNEMFLALKSLVPSIHKVDKASILAETIAYLKELQRRVQELESSREPMISRPSETRKVTRRHDDDEPVTKGSGSKRKGSELGSGVAREHPTKDDTTNVTVTISNKEVLVEVQCRWKELMMTRVFDA

SEQ ID NO: 9940 - protein, 467 aa, Pseudowintera axillaris
SGKPFYAIIHRVTGSLIVDFEPVKPYESPMAAAGALQSYKLTAKAISRLQSLPGGSLKRLIDTVVQGVFELTGYDRVMAYKFHEDDHGEVISEVTKPDLEPYLGLHYPATDIPQAARFLFMKNKVRMICDCNAKPMKVYQDEKLTFDLTLCGSTLRAPHSCHLQYMENMGSIASLVMAVVINEREEKDENSGSEQQQEQPKRKRLWGLVVCHNTTPRFVPFPLRYACEFLAQVFAIHVNKELELENQIQEKNILRTQTLLCDMLMRAAPLGIVTQSPSILDLVKCDGAVLLYQNKIWRLGIAPTESQILDIALWLSEYHMDSTGLSTDSLHDAGYPGALSLGDVVCGMAAVRINSKDTLFWFRSHTAAEIRWGGAKHDPNQKDDGRKMHPRSSFKAFLDVVKTRSSPWADYEMDATHSLQLILRGSLKEAEKVDTGTMIHSRLNDLKLEGVVELQAVTNQMVRLMET

SEQ ID NO: 9941 - protein, 785 aa, Schizosaccharomyces pombe
MIGSINESPIEEHMNDSPSTKEKADSVDISDYIVSHSDDSLSKDIKKDTKSFLDVEHGEISTVDEFEEDSPYPEVRAAVPPTDDPSMPCNTIRMWTIGLIYSTVGAAVNMFFSLRNPTVTLSVLISELLAYPALQIWDLIFPDREFRIGRLKFNFKPGPFNVKEHALIVVMSSVSFGNAYSTDIILAQRVHYKQRFGFGYEICLTLATQLIGYGLAGLSRRLLVRPASMLWPVNLVQCTLIKTLHRKDLRNAVANGWRISPFRFFLYVFIASFIWNWFPSYIFQALSLFAWVTWIRPNSPTVNQIFGESTGISILPMTFDWNQISAYILSPLMAPADALMNILLGVILFFWIVTPALNFTNTWYGDYLPISSSGIIDHFGNSYNVTRILTKDATFDLDAYQNYSPIFMSTTYALAFGLSFASITSVIFHVILYHGKEIYDRLRDPPAPDIHEKLMKAYDEVPFYWYLSVFLAFFGMMMGTIYGWKTETPWWVIIVGVIFSAVWFIPIGIVQAITNIQLGLNVFTEFIVGYMYPGRPLAMMIFKTVGYITMTQGLAFAADLKFGHYMKLPPRIMFYTQMIATIWSCFVQIGVLDWALGNIDNVCQADQPDNYTCPNATVFFNSSVIWGVIGPKRMFSGKNTYTGLQYFWLAGVLGTILFWALWKKWPQKWWGQLNGPLIFGGTGYIPPATPVNYLAWSGIGLFFNYYLKKIFADWWQKYNFTLSAALDTGTQLSVIILFFCLQLPMVNFPDWWGNDGAFNTLDATGAAVRKLVNESAGEFFGPAEW

SEQ ID NO: 9942 - protein, 311 aa, Arabidopsis thaliana
MTTATNKQVILKDYVSGFPTESNFDFTTTTVELRVPEGTNSVLVKNLYLSCDPYMRICMGKPNPSTAALAQAYTPGQCYHLTHEHFKIQHTDVPLSYYTGLLGMPGMTAYVGFYEICSPKKGETVYVSAASGAVGQLVGQFAKMMGCYVVGSAGSKEKVDLLKTKFGFDYAFNYKEEPDLSAALKRCFPNGIDIYFENVGGKMLDAVLMNMNMHGRIAVCGMISQYNLENQEGVHNLSNIIYKRIRIQGFVVSDFYDEYSKFLEFLHPHIKEGKITYVEDVADGLEKGPEALVGLFHGKNVGKQVVVIARE

SEQ ID NO: 9943 - protein, 752 aa, Geobacillus stearothermophilus
MENQNRQNAAQCPFHGSVTNQSSNRTTNKDWWPNQLNLSILHQHDRKTNPHDEEFNYAEEFQKLDYWALKEDLRKLMTESQDWWPADYGHYGPLFIRMAWHSAGTYRIGDGRGGASTGTQRFAPLNSWPDNANLDKARRLLWPIKKKYGNKISWADLFILAGNVAIESMGGKTIGFGGGRVDVWHPEEDVYWGSEKEWLASERYSGDRELENPLAAVQMGLIYVNPEGPDGKPDPKAAARDIRETFRRMGMNDEETVALIAGGHTFGKAHGAGPATHVGPEPEAAPIEAQGLGWISSYGKGKGSDTITSGIEGAWTPTPTQWDTSYFDMLFGYDWWLTKSPAGAWQWMAVDPDEKDLAPDAEDPSKKVPTMMMTTDLALRFDPEYEKIARRFHQNPEEFAEAFARAWFKLTHRDMGPKTRYLGPEVPKEDFIWQDPIPEVDYELTEAEIEEIKAKILNSGLTVSELVKTAWASASTFRNSDKRGGANGARIRLAPQKDWEVNEPERLAKVLSVYEDIQRELPKKVSIADLIVLGGSAAVEKAARDAGFDVKVPFFPGRGDATQEQTDVESFAVLEPFADGFRNYQKQEYSVPPEELLVDKAQLLGLTAPEMTVLVGGLRVLGANYRDLPHGVFTDRIGVLTNDFFVNLLDMNYEWVPTDSGIYEIRDRKTGEVRWTATRVDLIFGSNSILRSYAEFYAQDDNQEKFVRDFINAWVKVMNADRFDLVKKARESVTALQLIFHIRSKMVTAVSK

SEQ ID NO: 9944 - protein, 225 aa, Oryza sativa (japonica cultivar-group)
MDSLYDISCFAAGLAGNIFALALFLSPVTTFKRILKAKSTERFDGLPYLFSLLNCLICLWYGLPWVADGRLLVATVNGIGAVFQLAYICLFIFYADSRKTRMKIIGLLVLVVCGFALVSHASVFFFDQPLRQQFVGAVSMASLISMFASPLAVMGVVIRSESVEFMPFYLSLSTFLMSASFAFSLMGLDLSWEQCSWRSTLTTAENGEARIHLHRCCSHDQNRSE

SEQ ID NO: 9945 - protein, 172 aa, Bacillus subtilis subsp. subtilis str. 168
MGKKIAVVLTYYFEDSEYTEPAKAFKEAGHELTVIEKEKGKTVKGKQGTAEVTVDASIDDVNSSDFDALLIPGGFSPDQLRADDRFVQFTKAFMTDKKPVFAICHGPQLLINAKALDGRKATGYTSIRVDMENAGADVVDKEVVVCQDQLVTSRTPDDIPAFNRESLALLEK

SEQ ID NO: 9946 - protein, 180 aa, Zea mays
  unsure (1)..(180): unsure at all Xaa locations
MSMPETGQAAERDEQQQSRGIALMQGICAVVYRKADNTPCPIKQGLYLGSVGAAFNKDALKSLNITHILIVAKSLDPVFPAEFNYKKIEVLDIPDTDLLKHSDECFGFIDEAISSGGNVLVHCFAGRSRXKHQMSLESALSLVRSKRPQVAPNGGFISQLEKFQKSLQVEQEWKMPPGQH

SEQ ID NO: 9947 - protein, 152 aa, Zea mays
MVKAVAVLGSSDGVKGTIFFTQEGDGPTAVTGSVSGLKPGLHGFHVHALGDTTNGCMSTGHHYNPASKEHGAPEDENRHAGDLGNVTAGADGVANINVTDSQIPLTGPNSIIGRAVVVHADPDDLGKGGHELSKSTGNAGGRVACGIIGLQG

SEQ ID NO: 9948 - protein, 326 aa, Rickettsia sibirica
MQITVREALRDAMQEEMIRDDKVFVIGEEVAEYQGAYKVTQGLLEQFGPKRVIDTPITEYGFAGLAVGAAFAGLRPIVEFMTFNFAMQAFDHIVNSAAKTHYMSGGQVKCPIVFRGPNGAASRVAAQHSQNYTACYSHIPGLKVVAPYSAEDHKGLMLTAIRDDNPVVFLENEILYGHSFDVPKTIEPIPFGQAKILREGSSVTIVTFSIQVKLALDAVNVVQNDNIDCEVIDLRTIKPLDTETIIESVKKTNRLVVVEEGWFFAGVGASIASIVMKEAFDYLDAPIEIVSGKDLPLPYAVNLETLALPSESDVIEAVKKVCYYSI

SEQ ID NO: 9949 - protein, 219 aa, Malva pusilla
MADEVVLLDFWPSPFAMRAKLALELKGINYECKQQDLLNKDPLLLQMNPVHKKIPVLIHNGKPVCESLVIVRYIDEVWNHVSPLLPSDPYRRSQALFWTDYIEKTVYGVGRRIFIATGEEQEKAKEELIQFLKTIETELGEKLYFGGDSIGFVDVALLPFTAWFYTYETCGNFSIEESCPKLIEWVKRCTQKESVSKAIAHPHKIYDFFLEYKEKLGGN

SEQ ID NO: 9950 - protein, 163 aa, Thermosynechococcus elongatus BP-1
MSQSLCPVPADQRPINEYRDLKASWFFEWSSWPRPRFQRRLLLLWGMAWFVSGPVAIASFSLKEAPFHTFLAAALGANVLLLLILLRLVLGWAYVGDRLQRPTVVYEETGWYDGQEWQKPEPELAQDRLIYTYELRPILQRLQVTLLALVIFSLGLALGWALL

SEQ ID NO: 9951 - protein, 587 aa, Bacillus anthracis str. A2012
MNKFRSRLLFTFVSLIVFILVGLGLLLETVFENYYIDHAKERMVKETEYVAVLAEEQGFDDVLKNPYVFEKLEEKIQASIAFVDEKKKVQYSGGEQSAFSQGIMKELSSETKKQRNKVITKEADQNNEFYHAVFVQDVTGKQGYILVKSTIEPLKDVHQKTWGLLIIGFVIACLVVVFLGMKITGQYIRPIESVTKVAIELAKGNYKARAYESHSDETGMLSKAINILARNLQEMTLEQEMQQDRLHTLIENMGSGMILIDSRGYINLVNRSYKETFHVTDEEYLDRLYYESFHHTEIIELVEEIFMTEVKVRKQMLLPLGIERKHFEVYGAPIIGTNHEWKGIVLVFHDITELKKLEQMRKDFLANVSHELKTPITSIKGFSETLLDGAMDNKKFCEHFLHIILKESERMQGLIEDLLDLSKIEQQGFKLSMGTVDMKGLLEDIHMVLDNKAGEKEISLQVNTLKRVSVIGDPSRLQQIFINLMNNAIVYTPAGGVVSVELAEDKYNAYIKVSDTGIGISKDEIPRIFERFYRVDKARSRNTGGTGLGLSIVKHLVEAHHGTITVDSEVGEGTTFTVVLPKSATEK

SEQ ID NO: 9952 - protein, 281 aa, Clostridium perfringens str. 13
MAINWFPGHMVKTKREIQNNLKLVDAVIEIRDARIPKSSKNPDIDTLCAGKPRVILLNKSDLTDPKVTKAWKDSLTNDETIVLEVNALKGEGLNAIKPALLKLLKEKHDRLKAKGLAKITTRAMVVGIPNVGKSTFINKMAKNNIAKTGDRPGVTKNKQWIKTKLGIELMDTPGVLWPKFEDEIVGLNLAFTGAIKDEIMDTEELALKLVERLQETNPEELMTRYKLTELHENPLDNLDAIARKRGAIMSGNQIDYNRIAGIILDEFRGGKIGKISLEKPE

SEQ ID NO: 9953 - protein, 300 aa, Zea mays
  unsure (1)..(300): unsure at all Xaa locations
MAKDGGPDWNGLFKWSIAHGDGTNPPRALSEEDRKWFMEAMQANTIDVVKRMKEITRVMRTPQDVLQSQGVTPENIEDMLDELHEHVESIDMANDLHSIGGLDPLLGYLKNSNAGIRAKAAEVVSTVVQNNPKSQQLVIESNGLEPLLINFKSDPSTNARTKALGAISSIIRHNQPGVSAFRLGNGYAGLKDALGSYDAKLQWKALNLIQYLLHNKADRSFATELGLPKLMMHLAASDDHLVREAALSGLLELSQDQTSGNALPDQDKLKXILKSRIEGISAMDSDDLHAAHEKRSWWTH

SEQ ID NO: 9954 - protein, 308 aa, Thermosynechococcus elongatus BP-1
MPQPTVILHGGAGSSLQDKGGLIPVRQSLHGIVTQVVQALKEGATAIEAVVLGCRLLEDEPRFNAGTGSVLQSDGQIRMSASLMDGQRQCFSGVINVSRVKNPIDLAHWLQQCPDRVLSDVGAAELARELQLPVYQPLTDQRLYEWLEERKGNFSKSMARVVAEGARRGTVGVVVLDQQGHLAVGTSTGGKGFERIGRVSDSATPAGNYANSLAAVSCTGIGEDILDEALAARIVVRVTDGLSLEAAFEKSFREAARRQRDFGAIGLDRQGAIAWGKTCDVLLAAYWNGTAIGDTLELPPGLQVGSQK

SEQ ID NO: 9955 - protein, 414 aa, Idiospermum australiense
SGKPFYAIIHRVTGSLIIDFEPVKPYEAPMTAAGALQSYKLAAKAITRLQSLPSGSMERLVDTVVQEVFELTGYDRVMAYKFHEDDHGEVISEITKPGLEPYLGLHYPATDIPQAARFLFMKNKVRMICDCHARPVKVYQDEKLTFDLTLCGSTLRAPHSCHLQYMENMDSIASLVMAVVINEGEEDDEVESAQQQQQKRKRLWGLVVCHNTTPRFVPFPLRYACEFLMQVFAIHVSKEFELENQLREKNILRTQTLLCDMLLRDAPLGIVTQSPNIMDLVKCDGAALLYGSKIWRLGLTPTDSQIQDIAMWLSEYHMDSTGLSTDSLYDAGYPKALSIDDVVCGMAAVRITAKDMLFWFRSHAAAEVRWGGAKHDPSDKDDGRRMHPRSSFKAFLEVVKTRSLPWKDNEMDAI

SEQ ID NO: 9956 - protein, 186 aa, Escherichia coli O157:H7 EDL933
MGNSPHPMQQRGGSMSKKIAVLITDEFEDSEFTSPADEFRKAGHEVITIEKQAGKTVKGKKGEASVTIDKSIDEVTPAEFDALLLPGGHSPDYLRGDNRFVTFTRDFVNSGKPVFAICHGPQLLISADVIRGRKLTAVKPIIIDVKNAGAEFYDQEVVVDKDQLVTSRTPDDLPAFNREALRLLGA

SEQ ID NO: 9957 - protein, 1130 aa, Solanum tuberosum
MASGSRTKHSHHSSSQAQSSGTSNVNYKDSISKAIAQYTADARLHAVFEQSGESGKFFDYSQSVKTTTQSVPERQITAYLTKIQRGGHIQPFGCMIAVDEASFRVIAYSENACEMLSLTPQSVPSLEKCEILTIGTDVRTLFTPSSSVLLERAFGAREITLLNPIWIHSKNSGKPFYAILHRVDVGIVIDLEPARTEDPALSIAGAVQSQKLAVRAISHLQSLPGGDIKLLCDTVVESVRELTGYDRVMVYKFHEDEHGEVVAESKRSDLEPYIGLHYPATDIPQASRFLFKQNRVRMIVDCHATPVRVTQDESLMQPLCLVGSTLRAPHGCHAQYMANMGSIASLTLAVIINGNDEEAVGGGRNSMRLWGLVVGHHTSVRSIPFPLRYACEFLMQAFGLQLNMELQLASQLSEKHVLRTQTLLCDMLLRDSPPGIVTQSPSIMDLVKCDGAALYYQGKYYPLGVTPTEAQIKDIVEWLLAYHGDSTGLSTDSLPDAGYPGAASLGDAVCGMAVAYITSKDFLFWFRSHTAKEIKWGGAKHHPEDKDDGQRMHPRSSFKAFLEVVKSRSSPWENAEMDAIHSLQLILRDSFKDAEASNSKAIVHAHLGEMELQGIDELSSVAREMVRLIETATAPIFAVDVEGRINGWNAKVAELTGVSVEEAMGKSLVHDLVYKESQETAEKLLYNALRGEEDKNVEIKLRTFGAEQLEKAVFVVVNACASKDYTNNIVGVCFVGQDVTGEKVVMDKFINIQGDYKAIVHSPNPLIPPIFASDENTCCSEWNTAMEKLTGWSRGEIVGKMLVGEIFGSCCRLKGPDAMTKFMIVLHNAIGGQDTDKFPFSFFDRNGKYVQALLTANKRVNMEGDTIGAFCFIQIASPELQQALRVQRQQEKKCYSQMKELAYICQEIKSPLNGIRFTNSLLEATNLTENQKQYLETSAACERQMSKIIRDIDLENIEDGSLTLEKEDFFLGSVIDAVVSQVMLLLREKGVQLIRDIPEEIKTLTVHGDQVRIQQVLADFLLNMVRYAPSPDGWVEIQLRPSMMPISDGVTVVHIELRIICPGEGLPPELVQDMFHSSRWVTQEGLGLSMCRKMLKLMNGEIQYIRESERCYFLIILDLPMTRKGPKSVG

SEQ ID NO: 9958 - protein, 225 aa, Triticum aestivum
MGLAMGKLMLGKIIVETPKHEVLHAGDGYEIRKYPPCVAAEVTYDPKEMKGDRDGGFQVLANYIGAFGKPQNTKPEAIAMTAPVITSSGGGGEAEPIAMTAPVITSSEPEPVAMTVPVLTAEGREEHAGKVTMQFLLPSKYAKAEEAPRPTDERVVLREVGERKYAVVRFSGLAGEKVVAEKAEGLKAALEKDGHAVTGPFVLSRYNPPWTLPPLRTNEVMFPVE

SEQ ID NO: 9959 - protein, 358 aa, Zea mays
  unsure (1)..(358): unsure at all Xaa locations
MATAEVVVANGSGGADTKTAFKEIYSKLKQEMLEDPAFEFTDESLQWIDRMLDYNVLGGKCNRGLSVVDSYKILKGVDVLSKEETFLACTLGWCIEWXLQAYFLVLDDIMDNSQTRRGQPCWFRVPQVGLIAVNDGIILRNHISRILQRHFKGKPYYVDIIDLFNEVEFKTASGQMLDLITTXTRGEKDLTKYNLTVHRRIVQYKTAYYSFYLPVACALXLLAGENLENFVDVKNILVEMGTYFQVQDDYLDCFGDPEFIGKIGTDIEDYKCSWLVVQALERAAENQKSILFENYGKSDPACVAKVKDLYKELKLEEVFHEYERESYNKLIADIEAQPSKAVQTVLKSFLHKIYKRDK

SEQ ID NO: 9960 - protein, 455 aa, Triticum aestivum
MEARRISATPRPCNGRRVVARKRPRQEAVISSVRKLQRREISSRRERSFAMNSAQERFRNIQLQEEFDTHDPKENNALLPYIRKRSKIIEIVAARDIVFALSQSGVCAAFSRVTNKRICFLNGSAGEVVRSLFYNKNNDSLITVSVYGSENFSALRCKTTRIEYIRRGTPDAGFPLFETESLKWPGFVEFDDVNGKVLTYSAQDSTYKVFDLKNYTLLYSISDKNVQEIKISPGIMLLIYTRASAAAPLKILNIEDGTVLKFFNHLLHRNKKVDFIEQFNEKLLVKQDGENLQILDVRNFQLTEVSSTEFMTPSAFIFLYELQLFLTFRNRSVAVWNFRGELVTSFEDHLLWHPDCNTNNIYITSDQDLIISYCKADSTDSSSEENAGSINISNILTGKCLAKIKAGNFNEQKKTWKFQNTITEALEDITALYYDEERDEIYTGNRHGLVHVWAN

SEQ ID NO: 9961 - protein, 430 aa, Methanosarcina acetivorans C2A
MAETKSMGLWASASIGVGAMVGAGIFSIFGTAAQISGNAVYVSFIIAGMIALLNTYSYAKMGVRYPSAGGPVEFMLKGFGDGILSGGLNLLLWVGYVFGLALYAKGFSYYAITFLPAGSAPVWTSFFATAIILAFTAINFRGAKTVGKSELFIVSIKVGILLLFAAAGMFYVTPGNLSISAWPAPKNLFFGAGMVFLAYQGFGLITNAAEDMKNPEKNLPRALYLSVVLVIIIYVSVSLAVIGNLSVPEIQNAQDYALAAAAKPFLGDIGFKIMAFAALFSTSSAINASLYGGANVSYILAKDGELPEIFERKVWHRSPEGLFITSSLVILCANFLQLEGIGMLASTCLLMVYVAVNISHLRLLKETGAKSYIIWASLLSSLTFFCVLLYYEFMHSKTTLGLLGFTVFCCFAAEWTYRKYSGRLIKERTG

SEQ ID NO: 9962 - protein, 345 aa, Ralstonia solanacearum
MKALVYEGPGKISLENKPKPELQAPGDAVVRVTLTTICGTDLHIIKGDVPTCEPGRTLGHEGVGVIESVGAAVTSLKPGDHVLISCISSCGKCANCRRGMYSHCETGGWILGHRIDGVQAEYVRVPHAETSLYKVPPGVDEEALVMLSDIFPTGFECGVLNGRVQPGSTVAIVGAGPIGLASLLTAQFYSPARIIMIDTNVARLEVASGLGASDCINVTRENAAAAVKRLTDGMGVDCAIEAVGVPATFELCQELVAPGGVIANIGVHGVKADLHLETLWSQNIAITTRLVDTVSTPMLLKTVRAGKLLPGQLITHRFKLDDILAAYDTFRNAGETHALKVIIAT

SEQ ID NO: 9963 - protein, 181 aa, Methanosarcina acetivorans C2A
MRIYFNGKTPKISETAFVANSADIIGNVEVESFSSIWFNAVIRGDQNKIKIGNRTSIQDGVVIHADPENGVQIGDNVSVGHGAVLHGCRIEDNVLIGMNATVLNGAEIGKNSIVGANALVPQGKKFPPNSLIIGVPGTIKRETNEAEVEAIKENADEYVEMAKEYREEMKKFAFAASNSMT

SEQ ID NO: 9964 - protein, 404 aa, Glycine max
MPMAATHFQGLGVVTPSFSSSHSNKFLLSSLSERKDGIFMVRSDAARVLKTEGRKHELLVTNAVATKGASSAASTSKSGSGHELLLFEALREGLEEEMERDPCVCVMGEDVGHYGGSYKVTKGLATKFGDLRVLDTPIAENSFTGMGIGAAMTGLRPVVEGMNMGFLLLAFNQISNNCGMLHYTSGGQFKIPIVIRGPGGVGRQLGAEHSQRLESYFQSIPGIQMVACSTPYNAKGLMKAAIRSENPVILFEHVLLYNLKERIPDEEYVLSLEEAEMVRPGEHVTILTYSRMRYHVMQAAKTLVNKGYDPEVIDIRSLKPFDLHTIGNSVKKTHRVLIVEECMRTGGIGASLTAAITENFHDHLDAPIVCLSSQDVPTPYAGTLEEWTVVQPAQIVTAVEQLCQ

SEQ ID NO: 9965 - protein, 312 aa, Hordeum vulgare subsp. spontaneum
MATAGKVIKCKAAVAWEAGKPLSMEEVEVAPPQAMEVRVKILYTALCHTDVYFWEAKGQTPVFPRILGHEAGGIVESVGEGVTELVPGDHVLPVFTGECKECAHCMSEESNLCDLLRINVDRGVMISDGQPRFTIDGKPIFHFLGTSTFSEYTVIHVGCVAKIDPEAPLDKVCLLSCGISTGLGATLNVAKPKKGMAVAIFGLGAVGLAVMEGARLSGASRIIGVDLNPAKHEQAKKFGCTDFVNPKDHTKPVQEVIVEMTDGGVDRAVECTGNADAMISAFECVHDGWGVAVLVGVAHKEPVFKTHPMNFL

SEQ ID NO: 9966 - protein, 352 aa, Vibrio parahaemolyticus RIMD 2210633
MQQMNSIVMQDGSVRLKQVEIPKPAAGQVLVRSLACGICGSDLHITRHADEVFDVFHQLGLMPDEAGEHAQVMLGHEFCAEIVEYGSDTQQTLAVGSRVTSVPMLLSQNGAGVGVTPGTYGAYSEYFLLDEALLLPVPDGMPSEAAALTEPLAVGLHAVNRSEIETEETALVVGCGPIGLAVIAALKQRGVSNILAVDLQEEKLQLASEFGANRLISPTKEDEIAVGEQYAMNSRLVIYECVGKHTLIDDFLRRAPARARIVISGIHTTPAIINYAYATVKELDLRFSYYYQPHEFEQCLQAIAEHKLPWQKMLTAKVGIDGVEDAFRQLMTPNDHIKVVIEPWRCGALEVI

SEQ ID NO: 9967 - protein, 370 aa, Glycine max
MALGDDAQHHSHSPSFLDSLLCEERETFEEDFDANGDECETENNDPSVIKSQPLPLVLYDNDLFWEDDELVSLIAKEGETHLRSFSDGALEGPRVEAVNWVSKVSGHYGFSALTTVLAVNYFDRFITSLKFQRDKPWMTQLAAVACLSLAAKTEETHVPLLLDLQVEESRFVFEAKTIQRMELLVLSTLKWRMLPVTPISFFEHIVRRLGLKSRLHWEFLWRCERVLLNIIADSRVMSYLPSTLAAATMIHVIKEIESFNATEYIDQLLGLLKISEEQVNKCYRIIQKLLGCHEGIYGLPQKCKRLSELGSPSAVTDASFSCDSSNDSWAVSSSVSLSLEPQLKRRRSQDQQMRLPSVSRVSIDVLNSPH

SEQ ID NO: 9968 - protein, 801 aa, Oryza sativa
  unsure (1)..(801): unsure at all Xaa locations
WHWMAAARLAGGGGXRGWGGVPSLMRRKQVDSDRVQGEGHQLAKELNIPALVAIGVGSTIGAGVYVLVGTVAREHAGPALTISFLIAGIASALSAFCYAELASRCPSAGSAYHYSYICVGEGVAWLIGWALVLEYTIGGSAVARGISPNLSSAVQELITVLNACVMIFVIVAGSYIGFQIGWVGYKVTDGYFPHGINGMLAGSATVFFAYIGFDTVASTAEEVKNPQRDLPLGIGAALSICCCLYMMVSVVIVGLVPYFAMDPDTPISSVFAKHGMQWAMYIVTSGAVLALCSTLLGSLLPQPRILMAMARDGLLPSFFADVNKRTQVPVKSTVVTGLCAAALAFFMDVSQLAGMLSSSKGLAYHWNSTKLQYLGNLCPKHXGWQYFSRNKGELSQDLRKRRQANKPRPRKKTSYLHRSALSNGATAAMAMAMAYVTATTATRQYGGGGSAAGKHSILGLISASRLCTRQFTIPQWRTLICIVYMVVSRVVFLLESVPGEIRDSAFVSPDSIRRHRRGLAVLIPEVDIRRLVLAYVGLCPLVQRSKTKNSFSRLYTCFGKKYKNIRVPRNGNTIVWRNVKVRDRLLGQSGVVDERYRVALVHGLAVRHCSPAVFICILAGVTLPAQGTMRCRTDSQPGTQAVVHIFTPLQTLCPAFPPGVVIDHSRRNHFRYKPPENAPDPHAKLLLLITLLFTCSKVVSDHCRRNHFRCKPPENAPECLCGLKDERSFFDNGLSLQDMADFYSSSICQGQDLINAQVVVDACEGMEQRSKMPSMPPQRLLESRVRVEASPADSPTPPAST

SEQ ID NO: 9969 - protein, 160 aa, Pseudomonas fluorescens PfO-1
MSAFHDLKLTALDGQELPLAPFKGQVVLVVNVASKCGLTPQYAALENLYQQYKGKGFSVLGLPCNQFAGQEPGSEQEIQEFCSLNYGVSFPLSKKLEVNGHDRHQLYRLLAGEGAEFPGDITWNFEKFLLGKDGRVLARFSPRTAPDDPSVITAIEKALS

SEQ ID NO: 9970 - protein, 156 aa, Glycine max
  unsure (1)..(156): unsure at all Xaa locations
NRKVVLLALHNTYQITYALNCALDNFFPSPIFKLVMIHSRPTVTFAVGFSGPVFAGAAQVLPIVVSDLRXLAPEVLQTAKQLCINNSANDVTAXVVEGDPRNVLCHAVDKYRAAMSVVGSHAYGAIKRPVLGSVSDYCAHHAHCTVMIVKKPIIKH

SEQ ID NO: 9971 - protein, 290 aa, Triticum aestivum
SPLTSEKHEVIDLQGHVAPCVKHEGNFYEGFYRTHVSTLAVKNNLLVAGGFQGELICKFLDREGISYCSKSTHDDNGITNCLEIFEKPSGSVHFLASNNDCGLRDFDMEKFQMCNHFHFDWAVNHTSLSPDGKIIAVVGDNPDGVLVDASSGKVIHELSGHLDYSFASAWNPDGRTFATGNQDKTCRIWDARNLSKSVAVLGGNMGAIRSIRYTSDGKFLAMAEAADFIHIFDVGSGYDRKQELDFFGEVAGISFSPDTEALFVSVHDRNYSSLLQYSRRRFYGYLDSAL

SEQ ID NO: 9972 - protein, 152 aa, Zea mays; identical to SEQ ID NO: 4832

SEQ ID NO: 9973 - protein, 394 aa, Zea mays subsp. mays
LGAARRARLPPGEMGWPLVGGMWAFLRAFKSGKPDAFIASFVRRFGRTGVYRSFMFSSPTVLVTTAEGCKQVLMDDDAFVTGWPKATVALVGPRSFVAMPYDEHRRIRKLTAAPINGFDALTGYLPFIDRTVTSSLRAWADHGGSVEFLTELRRMTFKIIVQIFLGGADQATTRALERSYTELNYGMRAMAINLPGFAYRGALRARRRLVAVLQGVLDERRAARAKGVSGGGVDMMDRLIEAQDERGRRLDDDEIIDVLVMYLNAGHESSGHITMWATVFLQENPDMFARAKAEQEAIMRSIPSSQQGLSLRDFRKMEYLSQVIDETLRLVNISFVSFRQATRDVFVNGYLIPKGWKVQLWYRSVHMDPQVYPDPTKFDPSRWEGHSPRAGTFL

SEQ ID NO: 9974 - protein, 259 aa, Ralstonia solanacearum
MLQGKTALVTGSTSGIGLGIACALAAQGANIVMNGFGDLDGPKARIAGAGKDAVRVGYHGADMSKPAEIEAMFAYADAEFGGVDILVNNAGIQHVANVEDFPAERWDAILAINLSSAFHTTRLAVPGMKRKNWGRIVNIASAHGLVASAQKSAYVAAKHGIVGLTKAVALETAQTGVTVNAICPGWVLTPLVQKQIDARAEKEGIPVLQAKKELLMEKQPSGEFVSPEQLGALAVFLCSEAAEQVRGVAWSMDGGWVAQ

SEQ ID NO: 9975 - protein, 172 aa, Rhodobacter sphaeroides
MIYALDGVAPRIDAEAWVAPGASVIGKVVLEAGSSVWFGAALRGDNEEIVIGAGSNVQENAVLHTDMGYPLTVGANCTIGHKAMLHGCTIGENSLIGMGATVLNGAKIGRFCLIGACALVTEGKEIPDFSLVKGSPGKVVRELTEEERARLIASAEGYAANARRFRAGLTAL

SEQ ID NO: 9976 - protein, 384 aa, Raphanus sativus
NRTLVSPGTHFELGFFRTISRWYLGIWYKKLSERTYVWVANRAHPLSNSIGTLKISGNKLVNLGQSNKSVWWTNITRGNESSPVVAESSANGNFVMRDSNNNKSSEYFWQSFDYPTDTLLPEMKLGYDLRKGLNRFLASWRSSDDPSSGDPLYKLETRRIPEFYLHGIFPMHRQALWNGIRFSGIPEDQKLSYVVYNFTENREEVAYTFRMTNNNNPYSRLTLSYSGYIERHTWNPSLGIWNRWFWSFPLDSQCDVYRMCGPYPYCDVNTSPICNCIQGFNPSNVEQWDLKSWSGRCIRRTRLSCSRDGFTRMKNMTLPETTMAIVDRSIGVKECEKRCLSDCNCTAFANADINGGTGCVIVTGELEDIRNYAAHGHDLYVRLA

SEQ ID NO: 9977 - protein, 250 aa, Thermoplasma acidophilum
MDIDERPLEEPQPGWVTVRVNYAGICGSELSAFVGQNELRKPPSIMGHEFTGKVVKVGSSSDSNLLGKNVAVNPLVTCGKCRYCKTGNRQLCPERKLIGVDYPGGFEEYVNVPSYSCYEITEKPEGSLAEPLATAFRAINHAKPEMDDRALVIGAGTIGLLSAKLLELYGTVERVVTDINDYRLEHALHWGATRTINNKKEKSIPKDFDIVIDAVGTQETRTMAINSIARGGRVVFVGLHEPNAEMPVNL

SEQ ID NO: 9978 - protein, 270 aa, Chloroflexus aurantiacus
MQQRHGCSSNRFLMLCNTRLPRRSDYLRRARADTKITVDSYRPLCYRRIIPASNLLTVKSTAYRQEEYAMAKKILFLVGDYVEDYEVMVPFQALAALGYQVHAVCPGKKAGEFVRTAVHDFEGDQTYSEKRGHNFTLNYSFDEVNEHEYDALVIPGVRAPEYIRLNPRVLEITRHFFTANKPVAAICHGLQVLAAAGVLNGRRCTAYAAVGPDLPLIGAEYHELPADQAITDGNLVTAPAWPAHPAWLAQFLKVLGAKIEIEPQTEAVPA

SEQ ID NO: 9979 - protein, 139 aa, Zea mays
EYRCFVGGLAWATDDHSLNNAFSTYGEVLESKIILDRETQRSRGFGFVTFSTEDAMRSAIEGMNGKELDGRNITVNEAQSRGGRGGGGGGYGGGRRDGGGYGGGGGGYGGGRGGYGGGGGYGGANRGGGYGNNDGNWRN

SEQ ID NO: 9980 - protein, 393 aa, Hakonechloa macra
EPARTEDPALSIAGAVQSQKLAVRAISRLQALPGGDVKLLCDTVVEHVRELTGYDRVMVYRFHEDEHGEVVAESRRADLETYLGLHYPATDIPQASRFLFRQNRVRMIADCHATPVRVIQDPGLPQPLCLVGSTLRAPHGCHAQYMANMGSIASLVMAVIISSGGDDEQTARGGISSTMKLWGLVVCHHTSPRFIPFPLRYACEFLMQAFGLQLNMELQLAHQLSEKHILRTQTLLCDMLLRESPTGIVTQSPSIMDLVKCDGAALYYHGKYYPLCVTPTESQIKDIIEWLTVCHGDSTGLSTDSLADAGYLGAAALGDAVCGMAVAYITPSDYLFWFRSHTAKEIKWGGAKHHPEDKDDGQRMHPRSSFKAFLEVVKSRSLPWENAEMDAIH

SEQ ID NO: 9981 - protein, 319 aa, Triticum aestivum
  unsure (1)..(319): unsure at all Xaa locations
MMESQPLQAPTAEPXGAGAADDQAGAGAPPAVVPGKEFTRTCKGLVVVLIGGYVLLQLLPSSLNYLAIIPAKTIPFVWTVFTAGYIEQVLPGAIGSSLGLLFCGKDIEPVWGRKEFLKFIILINSICGILAFCIAVALYYVTGKESFLVTPLSGFHGALAGFLVGLKQLLPNLELPMCFFWKIKAKWMPFFVMCFSTIMAFIVPDSINFLPTLLSGMYVSWLYLRYFQKNPLTGLKGDPCDDFSFPSLFPDAMRPVTDPVANLFDRMLCPRSKPSEIALPVTDPTKASRRRERGERVLEERMAADHAADAEAPAHSAED

SEQ ID NO: 9982 - protein, 104 aa, Methanosarcina acetivorans C2A
MQFCTKCKSMMFPKDGNYHCRKCGNTIPIESDAKGFVSKAKIDDHEVVVLEGEQTSGLPTTNVKCPECGNNTAAWWLRQLRSADESETRFFKCTKCGFTWREYD

SEQ ID NO: 9983 - protein, 124 aa, Glycine max
PGGSHHSMEDFAVRGKEPKDEVQIYTWKDATLRELTDLVKEVAPAARRRNAKLSFAFVFPDKNGRFKVQEVGKTLSYGNGRLDGGKALAELGFEVKDFFSSLLEFMLDLFTNSVADPVRKCADR

SEQ ID NO: 9984 - protein, 590 aa, Triticum aestivum
SSSTRALPQQPELSPLPSPAHAQAEPPSPLPPNPTAGIPFYGDNWRNPAASGPASSLLPAVVAFPDRHRMAAFSAARSAADLKETFAAWMTEQHWEDMKQLFESWVRSLDAATGKPNRPDVDLFNHYLRANLMSGALPHEMLDLADQMREFDLAPNTASYNLVLKTMVKAREVEGAEKIVERMLQTGIVPDDESYNLVVDLLLRHNRADSAFKYLELMLKSGYAVSSPVFAEYVRVCVKSGSLDTLASIIEKCKATEKNKLLCPQWAWCIDIAEAAFEANNSKLAMFGLEFLARWIAHGEGSKPPVHRSVNEGLVLSAFSAAGRTCSSDLLNAAWSILRKSLRQKRAPTPETYLAKIYAHSSIGQLQRAFGTLREFENAYRNFEGIDKELFSPFTSLQPLVVACCKDGFTTLDSVYVQLENLSSADPPYKSVAALNCVILGCANIWDIERAYETFEAMKEKFGLTPDIHSYNALLHAFGKLKKTEEASNVFQHLVSLEDVKPNATTYSLLVDAHLVNRDPKAALAVLDEMVDVGFTPSKETLKKVRRRCSRESDFDSDEKLQSLCKRLNLRMGGEARRELLYNIEYSAEY

SEQ ID NO: 9985 - protein, 446 aa, Lactobacillus plantarum WCFS1
MENQQLARKLKRRHVQMIALGGAIGTGLFLGSGLAIKQAGPSILLAYAIGGFFCYLMMRALGELLLSDTRLHSFLEFINRYLGKRFEFAIGWTYWLCWISLAMADLTASGIYIRYWFPWIPQWVTPLIIILILLVFNMLSVSAFGELEYWFSMIKVVAIIALIVTGAILIGSSAHVGGQTVSVTNLVSHGGFFPTGVQGFLMSFSLVIFAFTGIEMVGITAGEAENPEKELPRAINSLPIRISFFYVGALFVIMAIYPWNQITTSQSPFVQVFSDVGIKAAASIINFVVLTAALSACNSAIFSTSRTLFTLAHGDNAPKWMGKVNRYNVPARSLLFSSLILLVIVALNYVIPSTVFTLISNVATTNFIIVWCALLVCHYVYKRTTDSTHNPFKLPLFPVTNIATLAFFIAVTVVLCFDQVNRWAVIGSVVWFVILLVIERSMHRTV

SEQ ID NO: 9986 - protein, 166 aa, Zea mays
  unsure (1)..(166): unsure at all Xaa locations
MADVEYRCFVGGLAWATDDQSLQNAFSKYGDVIDSKIITDRETGRSRGFGFVTFASDEAMRQAIEAMNGQDLDGRNITVNEAQSRRSGGGGGGFGGGGGGGGYGGQRREGGGGGGYGGGGGGYGGGRSGGGGGYGSREGGGGYGSGGGRGGYRGSRGGSGGXNWRE

SEQ ID NO: 9987 - protein, 234 aa, Hyacinthus orientalis
MGRGKIEIKRIENTTNRQVTFCKRRNGLLKKAYELSVLCDAEVALIVFSTRGRLYEYSNNSIKSTIERDKKACADSSSSSAVIEVNTQRYYQQEASKLRQQIQILQNANRHLMGESLDPLNVKELKQLETRLERGITRVRSKKHELLFAELEYMQKREVELQTDNMYLRAKIGENERAHQASVVQAGTEFDALPTFDSRNYYQVHMLQAASHYSHHQDQTALHLGYETKADPSA

SEQ ID NO: 9988 - protein, 579 aa, Rhodopseudomonas palustris
MADQDDILELIEDTDSTPEVSGARKWKIAVIDDDTAVHDGTRFALSDYSLNNQGLEILSAYSGAEGRELMRAHPDIAAVLLDVIMETDAAGLDLVEFIRNDLKNETVRIILRTGQPGQAPERRVIVDYDINDYKAKTELTADKLFTSLTAALRSYQQLERMVQTRRGLEIIIDAASTLYDFKSMQRLAEGVLTQLASLLNVDCAGILVLRDAGDELAVLAGSGCYSRFIGTTGHSNSLDPDLRQMVEEAFRRRKHEFADHRTVLYIRTGSGREVVVLLQAERELSDTDRSLVEIFGSRLSIAFDNVILYRQLHEANTQLEERVAQRTRALTQANRRLSTQWLRLQRANAFKNEILGTVAHDLKNPLGVILGRTEMLTELIGAESSKDHVIAQVDHIRDATRRLTLMVDHLISDAMADAFDISIRREAVDIAALVGEVAEANRPMAQNKQQVISVSTPEACSTMCDSDRMREAIDNLVSNAIKYSPIGGNIALQVDGDGDSTMIRVTDEGAGLSPEDLSRLFGRFQRLSAKPTAGESSTGLGLSIVKKIVDMHGGEIIAESPGPGQGSTFTIILPAASVS

SEQ ID NO: 9989 - protein, 347 aa, Sinorhizobium meliloti
MQVSFDGELAYVFAAILPIAACFHPTTWSETMEMRRLGRTGLSIAPLVFGGNVFGWTADEKTSFSLLDAFFDAGFNAVDTADVYSSWAPGNRGGESEAIIGKWLKQSGRSRDSAVIVTKVGSELGPDRKGLSRRWIMQAVEDSLRRLQTDYIDLYLSHWPDPDIPYDETLAAYDTLLSQGKLRAIGASNLDAQQMRDALDVAAAKDLPRYDVLQPEYNLYDCASYDGPLRNLCIAEEIGVITYFSLARGFLSGKYRSHKDLEGSARGGGVEKYLDGRGMRILGVLDEIAEETGAKQAEIALAWIIAREGVTAPIASATNPDQLASLVRSAELDLPEEAIRRLNEVSE

SEQ ID NO: 9990 - protein, 351 aa, Zea mays
MYSWEMLSFNIHDGFLEAIVRGNRSGLLTQADYNNLCQCETLDDIKMHLSATEYGPYLQNEPSPLHTTTIVEKCTLKLVDEYKHMLCQANEPLSTFLQYITYGHMIDNVVLIVTGTLHERDVNELLEKCHPLGMFDSIASLAVAQNMRELYRLVLVDTPLAPYFSECITSEDLDDMNIEIMRNTLYKAYLEDFYKFCAKLGGATAEIMCDLLSFEADRRAVNITINSIGTELTRDDRRKLYSNFGLLYPYGHEELAVCEDVDQVRGAMEKYPPYQSIFSRISYGESQMLDKAFYEEEVKRLCLSFEQQFHYAVFFAYIRLREQEIRNLMWISECVAQNQKSRVHDSVVFIF

SEQ ID NO: 9991 - protein, 173 aa, Oceanobacillus iheyensis HTE831
MIDHYNNIYPTIHPTAFVAKDAVINGDVQIKEKVSIWFHTVIRGDVSKTTIGKRTNIQDLCMLHQSPGQPLIIEEDVTVGHQVTLHSAIVRKKALIGMGSIVLDGAEIGEGAFLGAGSLVPPGKKIPAHTLAMGRPAKVVRELTEEDYKEMDRVRNSYVEKGQYYKNNTNMGI

SEQ ID NO: 9992 - protein, 48 aa, Glycine max
MADLKSTFLNVYSVLKSELLHDPAFEFSDDARNWVDRMLDYNVPGGVA

SEQ ID NO: 9993 - protein, 378 aa, Haemophilus influenzae Rd
MEIKQINSTIKSRAAVAFAPNQPLQIVEIDVEMPRKGEVLIRNTHTGVCHTDAFTLSGSDPEGVFPVVLGHEGAGVVVAVGEGVLSVKPGDHVIPLYTAECGECEFCRSGKTNLCVSVRDTQGKGLMPDCTTRFSYQGQPIYHYMGCSTFSEYSVVAEVSLAKINPEANHEQVCLLGCGVTTGIGAVHNTAKVQEGDSVAVFGLGAIGLAVVQGARQAKAGRIIAIDTNPAKFELAKQFGATDCLNPNDYDKPIKDVLLDINKWGIDHTFECIGNVNVMRQALESAHRGWGQSIIIGVAGAGQEISTRPFQLVTGRVWKGSAFGGVKGRSELPQMVEDSMKGDIQLEPFVTHTMPLDKINEAFELMHEGKSIRTVIHY

SEQ ID NO: 9994 - protein, 304 aa, Glycine max
  unsure (1)..(304): unsure at all Xaa locations
MVPYMKQQDNGESKKKERCILTWTQEEDDILKKQIXSHGTENWAIIASKFKDKTTRQCRRRWNTYLNSDFKKGGWSAEEDMLLCEAQKVFGNRWTEIAKVVSGRTDNAVKNRFSTLCKKKPKYAALAKENSTSYINSNNKRMMLQHCNNMDTTSESGVPIKNLRRADIADDAEKIKFEDRSHLRNGTPINQQPRAPLAVLAQNSHNSNNLTDQHHLCNPKFSSSAQNNKIQGTFLKKDDPKISALMQQAELLSSLALKVDTENMDQSLENAWKVLQEFLNRSKESDIPGQISSIPQSIDTSRSI

SEQ ID NO: 9995 - protein, 363 aa, Buchnera aphidicola
MHKQYHIAVLPGDGIGPEVMQEAYKILQVLREHFSLFIKTKEFDIGGIAIDNHGIALPKKTLIGCENSDAILLGSIGGKKWDTLPINERPERASLLPLRKHFNFFCNLRPSNLYKELNFLSPLRNDIVKHGFDILCVRELTGGIYFGKPRGRVTKKKLMYAFDTEIYYKFEIVRIAHLAFKLARSRKHKLCSIDKANVLESSILWREVVEEVSKEYPDVILSHLYIDNVCMQIIKDPNQFDVLLCSNLFGDIISDECAMITGSIGMLPSASLNEKNFGLYEPAGGSAPDIQGKNIANPIAQILSLSMLIRYSMNLNKIANKIDNAVINVLKKGYKTMDISKDQNYLKTNEMGDVIADFLKRDK

SEQ ID NO: 9996 - protein, 228 aa, Zea mays
PTRPPTRPPTRPPTRPVPLKILSIEDGTVLKSFSHLLHRNKKVDFIEQFNEKLLVKQEGENLQILDVRNFQLTEVSRTEFMTPSAFIFLHELQLFLTFRNRAVSVWNFRGELVTSFEDHLLWHPDCNTNNIYITSDQDLIISYCKADSTDSTSEENAGSINISSILSGKCLAKINTGNSNACKERKKVWKFRNTVSEALEDITALYYDEDRDEIYTGNRHGLVHVWSS

SEQ ID NO: 9997 - protein, 263 aa, Oryza sativa
MLELRLVQGSLLKKVLEAIRELVTDANFDCSGTGFSLQAMDSSHVALVALLLRSEGFEHYRCDRNLSMGMNLNNMAKMLRCAGNDDIITIKADDGSDTVTFMFESPNQDKIADFEMKLMDIDSEHLGIPDSEYQAIVRMPSSEFSRICKDLSSIGDTVIISVTKEGVKFSTAGDIGTANIVCRQNKTVDKPEDATIIEMQEPVSLTFALRYMNSFTKASPLSEQVTISLSSELPVVVEYKIAEMGYIRFYLAPKIEEDEEMKS

SEQ ID NO: 9998 - protein, 439 aa, Pseudomonas aeruginosa UCBPP-PA14
MFDVVAITVSAVTPASSVFVIAPFAIQQAGTGAFWAFALAGVLALMFAWCYAELGRAHSTAGGEYVYAKRVFGGLAGYATFLTVLAMLLFIPPVLATGAATYLNAALGTHFDAQTVALAIVAFSYLLGILNIRVNAWVTGTCLLLEVAALLVIVGLGFGHAQQPASVLLQPQVVGDGGLLAIAPWALVIGAVGTALFSYNGFGGAVLLAEDMKDGGHSVHRAVLWSLALVVLIEIVPLAALLIGAPSLPAMLASPDPIGYLLNSHGNETLSRLVSAGIFLSVFNAIVAIVIQSARVIFSSGRDALWMPALNRAFTRIHPRWESPWLATLFLAIPSAALSFSSNLAELTSFTVLLIVMVYLIVALCALFSRVLRRDREHPYRMPLWPLPALLAVSGAGYLLLNLFLAASARDVMIIVGLLAVSVILYCTYGKLSPAFQKL

SEQ ID NO: 9999 - protein, 359 aa, Coxiella burnetii RSA 493
MFAQVTYIWMDGAQPTQKLRSKVRIVKHPERDITLADFPEWGFDGSSTYQATGKDSDLILQPVHFVKDPILGDGNYLVLCEVMNPDGSPHASNTRARLRQIMANGAAEHEPWIGFEQEYTLFQGVQPLGWPDRGYPAPQGPFYCGIGADEVFGRPLVEEHATACIEAELMIFGTNAEVMPGQWEFQIGYRGADDETPDPLTVSDHLWLARWLLYRIGEDYGITATLQPKPVKGDWNGAGKHTNFSTKLMRDPATGREAIEQAIERLSKRHDAHIAVYGHGLEERLTGKHETAPITQFSSGVGNRGASVRIPSAVASRGCGYLEDRRPGANADPYQVAAILLETICGIQLPKNSGIETTV

SEQ ID NO: 10000 - protein, 502 aa, Secale cereale
MDGGGEHSEALKNYYLGKILGVGTFAKVIIAEHKHTRHKVAIKVLNRRQMRAPEMEEKAKREIKILRLFIDLIHPHIIRVYEVIVTPKDIFVVMEYCQNGDLLDYILEKRRLQEDEARRTFQQIISAVEYCHRNKVVHRDLKPENLLLDSKYNVKLADFGLSNVMHDGHFLKTSCGSLNYAAPEVISGKLYAGPEIDVWSCGVILYALLCGAVPFDDDNIPNLFKKIKGGTYILPIYLSDLVRDLISRMLIVDPMKRITIGEIRKHSWFQNRLPRYLAVPPPDMMQQAKMIDEDTLRDVVKLGYDKDHVCESLCNRLQNEETVAYYLLLDNRFRATSGYLGAHYQQPMESASPSTRSYLPGSNDSQGSGLRPYYRVERKWALGLQQSRAPPRAIMIEVLKALKELNVCWKKNGDCYNMKCRWCPGFPRVSDMLLDANHSFVDDCAIKDNGDANSRLPAVIKFEIQLYKTKDDKYLLDMQRVTGPQLLFLEFCAAFLTNLRVL

SEQ ID NO: 10001 - protein, 390 aa, Burkholderia fungorum
MRRNYFPLHDARSVHVCDRCRKPVQIGSIRDVRRFPIIERSQHAPKEVPSETHRVCALNNRSTTMDYVKLGRTGLDVSRLCLGCMSYGVPSRGPHPWTLGDEAARPFIKQALDHGINFFDTANVYSDGTSEEIVGRALKDFAMRDEIVLATKVHGRMHPGPNGAGLSRKVIMAEIDNSLRRLGTDYVDLYQIHRWDYGTPIEETMEALHDVVKAGKARYIGASSMYAWQFAKALHVAERNGWTRFATMQNYVNLLYREEEREMLPLCESEGIGVIPWSPLARGRLTRDWNTGSARSETDEFGRTLYAQTEDADRRIVERVSEIAKERGVPRAQVALAWVLQKKPITAPIVGATKLHHLDDAVAALSLNLSADEIGRLEELYVPHAVTGFN

SEQ ID NO: 10002 - protein, 326 aa, Oceanobacillus iheyensis HTE831
MNGLYLSSPGVIEFRELASRSKLSDDEVRIRLIYGGICGSDISVFKGKLPHANYPVVPGHELIGTVIETGKSAADFAGKRVAIMPNSFCGKCEYCKVGKTNICTEKQSLGINRDGGFAEEFVISAKYVLSLPDQLTNEKAVLIEPLAVIVHAMKKVVITEETKVAIIGCGNEGMLAIAVAEYLGAQVTAIDVKQNKLNKVSHSYHNVSTCQSADAEELFDVVIEAAGTSESFEQGIQLLKPGGAFVAIGMPPHANLPVVEIVRKEVTIYGSIIYNFPEDFNTSIEFLLQEDFQVEPVISKILSVNEYEKAYTYAVSGDYGKIILKF

SEQ ID NO: 10003 - protein, 469 aa, Pseudomonas aeruginosa PAO1
MHVATSVIEDQPLRATPAEGETLYEFSQSPLLERQSRQESNARSYPRRIPLALKKARGLLVEDVEGRTFIDCLAGAGTLALGHNHPVVIEAIRQVLADELPLHTLDLTTPVKDQFVQDLFGLLPPALAAEAKIQFCGPTGTDAVEAALKLVRTATGRSTILSFQGGYHGMSQGALGLMGNLGPKKPLGAVLSTGVQFLPYPYDYRCPFGLGGEAGVKANLHYLENLLNDPEGGVQLPAAVIVEVVQGEGGVVPADLDWLRGLRRITEQAGVALIVDEIQSGFARTGRMFAFEHAGIVPDVVVLSKAIGGSLPLAVVVYREWLDKWQPGAHAGTFRGNQMAMAAGSAVMRYLKEHDLAAHAAAMGERLAEHLRILQRDYPQLGDIRGRGLMLGVEIVDPQGEADALGHPPTDGALASRVQRECLRRGLILELGGRHGSVVRFLPPLIIGAEQIDEVARRFARALGAALAG

SEQ ID NO: 10004 - protein, 337 aa, Salmonella typhimurium
MRVLVTGGSGYIGSHTCVQLLQNGHDVVILDNLCNSKRSVLPVIERLGGKHPTFVEGDIRNEALITEILHDHAIDTVIHFAGLKAVGNSVARPLEYYDNNVNGTLRLVSAMRAANVKNLIFSSSATVYGDQPKIPYVESFPTGAPQSPTGKSKLMVEQILTDLQKAQPEWSIALLRYFNPVGAHPSGDMGEDPQGIPNNLMPYIAQVAVGRRESLAVFGNDYPTEDGTGVRDYIHVMDLADGHVVAMEKLADKSGVHIYNLGAGVGSSVLDVVNAFSKACGKPINYHFAPRDGDLPAYWADASKADRELNWRVTRTLDEMAQDTWHWQSRHPQAYPD

SEQ ID NO: 10005 - protein, 834 aa, Prevotella bryantii
MGTNVGLYIYNLKTRKKKVLTIDDGLPDNGVASMEQDYHGNLWITTDHGLCCMHPKTGKTKYYYSDKVLQGNEFSNQASYITPDRKTIYLGGSGGVTWFHVDSIKQQPWNGTIKVSTISIGNNEQSVNPDDTEFEFNYEDNSFAIHLSTLTYDEPDNIVYLYSINNEDWVELSHGSNELAFNHLSPGTYHIRVKACLNDKSTPILEFTIEVNAPWYRSNWAYFGYLIILLCLLKVYHKYRQRKLHEEKLIEENKHQEELNESRLKSFINISHDIRTPMTLIISPLQQLLQSDTDPSRHATYRTIQKNAVRILHLINQIMDLRKIDRGLMAMNMRKTDMVKFISDVYALFIEQAKMQNIDFSFEHDSEQLYMWIDRNNFDKVLVNIISNAFKYTYAGGKIEIRLTHNDKEAEIAFYDNGERIPDDQIKHIFDRFYQANVKSNDRKIGTGIGLDLTRSLVELHYGTISVHNNADGKGCEFNITLPLGKEHLSEAELINDTQDTESETYESAEVLENTDNINTIWDIPAIQVGGHANKMDDDANIILPTSNSTTDTNASANEKSNTTKPIESDNNTKQENEVQKISIFVVEDDFEIATYLKEQFRREFDVSTFANGNDALSAAIRQQPQLIISDVMMPVMDGITLCKRLRDNTNTNAIPIILLTAKNSDEDKLKGIDTGADAYMVKPFNIDLLKSQVFNLIRQRRTLMNKLGGQETQEEKLKQLKLNSADDRLIEMIVEEINKNLTNSDLNVDMLAEKVGLSRVHLYRKMKELTNQTPHGFIRNTRIRQAARLLREPGHNVTEVMYACGFSNLASFSTMFKSMYGMSPRDYIREHQK

SEQ ID NO: 10006 - protein, 441 aa, Propionibacterium freudenreichii subsp. shermanii
MSVSDELFAEALKVMPGGVSSPVRAYRSVGGTPRFVKRALGSHIVDVDDKRYVDLVCSWGPMIAGHAHPEVVAAVLQAVADSTSFGAPSEVELRLAQAVVARMGGAIDKVRFTCSGTEAVMTAARLARGITKRPLLVKFVGCYHGHSDSFLVSAGSGVASLGLPDSPGVPKEVAGDTVALPYGRIDMVEELFAERGDQVAAIVTEGVPANMGVIVPPEGFNRRLHDIAHAHGALLIQDEVLTGFRLSPTGAWGLQGAKEGWTPDLFTFGKVIGGGMPLAAVGGSAQLMDYLAPEGPVYQAGTLSGNPAACAAGLATLALMDDAAYSRLDATADRVSAMADAALESAGVPHRINKVSNLFSVFLTDAPVTDFASASKQDTKAFSRFFHAALDAGLWLAPSGFEAWFCSTALDDDDLEVIDAGLHKAAQAAAQGLSSLEDVRR

SEQ ID NO: 10007 - protein, 343 aa, Agrobacterium tumefaciens str. C58 (Cereon)
MKAIVAHGAKDVRIEDRPEEKPGPGEVRLRLARGGICGSDLHYYNHGGFGAVRLREPMVLGHEVSAVIEELGEGVEGLKIGGLVAVSPSRPCRTCRFCQEGLHNQCLNMRFYGSAMPFPHIQGAFREILVADALQCVPADGLSAGEAAMAEPLAVTLHATRRAGDLLGKRVLVTGCGPIGILSILAARRAGAAEIVATDLSDFTLGKAREAGADRVINSKDEPDALAAYGANKGTFDILYECSGAAVALAGGITALRPRGIIVQLGLGGDMSLPMMAITAKELDLRGSFRFHEEFATGVELMRKGLIDVKPFITQTVDLADAISAFEFASDRSRAMKVQIAFS

SEQ ID NO: 10008 - protein, 327 aa, Aquifex aeolicus VF5
MKKVLVTGGAGYIGSHVVKALGEKGYEVLIYDNLSTGNEWAVLYGKLVKADLADKETLRRVFEEFKPDAVMHFAAYIVVPESVKEPLKYYRNNVVNTINLLEVMQEFGVNKFVFSSSAAVYGIPESIPVKEDAPLNPINPYGETKATVERILRDLKNSGKDFNYVSLRYFNVAGADPEGKIGFAYPNPTHLIIRAVKTAAGEFDRLEIYGTDYPTPDGTCIRDYIHVTDLAEAHILALEYLFSGGKSEVLNCGYGHGYSVLEVVNAVKKVTGVDFKVVEAPRREGDPPALVADNKKIKRVLNWEPKYDDLEFIIKTAWEWEKKFKLK

SEQ ID NO: 10009 - protein, 155 aa, Zea mays
ATEGMNVKEECQRWFMEMKWKKVHRFVVYKIDERSRAVLVDKVGGPGEGYEELVAALPGDDCRYAVFDFDFVSVDTCQKSPPGNKGNRERLVPLQKSLDKGATVNSAPPDPRARTRAKTRKTANSAPPDPRARTRAKTRKTANYRSARPEGSDSG

SEQ ID NO: 10010 - protein, 363 aa, Pseudomonas aeruginosa PAO1
MNSSPQANAAMRAAVWHGRHDIRVEDVPLPAEPPPGWVQIRVHWCGICGSDLHEYLAGPVFIPVEAPHPLTGLKDQCILGHEFSGEIVRLGNGVTGFAVGQAVAADACQHCGTCYYCRHGLYNICENLAFTGLMNNGAFAEYVNVPANLLYALPAGFPSEAGALIEPLAVGMHAVKKAGSLLGQNVVVVGAGTIGLSTIMCARAAGAAQVIALEMSSARKAKALEVGASQVLDPSRCDALGEIRALTGGLGADVSFECIGNKHTAKLAIDAIRKAGKCVLVGIFEEPSEFNFFELVSTEKQLLGALAYNGEFADVIAFIADGRLDIAPLVTGRIGLEEIVERGFEELVNNKEHNVKIIVSPGG

SEQ ID NO: 10011 - protein, 125 aa, Zea mays
MVDAWWSLLGAAFPALVPGQFIRTKRRRDEEQRLKAARGREKSSDEVFVCERVCTSKRMLNKVGAFSKDPIPETCVTVCGVSELDACADACARTVCVNQHQVPNWNDVCLKRCQSECLKLSSTLM

SEQ ID NO: 10012 - protein, 120 aa, Triticum aestivum
MRNRPVWMQRIKPVVLKLKKSQDLILMRIPKFGEELPAHAERRRRANKQHIASITLVDIAPYFHLPIREASRALKIGVSILKQKCRQYGIPRWPHRKIKSLHSLISDLEFVMDDTNGDVV

SEQ ID NO: 10013 - protein, 277 aa, Thermoanaerobacter tengcongensis
MIQWYPGHMAKAKKEIISNLKLVDVVYEIVDARIPRSSRNPDFDEITKRKKKIMLLNKEDLADERITDLWIKHFKEKGIEAVKVNAITGKGFKELEEKTKEVCKDILEAKVKKGLTPRLRGMILGIPNVGKSTFINTLIGRKKAKTGDKPGVTKSLHWIRTPYLDLLDTPGVLWPKFEDKTTGFMLAITGAIKDEILEMEEVALFLVSILKNRYPDYLINRYKLDKIWEEEIKIIEDIGKKRGCLVSGGEVDFVKASTVLLEDFRKGNLGRISLEEP

SEQ ID NO: 10014 - protein, 125 aa, Salvia columbariae
DLKPENVLVRDDGHIMLSDFDLSLRCAVSPTLVKTSSLDNDAQRKNSGYCAQPACIEPSCIQPSCVVPTSCFSPRIFSSKSKKDKKPKNKNEIDNQVRPLPELMAEPSNARSMSFVGTHEYFAPE

SEQ ID NO: 10015 - protein, 462 aa, Mycobacterium leprae
MNWTVDIPIDQLPPLPADLRARLDAALAKPAAQQPSWPTDQAAAMRTVLESVPPVTVPSEIIRLQEQLALVANGKAFLLQGGDCAETFVDNTEPHIRSNVRTLLQMAVVLTYGASLPVVKVARIAGQYAKPRSADVDALGLKSYRGDMINGFAPDAAAREHDPSRLVRAYANSSAAMNLVRALTSSGLASLHLVHDWNREFVRTSPAGARYEALAGEIGRGLAFMSACGVADRNLQTAEIYASHEALVLDYERAMLRLAGAPEGPDDGLQLYDLSAHTVWIGERTRQLDGAHVAFAEVIANPIGVKMGATMTPELAVEYVERLDPHNKPGRLTLVSRLGNNKVRDVLPPIVEKVKATGHQVIWQCDPMHGNTHESSTGYKTRHFDRVVDEVQGFFEVHRALGTYPGGIHVEITGEDVTECLGGAQDISDTDLAGRYETACDPRLNTQQSLELAFLVAEMLRD

SEQ ID NO: 10016 - protein, 508 aa, Saccharomyces cerevisiae
MASLFRPPESAKCNPNSPRLKLPLLRNNQVDENNIYLTSNGSSTTAYSSHTPEPLTSSTSTLFSQTRLHPSDSSMTLNTMKKRPAPPSLPSLSINSQSKCKTLPELVPIADVSDGKHDLGLKQRVIAENELSGNSDLTPSSMASPFSHTNTSSPYLRNDLSNSVGSDFSNLISAYEQSSSPIKSSSQPKSSSESYIDLNSVRDVDQLDENGWKYANLKDRIETLGILGEGAGGSVSKCKLKNGSKIFALKVINTLNTDPEYQKQIFRELQFNRSFQSEYIVRYYGMFTDDENSSIYIAMEYMGGRSLDAIYKNLLERGGRISEKVLGKIAEAVLRGLSYLHEKKVIHRDIKPQNILLNENGQVKLCDFGVSGEAVNSLATTFTGTSFYMAPERIQGQPYSVTSDVWSLGLTILEVANGKFPCSSEKMAANIAPFELLMWILTFTPELKDEPESNIIWSPSFKSFIDYCLKKDSRERPSPRQMINHPWIKGQMKKNVNMEKFVRKCWKD

SEQ ID NO: 10017 - protein, 199 aa, Leavenworthia stylosa
SVGEGVTDLQPGDHVLPIFTGECGHCPHCHSEESNMCELLRINTERGGMILDGESRFSINGKPIHHFLGTSTFSEYTVVHSGQVVKINPKAPLGKVCIVSCGLTTGLGATLNVAKPKKGQSVAVFGLGAVGLGAAEGARIAGASRIIGVDLNSKRFEEAKKFGVTEFVNPKEHNKPVQQVIAEMTNGGVDRSVECTGSV

SEQ ID NO: 10018 - protein, 389 aa, Nelumbo nucifera
PYEVPMTAAGALQSYKLAAKAIARLQALPSGCMDRLCDTVVQEVFELTGYDRVMAYKFHEDDHGEVVSEITKPGLEPYLGLHYPATDIPQAARFLFMKNKVRMICDCRAKHVKVLQDEKLPFDLTLCGSTLRAPHSCHLQYMENMDSIASLVMAVVVNEGDEEGEASGSSQQQKRKKLWGLVVCHNTTPRFVPFPLRYACEFLIQVFAIHVNKEIELENQILEKNILRTQTLLCDMLMRDALLGIISQSPNVMDLVKCDGAALLYKNKIWQLGTTPTEFQIHDIASWLSEYHMDSTGLSTDSFYDAGFPGALSLGDAVCGMAAVRITSKDMLFWFRSHTAAEVRWGGAKHDPDEKDDGRRMHPRSSFKAFLEVVKTRSLPWKDYEMDAI

SEQ ID NO: 10019 - protein, 616 aa, Sulfolobus solfataricus
MTSVTNSDKLLRKELSLLDLTFLSLSAMIGSGWLLASLSVASLAGPSGVFSWTIAGIMVMFIGLAYAELGSSIPKTGGIVRYPFYSHGSYTGFVIAFLYLLSAISTPSIEALATIEYLTSVNPTLSKLLTNSTVVNGTQVTVLTLPGLLLSILLLFIYFVINYYGIKILGKTNSAITVWKLIIPVVTFILLFFAFKSNNFTNYGGIFPQSVASNYVGPVGMLYAIPSAGIIYSYLGFRQPIEYSGEAKNPEKNVWRAIILSIVIAILIYTFLQIAFIGAINWESARITPGNWSALLNSKWANSPFYSELEAEGIAVTGAWGYVLLIDAILSPTGTGLVYTGTSARTLYGLSAEEYFPSIFKKLNSYRIPIWSLVGSLIASIIFLLPFPSWYLLVGFNSSATVLTYIMGGIGLQTLRKTAPDLKRGIKIPWASLVAPVATIVSLLIVYWAGFTTLFYIVSILFIGIPIFWVNYAVKVLGLKKWVGVSLGITQLIVNIALTIFGYYNLVLNNDSPMLYFVLFILMELVPLVVAYLTINDNGKVHLRSGFWLMGLIFTIYIISYLSEFGPLGSSAPIEFPYDIAIISIVGLIFHYLAVLSGFRTKEIEEIIEDQKERRD

SEQ ID NO: 10020 - protein, 333 aa, Mesorhizobium loti
MRMTVLVTGGAGYIGSHMVWELLDAGERVVVLDRLSTGFEWAVAPEAKLVVGDVADKELVGSIIRDNHVDAIIHFAGSIVVPESVADPLAYYENNTSKTRTLIETAVREGVPHFIFSSTAAVYGGAGLEPVREDARLAPESPYGLSKLMSEWMLRDAGLAHDIRYTALRYFNVAGADPKGRTGQSTPGATHLIKVACETALGKRPFMQVFGTDYPTPDGTCMRDYIHVSDLAAAHRLALQRLRAGGTSLVANCGYSHGYSVLEVIDSVRRAFGRDFEVKMGDRRPGDAAAVVANSDLARAELGWTPQRDDLDQIVADALAWERILTSKNSARG

SEQ ID NO: 10021 - protein, 392 aa, Triticum aestivum
MAVAPSPQATAAAAALSRHRSAAVPPVPRSARVAAAARRPGSTRARGGLVARAVVAAKGEVASSDTGGHEVLMFEALREAMIEEMTLDPTVCMIGEDVGDYGGSYKVSKGLSEMFGDLRVLDTPIAENSFTGMGIGAAMKGLRPVVEGMNMGFLLLAYNQISNNCGMLPYTSGGQFKIPIVIRGPGGVGRQLGAEHSQRLESYFQSIPGIQMVACSTPYNAKGLLKAAIRSDNPVVLFEHVLLYNLKEKIPDEEYICSLEEAEMVRPGSQLTILTYSRMRYHVMQAVKTLVNKGYDPEVIDIRSLKPFDLHTIGNSIKKTHRVLIVEECMRTGGIGASLRSAIIDNFWDELDARPVCLSSQDVPTPYAATLEDATVVQPAQIVAAVEEICQS

SEQ ID NO: 10022 - protein, 496 aa, Escherichia coli O157:H7 EDL933
MITTFVFIPIFAIAAGVAQSLQYLNRYHVIREPPEHILNRLPSSASALACSAHALNLIEKRTLDHEEMKALNREVIEYFKEHVNPGFLEYRKSVTAGGDYGAVEWQAGGLNTLVDTQGQEFIDCLGGFGIFNVGHRNPVVVSAVQNQLAKQPLHSQELLDPLRAMLAKTLAALTPGKLKYSFFCNSGTESVEAALKLAKAYQSPRGKFTFIATSGAFHGKSLGALSATAKSTFRKPFMPLLPGFRHVPFGNIEAMRTALNECKKTGDDVAAVILEPIQGEGGVILPPPGYLTAVRKLCDEFGALMILDEVQTGMGRTGKMFACEHENVQPDILCLAKALGGGVMPIGATIATEEVFSVLFDNPFLHTTTFGGNPLACAAALATINVLLEQNLPAQAEQKGDMLLDGFRQLAREYPDLVQEARGKGMLMAIEFVDNEIGYNFASEMFRQRVLVAGTLNNAKTIRIEPPLTLTIEQCELVIKAARKALAAMRVSVEEA

SEQ ID NO: 10023 - protein, 507 aa, Candida tropicalis
MIEQVLHYWYYVLPAFIIFHWIVSAIHTNSLRRKLGAKPFTHTQLDGFYGFKFGRDFLKAKRIGRQVDLINSRFPDDIDTFSSYTFGNHVIFTRDPENIKALLATQFNDFSLGGRIKFFKPLLGYGIFTLDGEGWKHSRAMLRPQFAREQLPMSPSLEPHFNVKAYPQEQRWVFDIQELFFRFTVDSATEFLFGESVNSLKSASIGCDEETELEERKKFAEAFNKAQEYISTRVALQQLYWFVNNSEFKECNEIVHKFTNYYVQKALDATPEELEKQSGYVFLYELVKQTRDPNVLRDHHSISLLAGRDTTAGLLSFAVFELARNPHIWAKLREDVESQFGLGEESRIEEITFESLKRCEYLKAVMNETLRLHPSVPRNARFALKDTTLPRGGGPDGKDPILVRKMSCSIFISGTQIDPKHYGKDAKLFRPERWFESSTRNLGWAYLPFNGGPRICLGQQFALTEAGYILVRLAQSFDTLELKPDTEYLTKISHLTMCLFGAFVKMD

SEQ ID NO: 10024 - protein, 341 aa, Ralstonia solanacearum
MNETILLTGATGYIASHTWVELLDAGYQVIGLDNLCNSSAAVLARIEQITAKTPKFVQGDVRDRRLLDDLFASTRISAVIHFAALKSVGESVQKPLAYYDNNMGGLVTLCAAMAHANVRQLVFSSSATVYGNPHTVPITESFPLSATNPYGQTKLMGEQVLRDLEVSNGAWRIAYLRYFNPVGAHHSGLIGEDPRGIPNNLMPYVAQVAAGRREQLSVFGGDWPTPDGTGVRDYIHVVDLARGHLSALDVLRRDGRGFTVNLGTGRGYSVLEVVAAYQRASGRPIPYEIVARRPGDIAACYADPSLAASQLGWRAQYGIERMCEDSWRWQSMNPDGFQTRG

SEQ ID NO: 10025 - protein, 450 aa, Agrobacterium tumefaciens str. C58 (Cereon)
MTILPNSVEARDIAYQMHPNVNLRKFEKTGGLVIESGEGIYVTDSSGKRYIEAMAGLWSVALGFGEQRLVDAATKQMQKLPYYHTFSYKTHGPSVDLAELLIELSPVPMSKVHFTSSGSEANDLVAKMVWYRSNALGKKDKKKIIGRIKGYHGVTIASASITGLPRNHESFDLPLDRMLHTACPSYVHFGKDGESEAEFTARILGELEELILREGPETVAAFWGEPVMGAGGVLLPPEGYWEGVQAILKKYDILLVVDEVICGFGRTGKMFACETYDIKPDVLVVSKQISSSYMPLSAIIMNDSFYQPIADESDRIGSFGHGYTASGHPVATAVGLENLKIIQERDLVGNVARLEGKFLDHLKALADHPLIHSSRGIGLLGALEVKPWDGTKPGDTTLALAAAIESEGVITRPIGESICFCPPLIITAEQLDELFAGVKRGLDNALAARG

SEQ ID NO: 10026 - protein, 142 aa, Triticum aestivum
MAGIGPIRQDWEPVVVRKKAPTAAAKKDEKAVNAARRAGAEIETMKKYNAGTNKAASSGTSLNTKRLDDDTENLAHERVPSDLKKNLMQARLDKKMTQAQLAQMINEKPQVIQEYESGKAIPNQQIIGKLERALGTKLRGKK

SEQ ID NO: 10027 - protein, 240 aa, Triticum aestivum
  unsure (1)..(240): unsure at all Xaa locations
MASLGLPGPSSYHDLCCYGAGIAGNIFAFXLFISPLPTFRXRIVRNGSTEQFSATPYIYSLLNCLVCMWYALPFXSYGVVLVATVNTIGAAFQLAYTAVFIAYADAKKRLKVSVLLAGVFCVFGLFVYVSMALFDHYLGRTFVGYLIVASLTFMFVSPLSIIDLVIRINSVEYMPFYFSLSMALMSMPFFAYGVLLDDFFIYVPNGIGTVLGVMQLLLYAYYSRKGSRDEARRPLLVTHT

SEQ ID NO: 10028 - protein, 391 aa, Streptococcus salivarius
MAEKIVMKNGQLQVSDRPIIPFIEGDGVGHDIWKNAQAIFDKAVEVAYEGKRHIEWQELLAGKKAYDKTGEWLPKETLEAIRESLVAIKGPLETPVGGGIRSLNVALRQELDLYACVRPVRYFDGVASPLKEPEKTNITIFRENTEDIYAGIEWEAGTADVKRVIEFLQTEMNVNKIRFPESSSIGIKPISIEGSKRLIRSAIDYALKNNLKKVTLVHKGNIQKFTEGGFRKWGYEVAQEDYKEELLAGRLEINDIIADNFLQQILLNPEKFDVVALTNLNGDYASDALAAQVGGIGISPGANINYQTGHAIFEATHGTAPDIADQDKANPCSVLLSGCMLLDYIGWTEAAQLITSAIEKTFKADIFTADLAFGKQAYSTSAFSNQILSIM

SEQ ID NO: 10029 - protein, 209 aa, Caulobacter crescentus CB15
MTSPFFASIAVTAFAVAFLHAALPTHWLPFVLVGRAQKWSTGRTLGVTLLAGIGHVGLTIALGLALVLAGMALQPSLGGLFHWIVGGLMIAVGVFYMVRGRHNHALPEASRRIYASDRAAIAALVTLLTLSPCEAFLPYYLAGMEHGWVAFLVLSAILTAATAAGMLIFTGLSLAGFKRLGLQWVERYEETILGVALVLVGLAVAFLKT

SEQ ID NO: 10030 - protein, 169 aa, Leavenworthia uniflora
NTERVGMIHDGESRFSINGKPIHHFLGTSTFSEYTVVHSGQVAKINPEAPLDKVCIVSCGLSTGLGATLNVAKPKKGQSVAVFGLGAVGLGAAEGARIAGASRIIGVDLNSNRFEQAKKFGVTEFVNPKEHDKPVQQVIAEMTNGGVDRSVECTGSVQAMIQAFECVHD

SEQ ID NO: 10031 - protein, 320 aa, Triticum aestivum
  unsure (1)..(320): unsure at all Xaa locations
MGWKGVLGFDYGVVQAPLGPDISGPELAAAVANAGAIGLLRLPEWPAXDHVRGLIQTTXSLTENSVGAAIVLAFPHEENLRVVLEEKLAVGQGEGARDGERRGLTEAPGWGRQCRWSSRNEENLRVVLEEKLALLQVYWGEFPKERVDEAHRAGVKVLHQXFGNLEEAAKAKEAGVDGIIVQGREAGGHVIGQEGLLPLLVATXECFAHPLYKKKLIEMNCTDYTAVFGRARWPGAPQRVLKTPFYXRWKNLPXHETEENQPIIGHSIIHGCAQRYMXRFAGTVPNETTTGDMETMVIIGLSYYSLVWTMIPIGFAWYCS

SEQ ID NO: 10032 - protein, 376 aa, Chrysopogon gryllus
  unsure (1)..(376): unsure at all Xaa locations
ALSIAGAVQSQKLAVRSISRLQALPGGDVKLLCDTVVEHVRELTGYDRVMVYRFHEDEHGEVVAESRRDNLEPYLGLHYPATDIPQASRFLFRQNRVRMIADCHATPVRVIQDPGLSQPLCLVGSTLRAPHGCHAQYMANMGSIASLVMAVVISSGGDDEQTGRGGISSAMKLWGLVVCHHTSPRCIPFPLRYACEFLTQAFGLHLNMELQLAHQLSEKHILRTQTLVCDMLLRDSPSGXVTQSPSIMDLVKCDGAALYYHGKYYPLGVTPTESQIKDIIEWLTVCHGDSTGLSTDSLADAGYLGAAALGDAVCGMAVAYITPSDYLFWFRSHTAKEIKWGGAKHHPEDKDDGQRMHPRSSFKAFLEVVKSRSLPW

SEQ ID NO: 10033 - protein, 333 aa, Streptococcus pyogenes SSI-1
MMSETKLMALREAVNLAMTEEMRKDENIFLMGEDVGVYGGDFGTSVGMIEEFGPKRVKDTPISEAAISGAAIGAAITGLRPIVDVTFMDFLTIMMDAIVNNGAKNNYMFGGGLITPVTFRVASGSGIGSAAQHSQSLEAWLTHIPGIKVVAPGNANDAKGLLKSAIRDNNIVLFMEPKALYGKKEEVNQDPDFYIPLGKGDIKREGTDLTIVSYGRMLERVLQAAEEVAADGINVEVVDPRTLIPLDKELIIESVKKTGKLMLVNDAYKTGGFIGEIATMITESEAFDYLDHPIVRLASEDVPVPYARVLEQAILPDVEKIKAAIVKMANKGN

SEQ ID NO: 10034 - protein, 398 aa, Salmonella enterica subsp. enterica serovar Typhi
MKQLTILGSTGSIGCSTLDVVHHNPDSFRVIALVAGKNVARMAEQCLEFSPRYAVMDDTSSAEQLKIMLQQHGSRTEVLSGQQAACEMAALDEVGHVMAAIVGAAGLLPTLAAIRAGKTILLANKESLVTCGRLFMDEVKRSNARLLPVDSEHNAIFQSLPQSIQHNLGYADLEQNGVTSILLTGSGGPFRETPMCDLAAMTPDQACRHPNWSMGRKISVDSATMMNKGLEYIEARWLFNASARQMEVLIHPQSVIHSMVRYQDGSVLAQLGEPDMRTPIAHTMAWPNRVTSGAQPLDFCKLSALTFSAPDYQRYPCLKLAMEAFEQGQAATTALNAANEITVAAFLAQQIRFTDIAGLNLAVLERMDLHEPASVDDVLQVDAIAREVARKQVIRLSR

SEQ ID NO: 10035 - protein, 355 aa, Zea mays
MPLVGQIAKVLTQRCRSWMLFYGEDVSVKMRLLFYILPCLLLSMDFLTLHPAMLGMEVILQGWMTGKAKKLMSFMIKGMSNGTFPTLPQPRRVASYDPKLSLLAAMAKNYPTVSAEYSEAVEKARRKLRALIAEKSCAPLMLRLAWHSAGTFDVSSRTGGPFGTMKHQSELAHGANAGLDIAVRLLEPIKEEFPILSYADFYQLAGVVAVEVTGGPEIPFHPGREDKPQPPPEGRLPDATKGSDHLRQVFGKQMGLSDQDIVALSGGHTLGRCHKERSGFEGAWTTNPLVFDNSYFKELLSGDKEGLLQLPSDKALLSDPVFRPLVEKYAADEKAFFDDYKEAHLKLSELGFADA

SEQ ID NO: 10036 - protein, 800 aa, Listeria monocytogenes
MRKKRYVWLKSILVAILVFGSGVWINTSNGTNAQAATITQDTPINQIFTDAALAEKMKTVLGKTNVTDTVSQTDLDQVTTLQADRLGIKSIDGLEYLNNLTQINFSNNQLTDITPLKDLTKLVDILMNNNQIADITPLANLTNLTGLTLFNNQITDIDPLKNLTNLNRLELSSNTISDISALSGLTNLQQLSFGNQVTDLKPLANLTTLERLDISSNKVSDISVLAKLTNLESLIATNNQISDITPLGILTNLDELSLNGNQLKDIGTLASLTNLTDLDLANNQISNLAPLSGLTKLTELKLGANQISNISPLAGLTALTNLELNENQLEDISPISNLKNLTYLTLYFNNISDISPVSSLTKLQRLFFYNNKVSDVSSLANLTNINWLSAGHNQISDLTPLANLTRITQLGLNDQAWTNAPVNYKANVSIPNTVKNVTGALIAPATISDGGSYAEPDITWNLPSYTNEVSYTFSQPVTIGKGTTTFSGTVTQPLKAIFNAKFHVDGKETTKEVEAGNLLTEPAKPVKEGHTFVGWFDAQTGGTKWNFSTDKMPTNDINLYAQFSINSYTATFENDGVTTSQTVDYQGLLQEPTPPTKEGYTFKGWYDAKTGGDKWDFATSKMPAKNITLYAQYSANSYTATFDVDGKSTTQAVDYQGLLKEPKAPTKAGYTFKGWYDEKTDGKKWDFATDKMPANDITLYAQFTKNPVAPPTTGGNTPPTTNNGGNTTPPSANIPGSDTSNTSTGNSASTTSTMNAYDPYNSKEASLPTTGDSDNALYLLLGLLAVGTAMALTKKARASK

SEQ ID NO: 10037 - protein, 486 aa, Triticum aestivum
LIPSPANPRFPGPSLPYALGAALPRPAQHRWLIDSWPPACGKVRRRRRPRGTRWTITTSRTARWTSTSTAGGDGSRSDGEGDDEYALLTRITDTSAAEARAGKDIQGIPWERLQITRQDYRKARLEQYKNYENFPQSGELMDKLCKQVESSSKYYEFQYNTRIVKPSILHFQLRNLLWATSKHDVYFMSNSTVGHWSSLSHKMTDVLDFSGHVAPAKKHPGCALEGFTGVQVSTLAVNEGLLVAGGFQGELVCKSLGERDVKFCTRTTLSDNAITNAMDIHRSTSGSLRITVSNNDSGVREFDMERFQLLNHFRFNWPVNHTSVSPDKKLLAVVGDDRDALLVDSRNGKVTSTLVGHLDYSFASAWHPDGVTFATGNQDKTCRVWDIRNPSTSLAVLRGNIGAIRCIRYSSDGRFLLFSEPADFVHVYSAAECYRKRQEIDFFGEISGISLSPDDESLFVGVCDRVYASLLNYRMVHANGYLDSYM

SEQ ID NO: 10038 - protein, 205 aa, Oryza sativa
  unsure (1)..(205): unsure at all Xaa locations
MSSTMPAQGGVRHHRGNYFNGPNLNNLIEELTQNDRPGPAPAPSSAIDSLPTVQITGAHLSDGSQCPVCKEDFELGEAARQMPCKHVYHSDCIVPWLRLHNSCPVCRYQLPAAAGSNANSRARRGSANNGGGGGGGDGRDREQTIVRWGPFSWMWPPRXGSKTPTTGGNGRRGRPEAGDAGGNDMTALQSFVLVATCVFFFSFLT

SEQ ID NO: 10039 - protein, 109 aa, Triticum aestivum
MDMDASFRSAIVNGETLKMFVGQRVRTVLKFQHTQGGVLVGQSTDGHQLTIRGASEGRESHYLEVIGIADNDQSISAETCKDFDDNFDADAFNGLCKLVVNGKVKEVLL

SEQ ID NO: 10040 - protein, 367 aa, Streptomyces coelicolor A3(2)
MDPVRLALTRSLVGALGLDREVEVVAARPAGESTLRLVHREDYIDAVRAASADPRSADGSYGLGTVDDPAFAGMHEVSALIAGQSVGAAEAVWRGDALHAVNFAGGLHHAMPGAASGFCVYNDAALAIARLLELGAERVAYVDVDVHHGDGVQAAFWEDPRVLTVSLHEHPATLFPQTGWPEETGADCAEGSAVNVALPAGTGDAGWLRAFHAVVPEVLADFRPQVLVTQHGADTHFEDPLAHLAVSLDAQRAVQVACHELAHEYAGGRWVALGGGGYAVVEVVPRSWAHLVGVAAGRPVEPETVIPEGWRQEVYARTRQLGPMRMTDGRWPVSYASWEAGYDPADRLDQAVRAARRAVFPLRGLLA

SEQ ID NO: 10041 - protein, 250 aa, Triticum aestivum
  unsure (1)..(250): unsure at all Xaa locations
MARGSRPGRNGGGGGGCARCFLGFLLKFLAFLQVFAAVSAVLYAASILSRWARHHELHFDHLLPDLWFACVVMAAGLLYCAILLAGYVAAEVNSGCCLCFYTILAMAMMLLEAAVAGHLLLNEHWMQDLPYDRTRELENLVSFVNNNLDLCKWAALATVATQVFSLFLAITLRAMVSPTNEDCDSDEDFVVIRRPLLLAQGAPAYLPTTXDPRGAHXLGLWSSSMRQKYGLNSTSDYTYNTLDQNAVPPQ

SEQ ID NO: 10042 - protein, 240 aa, Pyrococcus abyssi
MELKGKVALITGASRGIGRAIAIELAKRGVNVVINYRSNEEEAKKTEELCRQYGVETLLVKADVSNREEVREMVKKVIDKFGRIDILINNAGILGKTKDPLEVTDEEWDRVISVNLKGAFIVTQEVLRYMKKGKIVNIASIAGKDGGTVGPHYAASKGGLIALTFNLARHLAPNILVNAVAPGPVDTDMLSSEMKEMLKKLSLTGDIAKPSEVAHAVIFLLENDHITGEVIDVNGGRLMD

SEQ ID NO: 10043 - protein, 68 aa, Oryza sativa
LKELKRVDHILMSLQRKLQPAPPPPPFPEGYVPSEQEKASDDLLASEALPPQVDPIIDQGPAKRPRFQ

SEQ ID NO: 10044 - protein, 485 aa, Chlamydophila pneumoniae CWL029
MTSRTKSSKNLGTIALAGMVVSSIIGGGIFSLPQNMAATAGAGAVILSWILTGFGMFFIANTFRILSTIRPDLKEGIYMYSREGFGPYIGFTIGWGYWLCQIFGNVGYAVITMDALNYFFPPYFQGGNTLPAILGGSILIWVFNFIVLKGIRQASIINVIGTIFKIIPLIIFIILTAFFFKLAVFKTDFWGHAVTKAQPSLGSVSSQLKGTMLVTLWAFIGIEGAVVMSGRAKNPLSVGQATVLGFLGCLTIYILFSLLPFGSLFQHQLANIPNPSTAGVLDILVGKWGEVLMNVGLIIAVLSSWLSWTIIVAEIPFSAAKNGTFPEIFTIENKEKSPSVSLYITSSVMQLAMLLVYFSSNAWNTMLSITGVMVLPAYLASAAFLFKLSKSKTYPKKGSIKAPLAMITGILGVVYSLWLIYAGGLKYLFMALVLLALGIPFYIDAGKKKKNAKTFFAKKEIVGMTFIGLLALTAIFLFLTGRIKI

SEQ ID NO: 10045 - protein, 304 aa, Synechocystis sp. PCC 6803
MVAIIYSAEFLRHETGPTHPECPARLTAIATALRKMPGANYLHWQKPSPVTWNLDPYILRCHSQEYLNKLAKLAELGGGSLDADTPVSPQSYDVARLAVRAWLDGVDHVLNQREAVFVLARPPGHHAIRNTGMGFCLLNNVAIAAHYALTRPGVERVAILDWDVHHGNGTEALVDHNPRIFYCSLHQFPCYPGTGAAGDRGQHDNVLNIPLKPGGDGKVYREAFEHKVLPFLRQVKPDLLLVSAGYDANHSDPLAYMNLIPEDYGMMTHYLMEISPYPVLGLEGGYHLPSLAKSVVETLKPLLF

SEQ ID NO: 10046 - protein, 106 aa, Brassica rapa
RPGAPPPFNLADIRAAIPKHCWVKNPWKSMSYVVRDVAIVFGLAAVAAYFNSWLLWPLYWFAQGTMFWALFVLGHDCGHGSFSNDPKLNSVAGHLLHSSILVPYHG

SEQ ID NO: 10047 - protein, 309 aa, Fusobacterium nucleatum subsp. vincentii ATCC 49256
MKKILIMGGNQFVGKEIVKKFLEKDYTIYILNRGTRKNIEEVIFFKVDRDNFIEMENILKNIDVDIIIDVSAYTEEQVDILHKVMKNRFKQYILISSASVYNNIESTPANEESQTGENLIWGDYAKNKYLAEKKTIENSKIYNFKYTIFRPFYIYGVGNNLDRENYFFSRIKYNLPIYIPSKNNIIQFGYVEDLVLAIESSIGNSDFYNQTFNISGDEYVTMSEFSEICGKVMNKKAIIKYINTEENKIKARDWFPFREVNLFGDISKLENTGFRNTYSLIQGLEKTYKYNDENDLITKPILNKLEIEN

SEQ ID NO: 10048 - protein, 332 aa, Oryza sativa
  unsure (1)..(332): unsure at all Xaa locations
GETAAASSDDSSSGVCGGGGGGEVEPRRRQKRPRRSAPRDCPSQRSSAFRGVTRHRWTGRFEAHLWDKNTWNESQSKKGRQGAYDGEEAAARAYDLAALKYWGHDTVLNFPLSTYDEELKEMEGQSREEYIGSLRRKSSGFSRGVSKYRGVARHHHNGKWEARIGRVFGNKYLYLGTYATQEEAAVAYDIAAIEHRGLNAVTNFDINLYIRAPPPPPPSKTMISPKPSPPRCKASTSSPSSPATTRQLQTADDDDDDLVAQLPPQQPTVPKDDQYNVDMSSVAAARCSFPDDVQTYFGLDDDGFGYPEVDTFLFGDLGAYAAPMFQFELDVX

SEQ ID NO: 10049 - protein, 156 aa, Helianthus annuus
EFQVGPSVGILAGDEIWAARYILERITEIAGVVVSFDPKPIPGDWNGAGAHTNYSTKSMREEGGYEIIKKAIEKLGLRHKEHIAAYGEGNERRLTGKHETANINTFKWGVANRGASIRVGRDTEKDGKGYFEDRRPASNMDPYVVTSMIAETTILL

SEQ ID NO: 10050 - protein, 440 aa, Hordeum vulgare subsp. vulgare
MVLDLNVESPADSGTSSSSVLNSADAAGAFRFGLLGSPDDDDCSGELAPAAASGFVTRQLFPAPPPAPGVMMGQAPAPPPTAPVWQPRRAEELVVAQRVAPKKKTRRGPRSRSSQYRGVTFYRRTGRWESHIWDCGKQVYLGGFDTAHAAARAYDRAAIKFRGLEADINFNLSDYEEDLKQMRNWTKEEFVHILRRQSTGFARGSSKYRGVTLHKCGRWEARMGQLLGKKYIYLGLFDSEVEAARAYDRAAIRFNGRDAVTNFDSSSYNGDATPDVENEAIVDADALDLDLRMSQPTAHDPKRDNIIAGLQLTFDSPESSTTMVSSQPMSSSSQWPVHQHGTAVPPQQHQRLYPSACHGFYPNVQVQVQERPLEPRPPEPSSFPGWGWHAQAVPPGSSHSPLLYAAASSGFSTAAGANPAPPAVVPRPSPPLLLPRPPDN

SEQ ID NO: 10051 - protein, 317 aa, Glycine max; identical to SEQ ID NO: 4842

SEQ ID NO: 10052 - protein, 429 aa, Zea mays
MMLEGKSYLVSRSVPSSCEPEAEWEYLAHAVLSGKRPAPEDDVEVEDPDETGSGGKRSKPPSPQPHTPDICEGHGSNRHATGSGEQRITGSNPMTSIGRDLTLNCLLRLSRSDYGSVASLSRDFRSMVRSGEIYRLRRQNGVAEHWVYFSCNVLEWDAYDPYRERWIQVPKMPPDECFKCSDKESLAVGTELLVFGMARIVFRYSILTNSWSRADPMNSPRCLFGSTSVGGKAFVAGGTDCVGNILSSAEMYDSETHTWTPLPSMNTARKMCSGVFMDGKFYVIGGVANSNRVLTCGEEYDLKRGSWRTIENMSGGLNGVTGAPPLIAVVSNELYAADYGEKDLKKYDKKNNRWITLGKLPERSVSMNGWGLAFRACGDRLIVIGGPRTYTGGTIELNSWIPDERPPVWNLIARRPSGNFVYNCAVMGC

SEQ ID NO: 10053 - protein, 92 aa, Oxalis oblongiformis
  unsure (1)..(92): unsure at all Xaa locations
GINISGTNGEVMPGQWEYQVGPSVGIEAGDHIWASRYILERITEQAGVVLTLDPKPIDGDWNGAGCHTNYSTKSMRDEGGFEVIKKAIFNXX

SEQ ID NO: 10054 - protein, 132 aa, Glycine max
  unsure (1)..(132): unsure at all Xaa locations
MAAAXQGEASTGATTTATFRRVYETLKAELLRDGYFHFNDDALRWLDAMLDYNVLGGXLNRGXXXVESXKSLKAGSEPSEEEEFLACVLGWGIEWLQAYFLILDDIMDNSQTRRGKPCWYRLPKFCLXYLEG

SEQ ID NO: 10055 - protein, 242 aa, Petunia x hybrida
  unsure (1)..(242): unsure at all Xaa locations
MEFQSDLTREISPQRKLGRGKIEIKRIENTTNRQVTFCKRRNGLLKKAYELSVLCDAEVALIVFSSRGRLYEYANNSVKATIERYKKACSDSSNTGSIAEANAQYYQQEASKLRAQIGNXQNQNRNFLGESLAALNLRDLRNLEQKIEKGISKIRAKKNELLFAEIEYMQKREIDLHNNNQYLRAKIAETERSQQMNLMPGSSSYDLVPPQQSFDARNYLQVNGLQTNNHYPRQDQPPLQLV

SEQ ID NO: 10056 - protein, 393 aa, Glycine max
  unsure (1)..(393): unsure at all Xaa locations
MEAIRKQASKLREQVARQQQAVLKQFGAGGYGGSDNMVTDEVELQQHQKLEKLYISTRAGKHYQRDIVRGVEGYIVTGSKQVEIGTKLSEDSRKYGADNTCTSGSTLSRAALNYARARAQMEKERGSLLKALGTQVAEPLRAMVMGAPLEDARHLAQRYDRMRLSLCFCLEAEAQAIEVSKRQAKVREMPANAENAMKLEAAEAKLQDLKTNMAILGKEAAAALAAVEAQQQRLTLQRLIAMVAMKRATHQEFSNLEKAERPINQXRVLQILDQLEGEMISERQRXIEAPPTPSVDSSMTPPPSYEEVNGVYASQAHNGSTDSMGYFLGEVLFPYHAESEVELNLSVGDYIVIRKVTNNGWAEGECKGKAGWFPFGYIERRERVLASKVAEVF

SEQ ID NO: 10057 - protein, 143 aa, Glycine max; identical to SEQ ID NO: 9866

SEQ ID NO: 10058 - protein, 302 aa, Glycine max
  unsure (1)..(302): unsure at all Xaa locations
MGGTVVAEVPTKRGRGRRALKEKTPSTNDANIIIATPISPSSEKAAQVVPSKKKQDSKKQQSFEKELLEMQEMLQQMRLEKEKTEELLKVKDEALKLKEEELENRGREQEKLQTELKKLQKLHEFKPTMNXPMLKDNKKKKGRKKKGCSEKKRPSPPYILWMKDQWNEIKKANPEAEFKEISPMLGAKWKTVSAEEKKPYEGIYHAEKEAYLQVIAKEKRETEAMRLLEDEQKQRTAMELLEQYMQFKQEAGKRWPKKIQRERTTPGHPLPGSLLLVXAALVAENKNFLEVPKITAEEWKNM

SEQ ID NO: 10059 - protein, 1465 aa, Adiantum capillus-veneris
MATPGGPKTKHSVSVAQTRADARLHAAFEGSGDAGAGGSRAPFDYSKSGMDASSVTSVAPEAITAYLQRMQRGGLTQAFGCMLVVAGQKIVAFSENAPEMLEVAAGLGTDLRMLFTQGSTAALDQAVKEEDLSSVNPLVLQSCGGSAKQFYAMLHRIEDVAGVVIDLEPIENGVVEKKSSAEMAVKPIARVQSLPGGEIGRLCQVVVEEVQEMTGYDRVMAYKFHEDGHGEVVAEVRRPDLEPYLGLHYPSTDVPQASRMMFMKNGVRMIGDCTLPPVRVVQAKELAQPISLAGSTLRAPHGCHAQYMSNMGSAASLTMAVAIDDYDDDSSLSCGSRKLWGLVVCHHPSPRTVSYPLRCACEKLMVAFGVQLNIELDLAAQLRENHILTTQALLCDMLRRIRGAPIGIVSRSPSIMDLVKCDGAALYYGGRFWPLGTTPSEFQIRDLAEWLLGASEEIASTGVTCTDSLAEMGYPGAALLGDAVCGMAAAMITPNSDFLFWFRSHTAKEVYWGGAEHDPQSRDDDSWMQLPRSSFKAFLEIVKRRSLPWEEVEVDAIRSLQLILREDLEQFCAAVGAVKASDGDDEDSLVPSAKKLSLKETEENGGADNSKKLERMHSAAAGGGGGGGRWEKMRLPSSLAQEWMEAIRGTGDGGASGGGGGGPFDWDLISAFQHNSFIVVDALKPDFPIIYASTGFFNLTGYTSREVIGGNCRFLQGPDTNPADVASIREALAQGTGTFCGRLLNYRKDGSSFWNLLTIAPIKDDLGSIVKLIGVQLEVSKYTEGIRANNRRPNGMPQSLIRYDVRHQDKVSAFIAQLVAALTKPDKVETPRLSSAMRFSLTGQTIESLPQPTAIPREGGGRTRRPRSSSFLSLLGMEKEKDIPEEDELQELEVIMLEDASVGRPGSLDDPERTRRGIDLATTLERIGKSFVITDPRLPDNPIIFASDRFLELTEYTREEVLGNNCRFLQGRGTDRKAVQLIRDAVKEQRDVTVQVLNYTKGGRAFWNLFHLQVMRDENGDVQYFIGVQQEMVAPRPVHQPPELPDILPDRVEQEKAEVVRATAQRVDAAARELPDANLVPDHLFAPHSKVVTPLPHSKTNSSSWFAIRRVQRRLRRGERLGLKHFRPIKPLGSGDTGSVHLVELRGTGQVFALKAMDKSMMLQRNKVHRARAEREILAIMDHPFLPTLYASFQTKTHVCLITDYCPGGDLFLLQDKQPTQTLSERTASFYAAEVVVALEYLHCMGVIYRDLKPENVLLQKNGHILLTDFDLSFLTSCRPQLILQGGKGRSRRSKRRRRVTFCAEPRVSSNSFVGTEEYIAPEIISGEPHSSAVDWWALGILLYEMLYGRTPFVGRNRQKTFYNVLNKELIFPTSIPVSLAGRQLIAGLLQRDPTIRLGTLRGASELKKHPFFREINWPLIRWRKFSANQAHNANNVSSLDEGESDSGNAWEANGGSTQSFQDTF

SEQ ID NO: 10060 - protein, 99 aa, Saccharomyces cerevisiae
MAATKEAKQPKEPKKRTTRRKKDPNAPKRGLSAYMFFANENRDIVRSENPDVTFGQVGRILGERWKALTAEEKQPYESKAQADKKRYESEKELYNATRA

SEQ ID NO: 10061 - protein, 446 aa, Mycobacterium leprae
MTSVEQSRQLVTEIPGPVSLELAKRLNAAVPRGVGVTLPVFVTRAAGGVIEDVDGNRLIDLGSGIAVTTIGNSSPRVVDAVRAQVADFTHTCFIITPYEEYVAVTEQLNRITPGSGEKRSVLFNSGAEAVENSIKVARSYTRKPAVVAFDHAYHGRTNLTMALTAKSMPYKSGFGPFAPEIYRAPLSYPYRDGLLNKDLATDGKLAGARAINVIEKQVGADDLAAVIIEPIQGEGGFIVPAEGFLATLLDWCRKNNVMFIADEVQTGFARTGAMFACEHDGIVPDLICTAKGIADGLPLAAVTGRAEIMNAPHVSGLGGTFGGNPVACAAALATITTIENDGLIQRAQQIERLITDRLLRLQDADDRIGDVRGRGAMIAVELVKSGTAEPDPELTEKVATAAHATGVIILTCGMFGNIIRLLPPLTISDELLAEGLDILSRILGDF

SEQ ID NO: 10062 - protein, 360 aa, Pseudomonas syringae pv. tomato str. DC3000
MSKQILILPGDGIGPEIMTEAVKVLELANQKYQLGFELTHDVIGGAAIDKHGVPLADETLDRARAADAVLLGAVGGPKWDTIERDIRPERGLLKIRSQLGLFGNLRPAILYPQLADASSLKPEIVAGLDILIVRELTGGIYFGAPRGTRVLDNGERQAYDTLPYSESEIRRIAKVGFDMAMVRGKKLCSVDKANVLASSQLWREIVEQVAKDYPEVELSHLYVDNAAMQLVRAPKQFDVIVTDNLFGDILSDQASMLTGSIGMLPSASLDTANKGMYEPCHGSAPDIAGQGIANPLATILSVSMMLRYSFNLTAAADAIEQAVSLVLDQGIRTGDIWSEGKVKVGTKEMGDAVVAALRNL

SEQ ID NO: 10063 - protein, 482 aa, Pseudomonas putida KT2440
MPSEHSAGSPAGSSVDFEKVGSDYFQQRELKKGAAGWVLLVGLGVAYVISGDYAGWNFGLAQGGWGGMFLATLLMATMYLCMCFSLAELSSMIPTAGGGYGFARSAFGPWGGFLTGTAILIEYAIAPAAIAVFIGAYCQSLFGIGGWMIYLAFYIVFISIHIFGVGEALKLMFIITAIAAIALAVFLIGMVPHFDAANLFDIAKTDAVGASSFLPFGYVGVWAAIPYAIWFFLAVEGVPLAAEETKNPKRDLPRGLIGAMLVLLAFALLILVVGPGGAGSEALKASGNPLVEALSKAYGGSTWMGGFVNLVGLAGLIASFFSIIYAYSRQIFALSRAGYLPRKLSETNKSKAPVLALVIPGIIGFALSLTGQGDLLILVAVFGATLSYVLMMAAHITLRIRRPKMERPYRTPGGIFTSGLALVLACIAVVAGFLVDPRVVIGAAVIYAVLIAYFAFYSRHHLVAGTPEEEFAAIQKAEEALH

SEQ ID NO: 10064 - protein, 352 aa, unidentified bacterium
MHLNCMRRLTYENTGGYQAMIPKYKDRSLSVEERVDDLIARMTPEEKVGQMMQISFISVSKEEAEEWITERCAGSFLHALGDDAVRLQEIAMGTRLGIPLLFGIDAVRGHALYNGATIFPTQLAMACSWNPELVKKAGSITAKEVAADGLHWTFSPILCLGRDLRWGRINETFGEDPYLAGELAASIIQGYQGDSLSDPDSILACAKHYIAYGEATGGRDAYDAQISIRKVRDVFLPPFRKAVEAGCATFMSSYQSIDGTPVTANKKVLRKLLKEELGFDGFVVTDWNNVGSLICNQHVAGDMETAARKAIEAGNDMIMTTNEFYEAALSLIRNGVVPGELIDEAVRRILRI

SEQ ID NO: 10065 - protein, 179 aa, Pseudomonas fluorescens PfO-1
MATSLSGKRVAFLVTDGFEQVELTGPKQALEQAGAQVDILSAEAGSVKGWNHDKPADDFKVDQTFQGASIDQYDAVVLPGGVQNSDTIRIDQDAQHLVKTGTSAGKPIAVICHGSWLLISAGLVNGKTMTSYKTVKDDLVNAGANWVDQEVVKDGHLISSRQPDDIPAFSNALIDALSA

SEQ ID NO: 10066 - protein, 374 aa, Elaeodendron xylocarpum
ALSIAGAVQSQKLAVRAISQLQSLPGGDIKLLCDTVVESVRDLTSYDRVMVYKFHEDEHGEVVAESKRPDLEPYIGLHYPSTDIPQASRFLFKQNRVRIIVDCHASPVRVIQDGGLTQPLCLVGSTLRAPHGCHAQYMENMGSIASLAMAVVINGNDEEVIGGRNPTRLWGLVVCHHTSARCIPFPLRYACEFLMQAFGLQLNMELQLAAQLLEKHVLKTQTLLCDMLLRDSPIGIVTQSPSIMDLVKCDGAALYYQGNYYPLGVTPSEAQIKDIVEWLLAFHGDSTGLSTDSLADAGYPGAALLGDAVCGMAVAYITNRDFLFWFRSHTAKEIKWGGAKHHPEDKDDGERMHPRSSFKAFLEVVKSRSLPWEN

SEQ ID NO: 10067 - protein, 113 aa, Vicia faba
KHMIEDDCADETGIPLPNVTSRILAKVIEYCKKHVEAPKIDEYGMPVDGKDMKKWDAEFVKVDQDTLFDLILAANYLDIKSLLDLTCKTVANMMDGRTPDEIRRTFNIKNDFT

SEQ ID NO: 10068 - protein, 452 aa, Escherichia coli O157:H7
MSHNVTPNTSRVELRKTLTLVPVVMMGLAYMQPMTLFDTFGIVSGLTDGHVPTAYAFALIAILFTALSYGKLVRRYPSAGSAYTYAQKSISPTVGFMVGWSSLLDYLFAPMINILLAKIYFEALVPSIPSWMFVVALVAFMTAFNLRSLKSVANFNTVIVVLQVVLIAVILGMVVYGVFEGEGAGTLASTRPFWSGDAHVIPMITGATILCFSFTGFDGISNLSEETKDAERVIPRAIFLTALIGGMIFIFATYFLQLYFPDISRFKDPDASQPEIMLYVAGKAFQVGALIFSTITVLASGMAAHAGVARLMYVMGRDGVFPKSFFGYVHPKWRTPAMNIILVGAIALLAINFDLVMATALINFGALVAFTFVNLSVISQFWIREKRNKTLKDHFQYLFLPMCGALTVGALWVNLEESSMVLGLIWAAIGLIYLACVTKSFRNPVPQYEDVA

SEQ ID NO: 10069 - protein, 448 aa, Salmonella typhimurium
MKKVKKLSLTDLVLYGLVFMVPIAPVSLYGVVYNLSHGMVALVSILWAAIAMFFTAYSYSTLSQHISSSGSAYAYAGVSINPAVGFLTGWILLLDYLLFPTLVAVLGGVAVHAILPQIPVWVWPLIYVAIGTGVNYLGIQQTAKFDKLLVFIQLGILAIFVLLIVRLMLLDSSQITLSFRPFFDSQWFTPGLIATAISVAALNFLGFDAISTLSEESEGGGRAVSKATLLALVLATVLFIIVVAFAAFATGNVDRFAEGNATNEAFFTIAGNVGGIWLKVAFSIIVAFVCAVGNIITAQTAVSRVLFSMGRDRMLPAFLAHVHTTRKTPDYAILFTGGVTLLLSYLFSGKIESISTLVNFGALFAFFVVNLCVFILFNFRMKAQRRIFAHVISPIMGMIVIGYVCLNMNIHALILGISWAAIGIAILCYRKAHNQNIAIDLEGKKLLD

SEQ ID NO: 10070 - protein, 400 aa, Streptomyces clavuligerus
MSNQEFAQRWQGVMIDSYGTPGLSFVRGEGSTLWDADGTAYTDFVSGLAVNALGHAHPAVVGAVSRQIASLGHISNFYSAEPTITLAERLIELFGRPGRVFFCNSGAEANETAFKIGRLTGRSRIVAAQSGFHGRTMGSLALTGQPAKREPFLPLPGDVTHVPYGDAEALRAAVTEDTAMVILEPIQGESGVVVPPKGYLRAAREITEATGTLLVLDEVQTGIGRTGHWFAAQAEGVEADVVTLAKGLGGGLPLGAAVAFGRAAELMTPGHHASTFGGNPVSCARTRVLDTIAADGLLDRVKQLGSAPDEWSVRDAAAIRWSPMSGAGLMLGIVLNEPLAPQVQLAAQKAGFLVNVPAPDVVRLIPPLVIEETEVDAFLQALPGLLDAVHERDREGQTGE

SEQ ID NO: 10071 - protein, 157 aa, Zea mays; identical to SEQ ID NO: 642

SEQ ID NO: 10072 - protein, 338 aa, Yersinia pseudotuberculosis
MYVLVTGGSGYIGSHTCVQLIEAGYKPVILDNLCNSKSSVLARIHSLTGYTPELYTGDIRDRTLLDSIFAAHPIHAVIHFAGLKAVGESVNRPLEYYNNNVFGTLVLLEAMRAAQVKNLIFSSSATVYGDQPQIPYVESFPTGSPSSPYGRSKLMVEQILQDVQLADPQWNMTILRYFNPVGAHPSGLMGEDPQGIPNNLMPFIAQVAVGRRESLAIFGNDYPTPDGTGVRDYIHVVDLADGHVAAMKTLHGKPGVHIFNLGAGVGHSVLQVVAAFSKACGKPLAYHFAPRREGDLPAYWADATKAAEQLGWRVSRSLDEMAADTWHWQSKNPQGYPD

SEQ ID NO: 10073 - protein, 227 aa, Methanothermobacter thermautotrophicus str. Delta H
MIDLNIGYVLLCVFIGFLTYYRGALDVWGSLFMILMGLLIILSAGFNWLLLIFIFLVLGLLSTKYRHEYKKELGVFEGTRSAKNVISNGIVPFIMAAFGYYDGFVGGFIGSVATATADTMASEIGVLQTPRLITTLKRVEPGTDGGISSLGTAAGIAGAGIIGLSAFLLGVCPDPLKSMKVAVIAGTVGCFMDSLLGAVLERRKYLTNEHVNLLATVTGAVIGIILG

SEQ ID NO: 10074 - protein, 352 aa, Enterococcus avium
MSKTMKGVSKQAPGYDQMAFIDLSVPEATDDKVLIKVAYTGICGSDIHTFKGEYKNPTTPVVLGHEFSGQVVEVGANVPKVKVGDRVTSETTFYVCGECDYCKEKQYNLCPHRKGIGTQQNGSMANYVLAREESIHLLPDHLSYEGAAMSEPLACCVHAMYQKSHLELKDTIIIMGPGPIGLYLLQIAKEIGAFVIMTGITKDAHRLALAKKLGADVIVDTMKEDLAKVVNEITDGYGVDKVYDASGAVPAVNASLPLIRKQGQFIQVGLFANKMVDLDTESIIQREIEYIGSRSQNPYDWPIAIHLLAKGAINIDEMITKKYPLTEWREAFDKVMEGNEIKVMIESNPEEF

SEQ ID NO: 10075 - protein, 668 aa, Oceanobacillus iheyensis HTE831
MVRKFFLLFLSIVLTFTTLPMTAFAEEEDEIQTMINNMSVEEKVGQLFIVHVYGQTPTDPNYESTNLTNNRGGKNFQEVIENYHIGGIIYFNWSQNIGTPLEKQQVHDLSNGLQDIALEQDSEIPLFVSTDQEGGIVQRVISPGTVFPGNMAIGATNSIDFASRSGEILGKELDALGINMNFAPTVDVNLNPANPVIGVRSFGEDPDMVSQLGAAQITAYEDQDVVATAKHFPGHGDTDVDSHYGLPVIDHDLETLHEVDLPPFQAAIDAGVGAIMTGHIVVPALDDSGMPATLSYPILTELLREDMGFEGLIITDSLGMSGANVVPPERVAVESFLAGADILLNPPDVPVAYEGVMDAVESGEISEERLDESVYRILSAKMEYGLFEDPYTESNKLDVIGSESHLKTASEIAEKSITLLKNNGDVLPLQEDEEVFITGPQAAYPNKIANLLGEQDIQSTHYSTATSPTDNQIAEAVDRAESADKVVVTTYTANTNERQQMLVEALQELDKPIVVSAHRNPYDLMAFPNVDAYLNSYSYLDVSLDAVAASLIGDINPSGKLPVTIPDVNEIGDGVDYVGAESANDIKSLVDELHTNEELNSDEAKKAFERHLTAVAQFEKTNQSAKVIKHLESFQTLIDHYNEQEALSKKAFNYLETTSLRLIDQWED

SEQ ID NO: 10076 - protein, 288 aa, Zea mays; identical to SEQ ID NO: 4011

SEQ ID NO: 10077 - protein, 214 aa, Paeonia tenuifolia
IVESVGEDVTDVKPGDHVLPIFTGECKECRHCKSEESNLCDLLRINTDRGVMLNDGKSRFSINGQPIFHFVGTSTFSEYTVLHVGCLAKINPEAPLDKVCVLSCGISTGLGATLNVAKPKKGSTVAIFGLGAVGLAAAEGARIAGASRIIGVDLNPKRFDEARKFGVTEFVNPKDYNKPVQEVIAEMTGGGVDRSVECTGSIMAMMSAFECVHD

SEQ ID NO: 10078 - protein, 744 aa, Listeria monocytogenes
MKTVLGKTNVTDTVSQTDLDQVTTLQADRLGIKSIDGLEYLNNLTQINFSNNQLTDITPLKDLTKLVDILMNNNQIADITPLANLSNLTGLTLFNNQITDIDPLKNLTNLNRLELSSNTISDISALSGLTSLQQLSFGNQVTDLKPLANLTTLERLDISSNKVSDISVLAKLTNLESLIATNNQISDITPLGILTNLDELSLNGNQLKDIGTLASLTNLTDLDLANNQISNLAPLSGLTKLTELKLGANQISNISPLAGLTALTNLELNENQLEDISPISNLKNLTYLTLYFNNISDISPVSSLTKLQRLFFYNNKVSDVSSLANLTNINWLSAGHNQISDLTPLANLTRITQLGLNDQEWTNPPVNYKVNVSIPNTVKNVTGALIAPATISDGGSYAEPDITWNLPSYTNEVSYTFNQSVTIGKGTTTFSGTVTQPLKAIFNAKFHVDGKETTKEVEAGNLLTEPAKPVKEGYTFVGWFDAQTGGTKWNFSTDKMPTNDIDLYAQFSINSYTATFDNDGVTTSQTVDYQGLLQEPTAPTKEGYTFKGWYDAKTGGDKWDFATSKMPAKNITLYAQYSANSYTATFDVDGKTTTQAVDYQGLLKEPKTPTKAGYTFKGWYDEKTDGKKWDFATDKMPANDITLYAQFTKNPVAPPTTGGNTPPTTNNGGNTTPPSANIPGSNTSNTSTGNSASTTSTMNAYDPYNSKEASLPTTGDSDNALYLLIGLLAVGTAVALTKKARASK

SEQ ID NO: 10079 - protein, 165 aa, Glycine max
  unsure (1)..(165): unsure at all Xaa locations
KGGLVVQITLSNGEGCGQFLGSSEGVTGTIFFTQEGNGPTTVTGSLAGLKPGLHGFHVHALGDTTXNGCLSTGAHFNPNNNEHGAPEDENRHAGDLGNVNVGDDGTVSFSITDSQIPLTGPNSIIGRAVVVHADSDDLGKGGHELSKTTGNAGGRVACGIIGLQG

SEQ ID NO: 10080 - protein, 174 aa, Pseudomonas syringae pv. tomato str. DC3000
MKFRLGDSSVQTDPQSWVAPSAVLIGNVKLEAGASVWFNAVLRGDNELIHIGENSNVQDGTVMHTDMGSPLAIGKGVTIGHNAMLHGCSVDDYSLIGINAVILNGARIGKYCIIGANSLIGEGKVIPDGSLVMGSPGKVVRELTDVQKKMLEASAAHYVHNARRYARDLAVQED

SEQ ID NO: 10081 - protein, 356 aa, Ceratophyllum demersum
ILHRIDAGIVIDLEPVNPSDVPVTAAGALKSYKLAAKSISRLQSIPSGNISLLCDVLVREVSELTGYDRVMAYKFHEDEHGEVIAECKRSDLEPYLGLHYPATDIPQASRFLFMKNRVRMICDCMVKPVKVIQDKRLNQSLSLCGSTLRAPHGCHAQYMANMGSIASLVMSVTINDDEEEEAPGEVQNQKTRKLWGLVVCHHTSPRFVPFPLRYACEFLIQVFGIQLNKEVELAVQLREKHILRTQTMLCDMILRDTPIGIVTRSPNVMDLVKCDGAALYYQNQFWLLGITPTEVQIRDILLWLLEYHKGTTGLSTDSLMEAGYPGALVLGDAVCGMAAIEITPKDYLFWFRSHTA

SEQ ID NO: 10082 - protein, 448 aa, Oryza sativa (japonica cultivar-group)
MSFRSIVRDVRDGFGSLSRRSFEVTLASLYGLTGHHKGKTQSSLDELDDSPAIIPESRWASLPPELLREVIRRLEADESTWPSRRNVVCFAAVCRTWREMCKETVLSPEFCGKLTFPVSIKQPGPRDGMIQCYIKRNRSKSTYHLYLCLSNVVTAEGGKFVLAAKRHRKTTCTEYTISMVSGNISRSSRTNIGKLRSNFLGTKFIIYDTQPPYNGAVVPHVGRTSKRFNSTKVSPKVPSVTYNIAQVSYELNVLGTRGPRRMRCMMHSIPASSVEPGGIVPGQPEQIVPRALEDSFRSTTSFSQSFRSTTSFSKSIMDPSMDFSSARFSDISGSIMGGDDNGEIKERPLVLRNKPPRWHEQLQCWCLNFRGRVTIASVKNFQLVAAPSPPPAGAPTPSQPGPADPEKVILQFGKVARDMFTMDYRYPLSAFQAFAICLSSFDTKLACE

SEQ ID NO: 10083 - protein, 299 aa, Oryza sativa
  unsure (1)..(299): unsure at all Xaa locations
MSQEQPRRPXGGXXRYGDVFPVTGSLAAKPIAPRDAATMQSAENLVLGKTVKGGPAAAMESAASRNEEMGVVGHDQATDAAAEQGVNVSDTLVPGGGRIVTEFVAGQAVGHYVEQDDGAAVVAGVVGAAPGAVRVEEPAKITIGEALEAAALAAGGTPVERSDAAAIQAAEAKATGTDTYMPGGLAAQAQSAAVANLWTARDADKTKLGDVLSNATAKLAADKEVESGDAARVAGAEMRNKPGAAARPGGVAASMAAAARLNRGPTTWDTIHASIHVYQTARVATRARCKINTLRCTFY

SEQ ID NO: 10084 - protein, 461 aa, Brucella melitensis 16M
MPIEILMPALSPTMEEGKLSKWLKKEGDKVTSGDVIAEIETDKATMEVEAVDEGTIGKLLVDEGTEGVKVNTPIAVLLGDGESAADIGSAPAAKAEAAKEEPKAEENKADAVPAAPKAPAVEVASDPDIPAGTEMVSLTVREALRDAMAEEMRRDPDVFIMGEEVAQYQGAYKITQGLLDEFGPKRVVDTPITEHGFAGVGVGAAFAGLKPIVEFMTFNFAMQAIDQIVNSAAKTLYMSGGQMGAPMVFRGPSGAAARVAAQHSQCYAAWYSHIPGLKVVMPYTAADAKGLLKAAIRDPNPVIFLENEILYGHHFDVPKLDDFVLPIGKARIHKQGKDATIVSFGIGMTYAVKAAEELAGQGIDVEIIDLRTIRPMDIATVVESVKKTGRLVTVEEGFPQSSVGTEIATRVMQQAFDYLDAPILTIAGKDVPMPYAANLEKLALPSVAEVVEAVKAVTYTA

SEQ ID NO: 10085 - protein, 449 aa, Pseudomonas putida
NMPEHAGASLASQLKLDAHWMPYTANRNFLRDPRLIVAAEGSWLVDDKGRKVYDSLSGLWTCGAGHTRKEIQEAVAKQLSTLDYSPGFQYGHPLSFQLAEKITDLTPGNLNHVFFTDSGSECALTAVKMVRAYWRLKGQATKTKMIGRARGYHGVNIAGTSLGGVNGNRKLFGQPMQDVDHLPHTLLASNAYSRGMPKEGGIALADELLKLIELHDASNIAAVFVEPLAGSAGVLVPPEGYLKRTREICNQHNILLVFDEVITGFGRTGSMFGADSFGVTPDLMCIAKQVTNGAIPMGAVIASTEIYQTFMNQPTPEYAVEFPHGYTYSAHPVACAAGLAALCLLQKENLVQSVAEVAPHFEKALHGIKGAKNVIDIRNFGLAGAIQIAPRDGDAIVRPFEAGMALWKAGFYVRFGGDTLQFGPTFNSKPQDLDRLFDAVGEVLNKLLD

SEQ ID NO: 10086 - protein, 373 aa, Triticum aestivum
  unsure (1)..(373): unsure at all Xaa locations
AAVRVVQVACTLCQRVQDSLLLADPGSGSGXVHSKLDRSPVTVADWGVQATVSWLLSDCFGDENVSIVAEEDDKTLSSSDGTALLESVVAAGNGCLVEAPKYGLRSPEKDLGPHDVLQAIRKCSSTGGPKGRFWVLDPVDGTLGFVRGDQYAIALALIEDGEVVLGVLGCPNYPMKKEWLNYHQRYYRLMSKVAPPTSGSWNKGCVMYAHKGCGQAWMQPLVHDFGMLSWHNSREVQVSSVSDPVSATFCEPVEKANSSHSFTAGLAHSVGLRNQPLRVYSMVKYAAIARGDAEIFMKFARAGYKEKIWDHAAGVVIIQEAGGVVTDAGGCPLDFSRGVYLEGLDRGIIACSGALLHQRILQAVDASWNSSTL

SEQ ID NO: 10087 - protein, 263 aa, Zea mays; identical to SEQ ID NO: 5024

SEQ ID NO: 10088 - protein, 193 aa, Zea mays
MEVTATPRIQEAKTVPGTAKATVDDEVTLRRFELTDVDAMMEWASDPQVAAFCRWEPYASAEPLLEFLRDAVLPHPWYRAICVSGAVVGAVSLAPTPERCRWELGYVLARAHWGKGLATAAVRRALRDAFADLEPEGLRRVEAMVDVGNPASQRVAEKAGFRREGVLRRHYWHKGRARDMVMYSFLSSDPLPD

SEQ ID NO: 10089 - protein, 293 aa, Glycine max
MESTEDSSTSSQQQPNLPPGFRFHPTDEELVVHYLKKKVDSVPLPVSIIADVDLYKFDPWELPAMASFGAEEWYFFSPRERKYPNGARPNRAATSGYWKATGTDKPICSGTQKVGVKKSLVFYGGKPPKGVKTDWIMHEYRVAENKPNNRPPGCDLGHKKNSLRLDDWVLCRIYKKGNTQRSHERDDSMDDMIGEVPPSINVGHMSARFHLSKMSTSYSGALLENDRNTLEGVVIGNGSVNGISNTNNITSVISSSHRFGTSRLQGRASSFCPSKQHFYFGLQKNTLITLLEC

SEQ ID NO: 10090 - protein, 243 aa, Phaseolus lunatus
AAADPEDEIFLASALGWCIEWLQAYFLVLDDIMDNSHTRRGQPCWFRVPKVGMIAANDGVLLRNHIPRILKKHFRGKPYYVDLLDLFNEVEFQTASGQMIDLITTLQGEKDLSKYTLTLHRRIVQYKTAYYSFYLPVACALLMAGDNLDNHVDVKNILVEMGTYFQVQDDYLDCFGDPETIGKIGTDIEDFKCSWLVAKALELSNEQQKKVLYDNYGNPDPENVAKVKALYNELNLQGAFEEV

SEQ ID NO: 10091 - protein, 194 aa, Glycine max
MRLNLCHVSLGFVLKFLNFLQCFVGLSILLYSLWMFNEWDHRVPPDPPLPPAFHFYLKFNSINLPAPWFIYDFMGLGILVLCISFLGCIAAEMINGCCLCFYTILVAVLLLLEASLVGFIALDSDWEKDIPLDPTGQLDELRAFIEDNIDTCTWVGIAVLVIQALSLLLALILRATVSSRRADFDYEDGYDVRG

SEQ ID NO: 10092 - protein, 183 aa, Pseudomonas syringae pv. syringae B728a
MRSRCLFSGCSLGRLVSKGVLMSAFHDIKLKALGGQELPLANFRKKVVLVVNVASKCGLTPQYAALENLYQQYKDQGLEILGLPCNQFAGQEPGTEQEIAEFCQLNYGVTFTLGEKLDVNGPNRHSLYRLLAGEGAEFPGDITWNFEKFLVGKNGGVSARFSPRTTPDDPAVIQAIEKALAQS

SEQ ID NO: 10093 - protein, 249 aa, Zea mays
HACSNSFSRLADDDFPGEFYEPYDQLVELEWLSNYMGEGEETFAAEDLEKLKLISGGFSPAAVNVSPPAPVAVASAASAAQSGMFLPVPAKARSKRSRAAPGNWSSRLVVLPPTPASPPAPAASMAISPSESGISAQQAFRAKKPPPSKKKDAAAPAPAPAEGRRCVHCDTDKTPQWRTGPMGPKTLCNACGVRYKSGRLVPEYRPAASPTFVMSKHSNSHRKVLELRRQKEVVVQQPPHVMGGAGGPA

SEQ ID NO: 10094 - protein, 154 aa, Neurospora crassa
MVKAVAVVRGDSNVKGTVIFEQESESAPTTITYDISGNDPNAKRGFHIHTFGDNTNGCTSAGPHFNPHGTTHGDRTAEVRHVGDLGNIETDAQGNAKGTVTDNLVKLIGPESVIGRTVVVHAGTDDLGKGGNEESLKTGNAGPRPACGVIGISQ

SEQ ID NO: 10095 - protein, 121 aa, Zea mays
  unsure (1)..(121): unsure at all Xaa locations
ASMRELYILGGGPTGPYFXCINIDDXDDMNIGMRNTLNILGTLQLCKYYEVQHDEIMCDLLSFEADTRAANITTNEAGSDLTRNDRXELDYNFGLLDPYRHQEFGRYEHPYQALCAMDKYP

SEQ ID NO: 10096 - protein, 228 aa, Gossypium bickii
FTSLCHTDVYFWEAKGQTPLFPRIFGHEAGGIVESVGEGVTHLKPGDHVLPVFTGECGNCRHCKSKESNMCDLLRINTDRGVMLSDGKTRFSINGKPIYHFVGTSTFSEYTVAHVGSVAKINPAAPLDKVCILSCGISTGLGATLNVAKPTKGSTVAIFGLGAVGLAAAEGARIAGASRIIGVDLNPNRFEEAKKFGCTEFVNPKDHNKPVQEVLAEMTNGGVDRSVE

SEQ ID NO: 10097 - protein, 274 aa, Lycopersicon esculentum
MGRQPCCDKVGLKKGPWTAEEDKKLINFILNNGQCCWRAVPKLAGLLRCGKSCRLRWTNYLRPDLKRGLLSEYEEKMVIDLHAQLGNRWSKIASHLPGRTDNEIKNHWNTHIKKKLKKMGIDPITHKPLSTITIDHTNTLEQENQPIEEEKNQDILLAQMDIESSSIDQSTVAKIKSEDDNNNSNNNTMATNCTNNFDSTIVEVNNNGFCIDEVPLIEPHEILVQESTPSTSSSSFSSSSSSNILEDLKFLSSFDEWPLMENNNNNNVGIWMGN

SEQ ID NO: 10098 - protein, 393 aa, Zea mays
MTMERSQPQHQQSPPSPSSSSSCVSADTVLVPPGKRRRRAATAKANKRARKDPSDPPPAAGERSSVYRGVTRHRWTGRFEAHLWDKHYLAALHNKKKGRQVYLGAYDGEEAAARAYDLAALKYWGPEALLNFPVEDYSSEMPEMEAASREEYLASLRRRSSGFSRGVSKYRGVARHHHDGRWEARIGRVLGNKYLYLGTFDTQEEAAKAYDLAAIEYRGANAVTNFDISCYLDHPLFLAQLQQEQPQVVPALDQEPQADQREPETTAQEPVSSQAKTPADDNAEPDDIAEPLITVDNSVEESLWSPCMDYELDTMSRSNFGSSINLSEWFTDADFDSDLGCLFDGRSAVDGGSKGGVGVADFSLFEAGDGQLKDVLSDMEEGIQPPTIISVCN

SEQ ID NO: 10099 - protein, 276 aa, Rhizobium tropici
WGFDGSSTMQAEGRSSDCVLKPVAIYPDPARTNGALVMCEVMMPDGVTPHPSNSRATILDDEDAWFGFEQEYFFYQDGRPLGFPESGYPAPQGPYYTGVGYKNVGDVAREIVEEHLDLCLEAGINHEGINAEVAKGQWEFQIFGKGSKKAADQIWMARYLLLRLCEKYGIDIEFHCKPLGDTDWNGSGMHCNFSTKFMREVGGKAYFEALMAQFDKNLEAHISVYGPDNHLRLTGKHETAPWNKFSYGVADRGASIRVPHSFIKNDYRGYLEDRRP

SEQ ID NO: 10100 - protein, 392 aa, Caucanthus auriculatus
DLEPVNPADVPVTAAGALKSYKLAAKAISRLQSLPSGNISLLCDVLVKEVRDLTGYDRVMVYKFHEDEHGEVVSECHRSDLESYLGLHYPATDIPQASRFLFMKNKVRMICDCVAPPVKVIQEERLPQPLSPCGSTLRSPHGCHAQYMTNMGIIASLVMSVTVNEEDDMVDGDQPQMARKLWGLVVCHHTSTRFVPFPLRYACEFLIQVFGVQINKEVELAAQVREKHILQIQTMLCDMLLRDAPVAIITQSPNVMDLVKCDGAALYFKNKTWLLGVTPTEEQIRDIAEWLPEYHSGNTGLSTDSLMEAGYPGASALGDAVCGMAAVSITSRDFLLWFRSHTAKEIKWGGAKHDPDDKDDGRKMHPRSSFKAFLEVVKWRSMPWEDVEMDAI

SEQ ID NO: 10101 - protein, 428 aa, Medicago truncatula
MAQILAPSTQCQARITKISPVATPISSKMWSSLVMKQNKKVARSAKFRVMAVNSGTINRVEDLLNLDITPFTDSIIAEYIWIGGTGIDVRSKSRTISKPVEHPSELPKWNYDGSSTGQAPGEDSEVILYPQAIFKDPFRGGNNILVICDAYTPQGEPIPTNKRHKAAEIFSNPKVEAEIPWYGIEQEYTLLQTDVKWPLGWPVGGYPGPQGPYYCAAGADKSFGRDISDAHYKACLYAGINISGTNGEVMPGQWEYQVGPSVGIEAGDHIWASRYILERITEQAGVVLTLDPKPIEGDWNGAGCHTNYSTKSMREDGGFEVIKKAILNLSLRHKIHIEAYGEGNERRLTGKHETASINTFSWGVANRGCSIRVGRDTEKNGKGYLEDRRPASNMDPYVVTALLAESTLLWEPTLEAEALAAQKIALKV

SEQ ID NO: 10102 - protein, 198 aa, Oryza brachyantha
GQTPVFPRIFGHEAGGIVESVGEGVTDLAPGDHVLPVFTGECKECPHCKSAESNMCDLLRINTDRGVMIGDGKSRFSINGKPIYHFVGTSTFSEYTVMHVGCVAKINPEAPLDKVCVLSCGISTGLGATINVAKPPKGSTVAIFGLGAVGLAAAEGARISGASRIIGVDLNPNRFEEARKFGCTEFVNPKDHDKPVQQ

SEQ ID NO: 10103 - protein, 511 aa, Zea mays
LLVVPLLLLLLSPLLCLLSSGRRRSREQGAAERRRAPPGPPKQLPVLGNLLQIGSRPHRYFQAVARRYGPIVEVQLGRVRTVVVSSPDAAKEVLRTNDLHCCSRPNSPGPRMLSYDFLDVAFSPYSDYWREMRKLFILELLSMRRVQSFAYARAAEVDRLVSSLASTPPGAAVDLSEKLYALSDGVVGTVAFGKMYGSAQFERSSFQRVMDETLRVLGSFTFEDFFPASRLARFADVLTGAAGRRSRIFRQIDRFFDSVIDKHLEPERLQAGVQEDMVDALVKMWREEQADGYEAPHGLTRDHIKGILMNTFAGGIDTCAVTMIWIMAELMRNPRVMQKAQAEVRTLVGNKPRVDEEDVKSLSYLKMVVKENFRIHPPGTLLIPRETMRSCVIGGYDVLPGTRIFVNVWAMGRDPSIWDRPEEFSPERFEGSHVDFRGSSFELLPFGSGRRSCPAIAMGVANVELVLANLLHCFDWQLPEGMVEEDIDMEETGQLAFRKMVPLCLVPIKRV

SEQ ID NO: 10104 - protein, 394 aa, Zea mays subsp. mays
LGAERRARLPPGEMGWPLVGGMWAFLRAFKSGKPDAFIASFVRRFGRTGVYRSFMFSSPTVLVTTAEGCKQVLMDDDAFVTGWPKATVALVGPRSFVAMPHDEHRRIRKLTAAPINGFDALTGYLPFIDSTVTSSLRAWADHGGSVEFLTELRRMTFKIIVQIFLGGADQATTRALERSYTELNYGMRAMAINLPGFAYRGALRARRRLVAVLQGVLDERRAARAKGVSGGGVNMMDRLIEAQDERGRRLDDDEIIDVLVMYLNAGHESSGHITMWATVFLQENPDMFARAKAEQEAIMRSIPSSQQGLTLRDFRKMEYLSQVIDETLRLVNISFVSFRQATRDVFVNGYLIPKGWKVQLWYRSVHMDPQVYPDPTKFDPSRWEGHSPRAGTFL

SEQ ID NO: 10105 - protein, 1178 aa, Sorghum bicolor
MASGSRATPTRSPSSARPEAPRHAHHHHHHHSQSSGGSTSRAGGGGGGGGGGGGTAATATATATESVSKAVAQYTLDARLHAVFEQSGASGRSFDYSQSLRAPPTPSSEQQIAAYLSRIQRGGHIQPFGCTLAVADDSSFRLLAFSENAADLLDLSPHHSVPSLDSAAPPPVSLGADARLLFSPSSAVLLERAFAAREISLLNPLWIHSRVSSKPFYAILHRIDVGVVIDLEPARTEDPALSIAGAVQSQKLAVRAISRLQALPGGDIKLLCDTVVEHVRELTGYDRVMVYRFHEDEHGEVVAESRRDNLEPYLGLHYPATDIPQASRFLFRQNRVRMIADCHATPVRVIQDPGMSQPLCLVGSTLRAPHGCHAQYMANMGSIASLVMAVIISSGGDDEQTGRGGISSAMKLWGLVVCHHTSPRCIPFPLRYACEFLMQAFGLQLNMELQLAHQLSEKHILRTQTLLCDMLLRDSPTGIVTQSPSIMDLVKCDGAALYYHGKYYPLGVTPTESQIKDIIEWLTVCHGDSTGLSTDSLADAGYLGAAALGDAVCGMAVAYITPSDYLFWFRSHTAKEIKWGGAKHHPEDKDDGQRMHPRSSFKAFLEVVKSRSLPWENAEMDAIHSLQLILRDSFRDAAEGTSNSKAIVNGQVQLGELELRGINELSSVAREMVRLIETATVPIFAVDTDGCINGWNAKIAELTGLSVEEAMGKSLVNDLIFKESEEIVEKLLSRALRGEEDKNVEIKLKTFGSEQSNGAIFVIVNACSSRDYTQNIVGVCFVGQDVTGQKVVMDKFINIQGDYKAIVHNPNPLIPPIFASDENTSCSEWNTAMEKLTGWSRGEVVGKFLIGEVFGSFCRLKGPDALTKFMVVIHNAIGGQDYEKFPFSFFDKNGKYVQALLTANTRSKMDGKSIGAFCFLQIASAEIQQAFEIQRQQEKKCYARMKELAYICQEIKNPLSGIRFTNSLLQMTDLNDDQRQFLETCSACEEQMSKIVKDATLQSIEDGSLVLEKSEFSFGDVMNAVVSQAMLLLRERDLQLIRDIPDEIKDASAYGDQFRIQQVLADFLLSMVRSAPSENGWVEIQVRPNVKQNSDGTDTELFIFRFTYPGEGLPADIVQDMFSNSQWSTQEGVGLSTCRKILKLMGGEVQYIRESERSFFLIVLELPQPRPAADREIS

SEQ ID NO: 10106 - protein, 412 aa, Prochlorococcus marinus subsp. marinus str. CCMP1375
MLGSTGSIGTQTLEIAKECPEQFKVVALTAGRNLDLLIKQIQEHQPEVVALARKDILPELQERLNSLTGKERPNALPHLVAGNDGLNIAASWHSADLVVTGIVGCAGLLPTLAAIKAGKDIALANKETLIAAGPVVIPELKRSGSRLLPADSEHSAIFQCLQGTPWPENARLSTGIPTPGLRNIQLTASGGAFRDWATEDLKHASIKDATSHPNWSMGKKITVDSATLMNKGLEVIEAHYLFGLDYDHIEIVIHPQSIIHSMIELNDSSVLAQMGWPDMKLPILYAMSWPNRINTSWRRLNLSEIGKLTFHEPDTSKYPCMELAYAAGKAAGTMPAVLNAANEEAVALFLEEKIHFLNIPKVIEAACENHKKDLKFDPQLQDVIEVDYWARREVRSQVQKDSNQITMATYKK

SEQ ID NO: 10107 - protein, 112 aa, Zea mays
NTLEGLASRHTDVLESLEPKVRKRVEKLREIQGEHDELEAKFFEERAALEAKYQKLYEPLYSKRYEIVNGVVEVEGITVESAAETPAEQKTGDETSADQKGEHSLRSLVSIG

SEQ ID NO: 10108 - protein, 397 aa, Wigglesworthia glossinidia endosymbiont of Glossina brevipalpis
MKKITILGSTGSIGKNTLKIISNNLDKFSVYSLVAYGNNINVLISQCIKYKPNYVCIMNKKKLLDLKQGLLKNKCKTSVLFGSNDICNLSSSKEVDIVISATVGLSGIFFLFSAIKSGKKILLANKEILVSCGHFFMKQVEKYKSIIIPIDSEHNAIFQSLPLDFQKKLGIASINKYGIYKLILTGSGGPFRNVELRDLKKVSPDQACNHPNWKMGKKISIDSATMMNKGFEYIVAKWLFNVCKDQIELIIHHQSIIHSMIRYIDGTVIANMSLPDMQSSISYGLGYPKRIKIKNKYLDFYKNNKLTFESIDYNRYPCLNLAIQASYNGQGATTVLNSANEISVSAFLSKKIYFTDIAIINKKVLDKLDIFEPSSIEEILLLDSKARNLAKKFIKCY

SEQ ID NO: 10109 - protein, 335 aa, Brucella melitensis 16M
MTILVTGGAGYIGSHTCVQLIEAGHEVVVVDNFDNSHPEALHRIEKITGRAPRREPGDIRDRALMEQMIKRHKCTAVIHFAGLKAVGESSEKPLLYYDCNVLGTLRLLQAMEATGVKKLVFSSSATVYGDPDKLPITEDQPLSATNPYGRTKLVIEDMLRDLYNSDNSWAIAILRYFNPVGAHESGLIGEDPKGIPNNLMPIIAQVATGRREKLNIWGNDYPTPDGTGVRDYIHVNDLAAGHLKALKKLDKPKCFAVNLGTGQGYSVLDVIKAFEHVSNREIKYEIAPRRPGDVAECYADPGFAKKFLGWSAEKNLREMCQDMWNWQSKNPNGYE

SEQ ID NO: 10110 - protein, 245 aa, Alcaligenes sp. SH-69
MSQKVAYVTGGMGGIGTAICQRLHKEGFKVIAGCGPTRDHAKCWPSKRPWATRFMHPSVTWVIGIPPVEAFGKTKAEHGTIDVLVNNAGITRDRMFLKMSREDWDAVIETNLNSMFNVTKQVVSDMVEKGWGRIINISSVNGEKGQAGQTNYSAAKAGMHGFSMALAQELATKGVTVNTVSPGYIGTDMVKAIRPDVLEKIVATVPVKALGEPSEIASIIAWLASEENGYATGADFSVNGGLHMG

SEQ ID NO: 10111 - protein, 305 aa, Miscanthus condensatus
IESVGEGVTDVAPGDHVLPVFTGECKECAHCRSAESNMCDLLRTNTDRGVMIGDGKSRFSINGKPIYHFVGTSTFSEYTVMHVGCVAKINPEAPLDKVCVLSWGISTGLGASINVAKPPKGSTVAIFGLGAVGLAAAEGARIAGASRIIGVDLNPSGFEEARKFGCTEFLNPKDHKKPVQEVLAEMTNGGVDRSVECTGNINAMIQAFECVHDGWGVAVLVGVPHKDAEFKTHPMNLLNERTLKGTFFGNFKPRTDLPNVVELYMKKELEVEKFITHSVPFAEINKAFDLMAKGEGIRCIIRMEN

SEQ ID NO: 10112 - protein, 1064 aa, Zea mays
MPAKYLGALAEDRRPDLYRQVGCVTGILQAFDRRHHLASSHKRLLPPTGHAPSNPSKGGECTRYSPQVVLEKNSSKTWADSQRAPATELSQTSYSSSPSSSFSSLDGNRSTQQDLSSTDRMLFPERPFKSSPKLKSSFDSDNGLDYPDDALTKSKNMPIVQSSLPTLGIRNLVKDSIYKDSHELSVRISTEEEVKDHPSNCGDQPMQLNGPHHDSTQGKSKGLMDINESLRVLAKLREASWTPPESVHHARLSYDAPRFSYDGKEATSKLREVPRLSLDIKEGHLWNREIDSRLDPSLSSADRNSNTVTGSNAAFETQQEQPACKRLPSVVAKLMGLEELPEHNQSTASSHACNTVQENKQDAMLNSLSISYQYEHAPQQERNPDSTVRNLPNSKFPVQTAPWKQQERIVLPRKLPKGSKGAHGREPAAPWNQLKDLDFQQPNKDLRALKQILDSAKGLLENKKREEAFMPKLYNGNHDDQEMASANMRLNRNTNNMWMPEESNAESSFKSPIVIMKPSKSANLYSKVDSSVFPLGGSSDLPQPQTSNSTDRRKASTINRTAKGQYAKLSPRVPTSQPLVSCDRRSYGRNDDSSNNQKSSSLLVTESSTRRQQLPRNSSVSMQKNKNSTSPKLLQRKLDPERRARPPIPSAESNKSERQSGDRNNSETVSPRSKFRRKLVRPQGDDGMPIGLNNRTRSLYQHDNDMSIRSDGSISVASELDIISNDRSTGVNISNFEQGIGTPSGRNPQKVKTSYDANMDVPSVDPSAAISERPSPVSVLDSSFDQEDLFPTSRTPNSLAVDDERETLEEPWKPSVAIQSKNNKLANVASLLEKLQQLSVNKDEDAPPVDHIAFLCETESPDHRYVSEILLASGLLMKDLGSGQTGLQLHSSGYPINPDLFHVLEQRKAGWVSTPDGIHQSRSGTKSDPRRAHRKLMFDTVNELLLQKFEKETAVYALSSFTRAKDPPAKTFSGQQLPKFISSGIEELDMERSSISQKDSSVIPDAEILRRLQGWTSFSKELPGMVLEIERSIFKELVDEVVHGESADGPEMKAAGRRRRRLFA

SEQ ID NO: 10113 - protein, 391 aa, Saccharomyces cerevisiae
MGYFVPDSHIENLKSYKYQSEDRSLVSKYFLKPFWQRFCHIFPTWMAPNIITLSGFAFIVINVLTVFYYDPNLNTDTPRWTYFSYALGVFLYQTFDGCDGVHARRINQSGPLGELFDHSIDAINSTLSIFIFASETGMGFSYNLMLSQFAMLTNFYLSTWEEYHTHTLYLSEFSGPVEGILIVCVSLILTGIYGKQVIWHTYLFTITVGDKVIDVDTLDIVFSLAVFGLVMNALSAKRNVDKYYRNSTSSANNITQIEQDSAIKGLLPFFAYYASIALLVWMQPSFITLSFILSVGFTGAFTVGRIIVCHLTKQSFPMFNAPMLIPLCQIVLYKICLSLWGIESNKIVFALSWLGFGLSLGVHIMFMNDIIHEFTEYLDVYALSIKRSKLT

SEQ ID NO: 10114 - protein, 358 aa, Shigella flexneri 2a str. 301
MKALARFGKAFGGYKMIHVPQPICGPEDVVTEIKAAAICGADMKHYNVDSGSDEFNSIRGHEFAGCIAQVGEKVKDWKVGQRVVSDNSGHVCGVCPACEQGDFLCCTEKVNLGLDNNTWGGGFSKYCLVPGEILKIHRHALWEIPDGVDYEDAAVLDPICNAYKSIAQQSKFLPGQDVVVIGTGPLGLFSVQMARIMGAVNIVVVGLQEDVAVRFPVAKELGATAVVNGSTEDVVARCQQICGKDNLGLVIECSGANIALKQAIEMLRPNGEVVRVGMGFKPLDFSINDITAWNKSIIGHMAYDSTSWRNAIRLLASGAIKVKPMITHRIGLSQWREGFDAMVDKTAIKVIMTYDFDE

SEQ ID NO: 10115 - protein, 141 aa, Picea mariana
MDPVQQSLPHEIGGITDTLRFGLAGVKSDILISHPVQVIQENAQKQQREMKRNILAKTYGSAFPLKMDIEQQILSRFQRPPGELPSSMLGLESLTGSLDEFSFEDYLNDPRESETFVPADMHHGMEVRLGLSKGPVCRSFM

SEQ ID NO: 10116 - protein, 193 aa, Zea mays
MEATATPRTQEVMKPEPGTAKVTVDEVTLRKFELSDVDAMMAWASDPQVAAVCRWEPYESTEPLLAFIRDVVLPHPWFRAICLRGEPRPVGAVSVSPTGDPCRAELGYVLARAHWGRGVATAAVKRTVATVFAEVPGLERVEALVDVANPASQRVLEKAGFTREAVLRKYGAIKGVVRDMVMSSFIDTDPVPE

SEQ ID NO: 10117 - protein, 139 aa, Glycine max
MSNSRNTHWCYSCRRPVRLGRRDVVCPSCNLGFVHELNDIVHVNPFDLFGMDNNEERDQRLGLMETFSAFMRHQMADRGRSHDIRVRTDSNPEHSASFAPLLIFGGHIPFRLSRHGGFEALFNGAPRIGLTQGNTGDYF

SEQ ID NO: 10118 - protein, 459 aa, Pseudomonas putida KT2440
MSTHSSTVQNDLAALIHPNTNLAQHREVGPLVIARGDGVRVFDEQGNAYIEAMSGLWSAALGFSEQRLVDAAVEQFKQLPYYHSFSHKTNAPAAALAAKLAALAPGDLNHVFFTNSGSEANDSVVKMVWYVNNALGRPAKKKFISRQQAYHGATVAAASLTGIPSMHRDFDLPAIPVHHLTCPNFYRFARPGESQEAFTVRLANELERYILAEGPETIAAFIGEPVIAAGGVIPPPTGYWAAIQAVCKRYDILVVIDEIITGFGRLGTMFGSQLYGIQPDIMVLSKQLTSSYQPLAAVVVSDAMNDVLVSQSQRLGAFAHGLTCTGHPVATAVALENIRIIEERDLVGHVQHLAPVFQRHLRAFEDHPLVGNVRGVGLMGGIELVADKATRQPFAQPGTLGGYVFKQAHKHGLIIRAIYDTIAFCPPLITTQDDIEAIFSAFERTLADATDWARSQHLL

SEQ ID NO: 10119 - protein, 526 aa, Thermoplasma acidophilum
MNSAELQIHTDTERVEEKYIREDRKLRKDLGIVDLFLIGITGVIGSGWLFAPLYAARVAGPASIISWAIGGVLVLLVGLTFSHLMGFRTEAGGMVRYPIYTHGKLAGSITGWALWLAYTMNPPSEASALVEYMSSYVPGVFHSGTLTPEGMGIALGFMFLFVLVNYYGVKIFARIINGLTALKLVVPTVTMLTLILLSFRFRNFTVSGFYPYGLSSVLAAIVSAGIVYSYLGFQAVINLAGESKRPARDGPTALILVIIFSLVFYIALEITFIGSVPSSFLRHGWSGLFLASPFADIALYFNLTWLYSLIIADSIYSPSGSSMAAVASNSRATYALAKDGFFPSFFVRIDGKTGIPRIALIFNFVISAIVLLTLKSWHSIIEALGVLLLISFIGPAASSGVIRRTSPENQILKGLYGVVQPAIFVMAGIIIFITPFTKIDIVIALFSIPAVLLILKEKNFRNVDLGYGIWLPVYLIIILSFSFLHTYYESLNILVPITAFVFLSLFVYIIAVRAGISFMKSGKQKE

SEQ ID NO: 10120 - protein, 458 aa, Escherichia coli O157:H7 EDL933
MKNASNVSEDTASNQEPTLHRGLHNRHIQLIALGGAIGTGLFLGIGPAIQMAGPAVLLGYGVAGIIAFLIMRQLGEMVVEEPVSGSFAHFAYKYWGPFAGFLSGWNYWVMFVLVGMAELTAAGIYMQYWFPDVPTWIWAAAFFIIINAVNLVNVRLYGETEFWFALIKVLAIIGMIGFGLWLLFSGHGGEKASIDNLWRYGGFFATGWNGLILSLAVIMFSFGGLELIGITAAEARDPEKSIPKAVNQVVYRILLFYIGSLVVLLALYPWVEVKSNSSPFVMIFHNLDSNVVASALNFVILVASLSVYNSGVYSNSRMLFGLSVQGNAPKFLTRVSRRGVPINSLMLSGAITSLVVLINYLLPQKAFGLLMALVVATLLLNWIMICLAHLRFRAAMRRQGRETQFKALLYPFGNYLCIAFLAMILLLMCTMDDMRLSAILLPVWIVFLFVAFKTLRRK

SEQ ID NO: 10121 - protein, 347 aa, Pseudomonas putida KT2440
MLTIYSDDHRLHHGRCELIDGKLMPCFEMPSRADHVLDQVKKRKLGDIQGPTDFGRAPLLRVHSADYLDFFEGAWARWAALGQEGDLLPFTWPARTLRQVKPTGLHGELGYYSFDAGAPITAGTWQAAYSAAQVALTAQAAIQQGAHAAFALCRPPGHHAAGEVMGGYCYLNNAAIAAQAFLDQGRRKVAILDVDYHHGNGTQDIFYSRDDVFFASIHGDPQDEFPFFLGYADETGEGAGQGYNINYPLPAGSDWAAWSAALEDACKRIASYDADVLVISLGVDTFKDDPISQFKLDSPDYLEMGKRIGQLGKPTLFVMEGGYAVEEIGINAVNVLEGFQRAQSGAR

SEQ ID NO: 10122 - protein, 230 aa, Corynebacterium glutamicum ATCC 13032
MPTLFDDPLHQLPRPPRRVAAGVVHLPNFLGLAEQKALVAQARDLAREVVGTPLAMVRPKLKSGQMSVHMLHLGKYWASNPYRYVDVVDGFPVPPLPDSFVDLAHRALLSAGSLSNSLQSWSEAYRAEAALVNYYSPDASMGMHQDANEESEAPVISLSIGDTGIFRLGGTLNRNKPWTDIPLMSGDLIVFGGANRQAFHGIPSIEANTAPAGCGLKEGRINITIRQLAL

SEQ ID NO: 10123 - protein, 467 aa, Pseudomonas putida KT2440
MQQAQGLKRGLSARHIRFMALGSAIGTGLFYGSASAIQMAGPAVLLAYLIGGAAVFMVMRALGEMAVHNPVAGSFGHYATTYLGPMAGFILGWTYAFEMVIVAIADVTAFGIYMGFWFPEVARWIWVLGIVFLIGGLNLCNVKVFGEMEFWLSLLKVGAIVAMILAGLGIMAFGFSQVGTGHAVGMSNLFDHGGFMPNGVGGLIASFAVVMFAFGGIEIIGVTAGEAKDPQRVIPKAINAVPLRILLFYVLTLFVLMCLYPWPQIGSQGSPFVQIFSNLGIGSAAAVLNVVVISAAISAINSDIFGAGRMMYGLAQQGHAPRGFSKLSKHGVPWMTVVVMGAALLIGVLLNYLIPENVFLLIASIATFATVWVWLMILLTQVAMRRSMSREQVAQLKFPVPFWPYGPAMAIAFMVFIFGVLGYFPDTQAALIVGVIWVVFLVASYLLWCKPRAGQGQPVAEPAELHR

SEQ ID NO: 10124 - protein, 327 aa, Listeria monocytogenes EGD-e
MGIAVLGGAGYIGSHAVDELITRGYEVVVIDNLRTGHRESIHKKAKFYEGDIRDKAFLSSVFEKEKVDGVIHFAASSLVGESMEVPLDYLNNNVYGTQIVLEVMEEFDVKHIVFSSSAATYGEPERVPITEDMPTNPESTYGETKLIMEKMMKWCDKAYGMKFVALRYFNVAGAKADGSIGEDHKPESHLVPIILQVALGQREKLAIYGDDYNTPDGTCIRDYVQVEDLIDAHIRALEYLKNGGESNIFNLGSSNGFSVKEMLEAARTVTGKEIPAEVVPRRAGDPGTLIASSDKAREILGWEPTYTDVKDIIATAWKWHVSHPNGY

SEQ ID NO: 10125 - protein, 165 aa, Glycine max
  unsure (1)..(165): unsure at all Xaa locations
QDVQTSSSTIRTNVNGKGEGTTREVKKKRSEESSDAMLKKPKQDTSTASSSKVQAPKVKLGDKITALQQIVSPFGXDTASVLFEAIGYIKFLQEQVQLLSNPFLKANSHKDPWGSLDRKDHKEDTKLDLRSRGLCLVPTSCTPLVYRESSGPDYWTPAYRGCLYR

SEQ ID NO: 10126 - protein, 181 aa, Xanthomonas campestris pv. campestris str. ATCC 33913
MSQSIHDIPVTDINGGATSLAAHRGKVLLVVNVASKCGLTPQYEGLEALYRDKQAQGLEVLGFPANDFNGQEPGSEAEIAQFCQLTYDVTFPLFSKIAVTGAEIHPLYQALTSAQPQATGDGPMREKLAGYGIAANPAPGVLWNFEKFLIGRDGQVIERFAPDVAADDVRLRQAVDAALAH

SEQ ID NO: 10127 - protein, 246 aa, Bacillus subtilis
MLNDKTAIVTGASRGIGRSIALALAKSGANVVVNYSGNEAKANEVVDEIKSMGRKAIAVKADVSNPEDVQNMIKETLSVFSTIDILVNNAGITRDNLIMRMKEDEWDDVININLKGVFNCTKAVTRQMMKQRSGRIINVSSIVGVSGNPGQANYVAAKAGVIGLTKSSAKELASRNITVNAIAPGFISTDMTDKLAKDVQDEMLKQIPLARFGEPSDVSSVVTFLASEGARYMTGQTLHIDGGMVM

SEQ ID NO: 10128 - protein, 229 aa, Salmonella typhimurium LT2
MNNVQLSVLCLVITLGIYFANKRLYRRFRKLPLMPLVLTPALLVLMLVFGHISWQNYIGESHWLLWLLGPATIAFAVPVYDNLAIIKRHWMSLTAGVVTATVVAVTSSVWLARLFTLSDEIQRSLAVRSVTTPFALAAAEPLGGQPDLVALFVVVTGVFGMAVGDALFLRLSIREGMAKGAGFGAASHGAGTARSYELGQQEGVVASLVMMLSGVVMVLAAPLVARVMF

SEQ ID NO: 10129 - protein, 751 aa, Geobacillus stearothermophilus
MENQNRQNAAQCPFHGSVTNQSSNRTTNKDWWPNQLNLSILHQHDRKTNPHDEEFNYAEEFQKLDYWALKEDLRKLMTESQDWWPADYGHYGPLFIRMAWHSAGTYRTGDGRGGASTGTQRFAPLNSWPNNANLDKARRLLWPIKKKYGNKISWADLFILAGNVAIESMGGKTIGFGGGRVDVWHPEEDVYWGSEKEWLASERYSGDRELENPLAAVQMGLTYVNPEGPDGKPDPKAAARDIRETFRRMGMNDEETVALIAGGHTFGKAHGAGPATHVGPEPEAAPIEAQGLGWISSYGKGKGSDTITSGIEGAWTPTPTQWDTSYFDMLFGYDWWLTKSPAGAWQWMAVDPDEKDLAPDAEDPSKKVPTMMMTTDLALRFDPEYEKIARRFHQNPEEFAEAFARAWFKLTHRDMGPKTRYLGPEVPKEDFIWQDPIPEVDYELTEAEIEEIKAKILNSGLTVSELVKTAWASASTFRNSDKRGGANGARIRLAPQKDWEVNEPERLAKVLSVYEDIQRELPKKVSIADLIVLGGSAAVEKAARDAGFDVKVPFFPGRGDATQEQTDVESFAVLEPFADGFRNYQKQEYSVPPEELLVDKAQLLGLTAPEMTVLVGGLRVLGANYRDLPHGVFTDRIGVLTNDFFVNLLDMNYEWVPTDSGIYEIRDRKTGEVRWTATRVDLIFGSNSILRSYAEFYAQDDNQEKFVRDFINAWVKVMNADRFDLVKKARESVTALQNIHGSRSKKVRVLQ

SEQ ID NO: 10130 - protein, 391 aa, Oryza sativa
GYFIQMKELTTNLQQAARLRFMVRDVVDLRSNNWVARREEIKAKTISEIHDEAIKTLGLRPGATGLTRNGRNAPGGPLSPGGFPMGRPGTGGMMPGMPGTPGMPGSRKMPGMPGLDNDNWEVPRSKSMPRGDSLRNQGPLLNKPSSINKPSSINSRLLPHGSGALIGKSALLGSGGPPSRPSSLMASPTHTPAQTAPSPKPVSAAPAVVPVTDKAAGSSHEMPAAVQKKTVSLLEEYFGIRILDEAQQCIEELQCPEYYSEIVKEAINLALDKGPNFIDPLVRLLEHLHAKKIFKTEDLKTGCLLYAALLEDIGIDLPLAPALFGEVVARLSLSCGLSFEVVEEILKAVEDTYFRKGIFDAVMKTMGGNSSGQAILSSHAVVIDACNKLLK

SEQ ID NO: 10131 - protein, 440 aa, Oryza sativa; identical to SEQ ID NO: 5539
  unsure (1)..(440): unsure at all Xaa locations

SEQ ID NO: 10132 - protein, 267 aa, Oryza sativa (japonica cultivar-group)
MARAPRDRTLSSRRASSATSAVPSYYQKTKKASKENGLQLTSEKKDWKRATCSICLEHPHKAVLLLCSSHSKGCRPYMCDTNRQHSNCLEQFKNAYSRGKPACELSGAVAQASKKPQEMELVCPICRGDVKGWTVVEPARRFLNRKRRTCMHEGCSFGGSYRKLRNHVRSNHPSSNPREIDSASLAEWKELEYEKDRQDAISIITALNPGSTIMGDYFIDPNSDSNDSFDYSSDSLTFSDSDPGTQLNGSTSSRRPARIIPNARVRY

SEQ ID NO: 10133 - protein, 283 aa, Schizosaccharomyces pombe
MADDTAYILSEYLQTLDNVPNETKHIFDEISVKEVAVHDIWKRIQAADSQIQSYIKSHGSLTPHPKEDALYSTIREEYQKAINIQNEKVQLADRARLGLTRHIKRLDDRLAKAGHGFTAAELLNAPDYYASSPYGGYSPSGASSARQTPAPSRSGASTAGRRRTSATTRGAIQNGVYHSPYTASLADSGSTRGQKVSNATATTQLETKADSTTPNEMVSEEDMEEDNEKYCFCQQGSYGQMVACDNANCEREWFHMECVGLKAPPEGTWYCEACRDQKLVDAK

SEQ ID NO: 10134 - protein, 162 aa, Glycine max; identical to SEQ ID NO: 9120

SEQ ID NO: 10135 - protein, 249 aa, Zea mays; identical to SEQ ID NO: 8411

SEQ ID NO: 10136 - protein, 348 aa, Nitrosomonas europaea ATCC 19718
MASYRITFRPSGRIITTESTETILEAALHHGLSLPYGCRNGSCGTCKGKIIQGIVDYGVHSEEALTEQEKNQQLALFCCARPLSDLEIECQEIEAIKDIKIRTMPCRVHKLEHVASDVMIIYLKLPANERLQFLPGQYIDILMKDGQRRSFSLANAPANDEFLQLHTRNYAGGVFSEYVFSHMKEKDILRFEGPLGSFFLHDAPKKDTPIILLAGGTGFAPVKSMLEHIFQTENTRFTHNTIRLYWGARTRDGLYLSNLAEKWAAENENFSYIPVLSEPLITDDWQGRTGLVHQAVINDMNTLSDCQVYACGAPAMVKAAFDDFTHQRNLQSENFFSDAFVPSKPATA

SEQ ID NO: 10137 - protein, 609 aa, Oryza sativa
  unsure (1)..(609): unsure at all Xaa locations
MATGRTYLVKSAAVVGDPRGGEDGTQQGKRCSSDLREGRLRSPVSLSCGGAARRAVPETCESVVARDYFVHNVAGLGSVRTKMAALPYRRNGDGGERATAGEAAAAAASAAGVASVASSSSRPASKCQPPLQPKKAPLSRDVHSKVESERPAHAHGQPRGNRFDSNIPIAAITDPPLPIFSASAISPPPPPPPSSPLLPADASPDQELPADERASEPRGRMGYIGAHGVETLKRYRYSGQDHSVVAKYVLQPFWSRCVTLFPLWMPPNMITLTGFMFLVVSALLGYIYSPHLDTAPPRWVHLAHGLLLFLYQTFDAVDGKQARRTSSSSPLGELFDHGCDALACAFEALALGSTLMCGRFTFCFWVIAAVPFYLATWEHFFTNTVILPLXNGPTEGLMLIYLSHSFTFLTGAEWWAQDFRKSIPLLSWVPLVSDIPLYIIVMILMILFAVIPTIGSNVSNVQKVVEARKGSMVLALAMLLPFIALLTGVAVWSYLSPSDIMRNQPHLLVIGTGFAFGYLVGRMILAHLCDEPKGLKTGMCMSLVFLPFAIANALTAKINAGIPLVDELLVLFLYCAYTVGLYLHLAVSVVHEIKDALGIYCFRITRKEA

SEQ ID NO: 10138 - protein, 98 aa, Buchnera aphidicola
LPSASLNDSNFGLYEPAGGSAPDIAGKNIANPIAQILSIAMLVRYTMKLPMISDHIESAVIDTLKKGYRTLDIANDKEQYVSTNDIGDIISEILKKRI

SEQ ID NO: 10139 - protein, 378 aa, Glycine max
MARVVALQQNQLSFSPLASSLFDFSGTRLQTQLQFKRKQCHPKGSFYVSASSTKKILIMGGTRFIGVFLSRLLVKEGHQVTLFTRGKAPVTQQFPGESDSDYADFSSKILHLKGDRKDFDFVKSSLSAEGFDVVYDINGREADEVEPILDALPNLEQFIYCSSAGVYLKSDLLPHAETDAVDPKSRHKGKLETESLLQARGVNWTSIRPVYIYGPLNYNPVEEWFFHRLKAGRPIPIPGSGIQITQLGHVKDLAKAFIQVLGNEKASKEVFNISGDKYVTFDGLARACAKAGGFPEPEIIHYNPKDFDFGKKKSFPFRDQHFFASVEKAKSVLGLEPEFGLVEGLADSYNLDFGRGTYRKEADFSTDDIILGKSLVSV

SEQ ID NO: 10140 - protein, 345 aa, Arabidopsis thaliana
MTATNKQVILKDYVSGFPTESDFDFTTTTVELRVPEGTNSVLVKNLYLSCDPYMRIRMGKPDPSTAALAQAYTPGQPIQGYGVSRIIESGHPDYKKGDLLWGIVAWEEYSVITPMTHAHFKIQHTDVPLSYYTGLLGMPGMTAYAGFYEVCSPKEGETVYVSAASGAVGQLVGQLAKMMGCYVVGSAGSKEKVDLLKTKFGFDDAFNYKEESDLTAALKRCFPNGIDIYFENVGGKMLDAVLVNMNMHGRIAVCGMISQYNLENQEGVHNLSNIIYKRIRIQGFVVSDFYDKYSKFLEFVLPHIREGKITYVEDVADGLEKAPEALVGLFHGKNVGKQVVVVARE

SEQ ID NO: 10141 - protein, 92 aa, Oxalis spiralis
LYAGINISGTNGEVMPGQWEYQVGPSVGIEAGDHIWASRYILERITEQAGVVLTLDPKPIDGDWNGAGCHTNYSTKSMRDEGGFEVIKKAIL

SEQ ID NO: 10142 - protein, 380 aa, Neurospora crassa
MASTVGKTITCKAAIAWGAGQELSYEDVEVAPPKAHEVRIQIKHTGVCHTDAYTLSGKDPEGAFPVILGHEGAGIVESVGEGVTNVKPGDHVIALYTPECKECKFCKSGKTNLCGKIRATQGRGVMPDGTSRFRARGQDILHFMGTSTFSQYTVVADISVVAVNPEAPMDRTCLLGCGITTGYGAATITANVEKGSTVAIFGAGCVGLSVIQGAVANGASKIIAVDVNPSKEEWSRKFGATDFVNPSTLPEGQSVVDKLIELTDGGCDYTFDCTGNVKVMRAALEACHKGWGQSIIIGVAAAGQEISTRPFMLVTGRVWRGSAFGGVKGRSQLPGLVEDYLNGKIKVDELITHRKKLAEINNAFEVMHQGDCVRAVVDMS

SEQ ID NO: 10143 - protein, 173 aa, SYNECHOCOCCUS SP. WH 8102
MMAPLTSASAPWPAAQIHPGAWVSTSAVVIGNVTMQEGSSLWPTAVARGDCAEIRIGARSNVQDGAVLHGDPGQPVLIGVDVTVGHRAVIHGATLSDGCLVGIGAIVLNGVTVGEGALVAAGAVVTKDVPARSLVMGAPAQLKRELSAEAVEDQRSHAHSYAELARQHAQAGG

SEQ ID NO: 10144 - protein, 212 aa, Gossypium turneri
DVYYWECKGYTPLFPRILGHEASGIVESVGEGVNDLKPGDHVLPIFTGECKECRHCLSEESNNMCELLRINCDRGVMLADGKTRFSINGKPIYHFVGTSTFSQYTVVHVGQVAKISPTAPLDKVCPISCGICTGFGATVNVAKPKKGQTVAVFGLGAVGLAAAEGARVCGASRIIAVDVNPRRFEEAKRFGITEFVNPKDYDKPVQEVIVEM

SEQ ID NO: 10145 - protein, 226 aa, Nicotiana tabacum
ELRQATDTTARLGSFRVLTNKAIEANDGNPLPLYQKALCGLTAGAIGACFGSPADLALIRMQADATLPVAQRRNYTNAFHALYRIVADEGVLSLWKGAGPTVVRAMALNMGMLASYDQSVEFFKDNLGMGEAATVVGASSVSGFFAAACSLPFDYVKTQIQKMQPDAQGKYPYTGSFDCAMKTLKSGGPFKFYTGFPVYCVRIAPHVMMTWIFLNQIQKVEKKIGL

SEQ ID NO: 10146 - protein, 167 aa, Streptococcus pyogenes MGAS8232
MPNLYDFTVKAQNGNDLSLAAYKEKVVLIVNTATKCGLTPQYQALQALYDTYHDKGFEVLDFPCNQFLNQAPGDAEEINHFCSLTYHTTFPRFAKIKVNGKDADPLFTWLKEEKSGPLGKRIEWNFTKFLIDQNGQVIKRYSSKTDPKLIEEDLKALLDKIQCYHHL

SEQ ID NO: 10147 - protein, 101 aa, Triticum aestivum
  unsure (1)..(101): unsure at all Xaa locations
AFLFVWLARDGDPTPGAVVRSFVFRKLRAKSDNKMCLDCNAKNPTWVFVTYGVFLCIXCSVVHRSLGVHVXFVRSTYLDSWTPRTLXKMVFVGNFCAQCFF

SEQ ID NO: 10148 - protein, 130 aa, Glycine max
  unsure (1)..(130): unsure at all Xaa locations
RYVVFVLEKLCSRMPPGQEKFLAIADIKGWAYANSDLRGYLNALSILQTSCFXLQDCYPERLGKMVIVHAPYMFMKIWKMIYPFIDDNTKKKIVFVENKKLKSTLLEEIEESQLPDIYGGQMPLVPIQNS

SEQ ID NO: 10149 - protein, 1112 aa, Arabidopsis thaliana
MGFESSSSAASNMKPQPQKSNTAQYSVDAALFADFAQSIYTGKSFNYSKSVISPPNHVPDEHITAYLSNIQRGGLVQPFGCLIAVEEPSFRILGLSDNSSDFLGLLSLPSTSHSGEFDKVKGLIGIDARTLFTPSSGASLSKAASFTEISLLNPVLVHSRTTQKPFYAILHRIDAGIVMDLEPAKSGDPALTLAGAVQSQKLAVRAISRLQSLPGGDIGALCDTVVEDVQRLTGYDRVMVYQFHEDDHGEVVSEIRRSDLEPYLGLHYPATDIPQAARFLFKQNRVRMICDCNATPVKVVQSEELKRPLCLVNSTLRAPHGCHTQYMANMGSVASLALAIVVKGKDSSKLWGLVVGHHCSPRYVPFPLRYACEFLMQAFGLQLQMELQLASQLAEKKAMRTQTLLCDMLLRDTVSAIVTQSPGIMDLVKCDGAALYYKGKCWLVGVTPNESQVKDLVNWLVENHGDDSTGLTTDSLVDAGYPGAISLGDAVCGVAAAEFSSKDYLLWFRSNTASAIKWGGAKHHPKDKDDAGRMHPRSSFTAFLEVAKSRSLPWEISEIDAIHSLRLIMRESFTSSRPVLSGNGVARDANELTSFVCEMVRVIETATAPIFGVDSSGCINGWNKKTAEMTGLLASEAMGKSLADEIVQEESRAALESLLCKALQGEEEKSVMLKLRKFGQNNHPDYSSDVCVLVNSCTSRDYTENIIGVCFVGQDITSEKAITDRFIRLQGDYKTIVQSLNPLIPPIFASDENACCSEWNAAMEKLTGWSKHEVIGKMLPGEVFGVFCKVKCQDSLTKFLISLYQGIAGDNVPESSLVEFFNKEGKYIEASLTANKSTNIEGKVIRCFFFLQIINKESGLSCPELKESAQSLNELTYVRQEIKNPLNGIRFAHKLLESSEISASQRQFLETSDACEKQITTIIESTDLKSIEEGKLQLETEEFRLENILDTIISQVMIILRERNSQLRVEVAEEIKTLPLNGDRVKLQLILADLLRNIVNHAPFPNSWVGISISPGQELSRDNGRYIHLQFRMIHPGKGLPSEMLSDMFETRDGWVTPDGLGLKLSRKLLEQMNGRVSYVREDERCFFQVDLQVKTMLGVESRGTEGSSSIK

SEQ ID NO: 10150 - protein, 324 aa, Burkholderia fungorum
MSAPEIRYAQAVAQALHDSLRDDESVMVMGEDIAAAGGSFKATRGLLDAFGPQRVRDTPISEASIVSAAVGAALTGMRPVVEIMFMDFITLAMDALVNQASKARFMFGGQGSVPMVLRTPHGGGMNAGPQHSQCLEAWLAHVPGLKVVCPSTPQDAYSLLRAAIADPDPVIVVEHKGLYARKGVVEPVVGRIGEASIVRAGRDLTLVSYGATVAACLDAARTLGAEGVEAEVIDLRSIQPWDKAAVLASLARTHRAVIVHEAVSAFGVGAEIAATLSDEGFDDLDAPVRRVGAPFMPVPFASSLEKGYAVDAEKIVAVARETLN

SEQ ID NO: 10151 - protein, 368 aa, Raphanus raphanistrum subsp. raphanistrum
SSNKTLVSPGNVFELGFFTTGSSSRWYLGIWYKKVSGRTYVWVANRDNPLSSSIGTLRFSNMNLVLLDQSNKSVWWTNLTRGNERSPVVAELLANGNFVIRDCSNNDASGFLWQSFDYPTDTLLPGMKLGYDAQKGLNRFLTSWRNSDDPSSGNISYKLDTQRGMPEFFLLKDGLRAHRSGPWNGVQFSGIPEDQKLSYMVYNFTENSEEVAYTFRMTNSSIYSRLKISFRRFLERWTTPTSIPWNLFWSAPVDLKCDVYKTCGPYSYCDLNTSPLCNCIQGFMPSNVQQWDLRDPSAGCIRRTRLSCSGDGFTRMKNMKLPETRMAIVDRSIGVKECEKRCLSDCNCTAFVQMRYPEWWVGMCDVDR

SEQ ID NO: 10152 - protein, 246 aa, Ralstonia eutropha
MTQRIAYVTGGMGGIGTAICQRLAKDGFRVVAGCGPNSPRREKWLEQQKALGFDFIASEGNVADWDSTKTAFDKVKSEVGEVDVLINNAGITRDVVFRKMTRADWDAVIDTNLTSLFNVTKQVIDGMADRGWGRIVNISSVNGQKGQFGQTNYSTAKAGLHGFTMALAQEVATKGVTVNTVSPGYIATDMVKAIRQDVLDKIVATIPVKRLGLPEEIASICAWLSSEESGFSTGADFSLNGGLHMG

SEQ ID NO: 10153 - protein, 374 aa, Wimmeria concolor
ALSIAGAVQSQKLAVRAISQLQSLPGGDIKLLCDTVVESVRHLTGYDRVMVYKFHEDEHGEVVAERKRPDLEPYIGLHYPATDIPQASRFLFKQNRVRTIVDCHASPVRVIQDDGLMQPLCLVGSTLRAPHGCHAQYMENMGSIASLAMAVIINGNDEEVIGVRNATRLWGLVVCHHTSARCIPFPLRYAWEFLMQAFGLQLNMELQLAAQLSEKHVWKTRTLLCDMLLRDSPTGIVTQSPSIMDLVKCDGAALYYQGNYYPLGVTPTEAQITDIVGWLLDFHGDSTGLSTDSLADAGYPGAALLGDAVCGMAVAYITNRDFLFWFRSHTAKEIKWGGAKHHPEDRDDGQRMHPRSSFQAFLEVVKSRSLPWEN

SEQ ID NO: 10154 - protein, 716 aa, Glycine max
  unsure (1)..(716): unsure at all Xaa locations
FIFQWLQQAERRIPPFRRRKSTPHEPKLSHHSSNNNNNIDSMSKAIAQYTEDARLHAVFEQSGESGRSFNCSEPIRVASESVPEQRVTAYLVKIQRGGFIQPFGSMIAVDEPSFRILGYSDNARDMLGITPQSVPSLDDKNDAAFALGTDVRALFTHSSAXLLEKAFSAREISLMNPIWIHSRTSGKPFYGILHRIDVGIVIDLEPARTEDPALSIAGAVQSQKLAVRAISQLQSLPGGDAKLLCDTVVESVGGVTASDGVMVYRFHEDEHGEVVAETKRPDLEPYIGLHYPATDIPQASRFLFKQNRVRMIVDCHASAARVVQDEALVQPLCLVGSTLRAPHGCHAQYMANMGSTASLVMAVIINGNDEEGVGGRTSMRLWGLVVCHHTSARCIPFPLRYACEFLMQAFGLQLNMELQLAAQSLEKRVLRTQTLLCDMLLRDSPTGIVTQSPSIMDLVKCDGAALYFQGNYYPLGVTPTEAQIRDIIEWVLAFHGDSTGLSTDSLGDAGYPGXLPRLGMQFVGWXVAYITEKDFLFWFRSHTAKEIKWGGAKXILRTRMMGXRMHPRSSFKAFLEVVKSRSLPWENAEMDAIHSLQLILRDSFKDAEHRNSKAVVDPHVSEQELQGVDELSSVAREMVRLIETATAPIFAVDVDGHVNGWNAKVSELTGLPVEEAMGKSLVHDLVFKESEETMNKLLSRALKGILSNTLAFWSIH

SEQ ID NO: 10155 - protein, 132 aa, Triticum aestivum
  unsure (1)..(132): unsure at all Xaa locations
MALKASFPGELAGATILESPSSGAFRHLRQAVDFTFRKTDKRAAFLRRTCCSMQQGPSPAWPGRAVADPARRSWDSPKPISIIGSTGSVGTQTLAIVAENPDKFRVVALXAGSNVTLLADQVKMFKSGRNRK

SEQ ID NO: 10156 - protein, 347 aa, Bacillus subtilis subsp. subtilis str. 168
MNEFMKKFSLTKPIIQAPMAGGITKPRLASAVSNQGALGSLASGYLTPDLLEQQIKEIFELTDAPFQINVFVPLGLEMPPKDQIKKWKENIPLANQVNQFTSVQEEWDDFYQKIDLILKYKVKACSFTFDLPPEDAVKELKTAGCCLIGTASTVEEALLMEERGMDIVVLQGSEAGGHRGAFLPSKGESAVGLMALIPQAADALSVPVIAAGGMIDHRGVKAALTLGAQGVQIGSAFLICHESNAHPVHKQKILEANEADTKLTTLFSGKEARGIVNKWMEENEQFETQTLPYPYQNTLTKAMRQKASLQNNHDQMSLWAGQGIRSLTEEISVKQLLNQLCQEDIKI

SEQ ID NO: 10157 - protein, 365 aa, Pleurostylia opposita
VQSQKLAVRAISQLQSLPGGDIKLLCDTVVESVRDLTGYDRVMVYKFHEDEHGEVVAESKRPDLEPYIGLHYPATDIPQASRFLFKQNRVRIIVDCHASPVRVLQDDGLMQPLCLVGSTLRAPHGCHAQYMENMGSIASLAMAVIINGNDEEAIDGKNPTRLWGLVVCHHTSARCIPFPLRYACEFLMQAFGLQLNMELQLAAQVLEKHVLKTQTLLCDMLLRDSPIGIVTQSPSIMDLVKCDGAALYYRGNYYPLGVTPTEAQIKDIEEWLLAFHGDSSGLSTDSLADAGYPGAALLGDAVCGMAVAYITNRDFLFWFRSHTAKEIKWGGAKHHPEDKDDGQRMHPRSSFKAFLEVVKSRSLPW

SEQ ID NO: 10158 - protein, 439 aa, Vibrio cholerae
MSKSNNKIGVVQLTILTIVNMMGSGIIMLPTQLAQVGTISILSWLVTAAGSTALAFAFAKCGMFSKKSGGMGGYAEYAFGRSGNFMANYTYAVSLLIANVAIAISAVGYADVLFGFHLTPIETCIATILVLWVATVANFGGARITGQVSSVTVWGIIIPVIGVSIIGWYWFDFDLYRAAWNPHGLPFFQALGGSIAMTLWAFLGLESACANADAVENPEKNVPIAVMGGTLGAAVIYIISTNVIAGIVPNADLANSNAPFGLAFAQMFNPTMGAIVMACAIVSCTGSLLGWQFTIAQVFKASADEGFFPKLFSKVTKADAPVLGMLTIVSIQSVLSLMTISPSLNKQFEALVNLAVVTNIIPYILSMAALGVMQKQLNVPVSQAKVANVMAFIGAMYSFYALYSSGETAVMLGSIATFFGWVLYGAIYRSQQNTPLKHA

SEQ ID NO: 10159 - protein, 468 aa, Bacillus licheniformis
MAEEKKLGLFALIALVIGSMIGGGAFNLASDMASGAGAGAILIGWIITGVGMIALAFSFQNLTTKRPDLDGGIFTYAREGFGHFMGFNSGWGYWFAALLGNVAYGTLLFSAIGYFIPAFGDGQNIASIIGASVILWCVHFLILRGVQSAAMINLITTISKLVPIFAFIIAIIFVFHLDLFTNDFWGKGLSLGSIGTQVKSTMLVTVWVFTGIEGAVLFSSRAKKSSDVGKATVIGLISVLVIYVMITMLSLGVMNQQNLAELPNPSMAAIMEHIVGKWGAVLINLGLIISVLGAWLAWTLFAGELPLIAAREGVFPKWFGKENKNGAPTNALTLTNAIIQLFLLTFLISDAAYQFAFSLASSAILIPYLFSGLYQLKYSWLHKEPNRGKNLIIGIIASIYGVWLVYAAGLDYLLLTMILYAPGILVFRAVRKGKEGPVFNKAELLIAALILVLAVIAVIRLASGSISI

SEQ ID NO: 10160 - protein, 364 aa, Salacia nitida
VQSQKLAVRAISQIQSLPGGDIKLLCDTVVESVRDLTGYDRVMVYKFHEDEHGEVVAECKRPDLEPYIGLHYPATDIPQASRFLFKQNRVRMIVDCHASPVRVIQDDGLMRPLRLVGSTLRAPHGCHAQYMENMGSIASLAMAVIINGNDEEVIGGRNPTRLWGLVVCHHTSARCIPFPLRYACEFLMQAFGLQLKMELQLAAQLLEKHVLKTQTLLCDMLLRDSPTGIVTQSPSIMDLVKCDGAALYFQGNYYPLGVTPTEAQIKDIVEWLLAFHGDSTGLSTDSSADAGYPGAALLGDAVCGMAVAYITNRDFLFWFRSHTAKEIKWGGAKHHPEDKDDGQRMHPRSSFKAFLEVVKRRSLP

SEQ ID NO: 10161 - protein, 378 aa, Thermobifida fusca
MRTALTELFGIDVPLVGFSRSPAVVAEVSKAGGLGVLAATAYGPEELDVQLTWIEEQVRGRPYGVDVLVPASTVGDRRELVARLRAQIPAEHIEFVRSLLEKYGVEPGDLARGHGAADDQVVGVAPEGVEALVDVAFSHDIALIANALGPAPPFLVERGKREGVVVAALVGNARHAARQLDAGVDLLVAQGTEAGGHTGTVATMVLTPEIVELAGATPVLAAGGIASGRQMAAALALGAAGVWCGSVWLNSVEDITPDYIKRKFQAAESTDTVRSRTRTGKPARQLRSAWHDEWERPDAPEPLGMPLQMMLAKDAWQRIDAAAEQGVAGAHALGSFFVGQVVGSFGELRPAAQIVADMAAECAECITGLQRVIHGGAA

SEQ ID NO: 10162 - protein, 167 aa, Glycine max
MASQSNTKSVHDFTVKDARGNDVNLADYKGKVLLLVNVASQCGLTNSNYTELNQLYEKYKGKGLEILAFPCNQFGAQEPGTNEEIVEFACTRFKAEFPIFDKVDVNGDNAAPLYKFLKSSKGGLFGDSIKWNFSKFLVDKDGNVVDRYAPTTSPLSIEKDIKKLLDA

SEQ ID NO: 10163 - protein, 111 aa, Triticum aestivum
  unsure (1)..(111): unsure at all Xaa locations
MEFCPVCGILLQIDPGTGSHRLRLFCPVCPYVCPILNKIVKKARLVKKEVEPISSTADEMKSAPKTAVTCQRCNHGEAYFKQXMRSDSADEPMTTIYRCCKEECQHEWRXD

SEQ ID NO: 10164 - protein, 451 aa, Pseudomonas aeruginosa PAO1
MAGGEKAGKRGMGFWTCSALVIGNMVGSGVFLLPSSLAAFGGLSLFGWLVSSTGAVLLALTFARLARVNPGAGGPYAYTRDGFGSFAGYLCAWTYWKAAWIGNAAIAVTLVGYLRVFIPALADPLLMVSVAIAAIWLCTLINLRGIGTFSVVQNLLTILKLLPLLLVGILGWFHFNPEHLAIPARSELPNMGYAQAIATTAALTLWSFIGLESATVPADDVEDPRRTIPRATLFGTLAAAALYILSITAVQGLMPPEVLARSTSPFADAARILMGDWGYYLVAAGAVIACLGALNGWVLLQGQIPVAPARDGLFPESLGQLNKNGAPAHGLLASGLLVTALVMVDGHGDLVDVFNVIILLGTMTGVVPYAFCTAALLQLLAVRPDEFSPRSRRQLLVIGSLGFAYSLWALYGTGQQAIFWGFLVLMAGIPMYTWRQWRNQVNGVPTLKAND

SEQ ID NO: 10165 - protein, 261 aa, Streptomyces galilaeus
MPPAAERVAIVTGATSGIGLAVARSLAEGGARVFVCARDGDRVAHTVKELREAGHDVDGASCDVRDTARVRAFVQEARDRFGPVDVLVNNAGRSGGGHTAQIPDELWLDVIETNLNSVFRMTREVLTTGGMLERGAGRIVNIASTGGKQGVALGAPCSASKHGVVGFTKALGLELAKTGITVNAVCPGYVETPMAERVRQGYAGAWDITEDEVLERFEAKIPLGRYSTPDEVAGLVGYLLSSTAASITAQAMNVCGGLGNY

SEQ ID NO: 10166 - protein, 855 aa, Sorghum bicolor
MAFSPRSPWSRPKRNDVYSTFVVHGDDDEDDARGSRRGRGPSTRAEEDEEEDPSSLPPLLQRLPKDFGGPSFDEDEDAYSSDPDDASLSATVVFKSGAPASARSPFLDLRRSSPRATDDDPYSTFVVHSTARSGGTSSSPRGSASGTFIRRSGGSSSPHESVSGTFIRRTSTPSSPRDSVSGTFIRRPGSPSSPRGSFSGTFIRHTSGGSSSYESASGGGGGFGSSFWSPAVEQTEELRQPSPLMQQQQQQHSRRKPSVSSAPDSVTREDPSTKYELLHELGKGSYGAVYKARDLRTQELVAVKIISLTEGEEGYEDIRGEIEMLQQCSHPNVVRYFGSYQGEDYLWIVMEYCGGGSVADLIGITEEPLDESQIAYICREALKGLAYLHSIFKVHRDIKGGNILLTEQGEVKLGDFGVAAQLTRTMSKRNTFIGTPHWMAPEVIQESRYDGKVDVWALGVSAIEMAEGMPPRSTVHPMRVIFMISSEPAPMLEDKEKWSLLFHDFIAKCLTKDPRLRPAASEMVKHKFIEKCNSGASKMLAKIKEAKKIRATLAVQNELSDPDNTMQDVPVRINEDYGETVPTNSQQHMNHGTYNDCQAGDFGTMIVHTEDGDEVAESPIFPRTEFIPGLGSINSFTHDPKRAELISSFWAENTGDSDANKDRDLDDRPDIQESKAIPPLTGTVKKHIGAEGTIRRHDNQVNLSPGFANTTKLNSSPSRKAFSVQDKLWSIYAAGNTVPIPFLKAIDISPLALVSENEAGNGLAGSSTNDALEAVRELFSGDGQAKKGRKGQNEVPLPPGVHHRLMTSPTLMNLAQALAYHKTCYEDMPLQDSQATQEQQTIQNLCDTLRTILRL

SEQ ID NO: 10167 - protein, 58 aa, Metrosideros excelsa
LVMTDPDVPGPSDPYLREHLHWMVTDIPGTTDATFGKEVVEYEMPRPNIGIHRFESLV

SEQ ID NO: 10168 - protein, 581 aa, Zea mays
  unsure (1)..(581): unsure at all Xaa locations
MGEVEDMYTQDGTVDMKGNPAVKKGTGNWRACPYILANECCERLAYYGMSTNLVNYMKTRLGQVNSVASNNVTNWQGTCYITPLIGAFFADAYMGRFWTIAIFMIIYIFGLALLTMASSVKGLVPTSCGDKDVCHPTDAQTGXVVFVALYLIALGTGGIKPCVSSFGADQFDENDEREKKSKSSFFNWFYFSINIGALVASTVLVYVQTHVGWGWGFGIPAVVMAIAVGSFFVGTPLYRHQKPGGSPLTRIAQVLVACARKWNVAVPADKSRLHETVDGESGIEGSRKLEHSEQLACLDRAAVVTAEDGAEASPWRLCSVTQVEELKSVIRLLPIWASGIVFAAVYSQMSTMFVLQGNTLDQSMGPRFKIPSATLSMVDTISVIVWVPVYDRAIVPLVRSYTGRPRGFTQLQRMGIGLVVSIFSMVAAGVLDIVRLRAIARHGLYGENDIVPISIFWQIPQYFIIGCAEVFTFVGQLEFFYDQAPDAMRSMCSALSLTTVALGNYLSTVLVTIVTHITTRHGRIGWIPENLNRGHLDYFFWLLAVLSLLNFLAYLVIASWYKYKKTADDYPGAKGEHGTEH

SEQ ID NO: 10169 - protein, 204 aa, Zea mays
  unsure (1)..(204): unsure at all Xaa locations
MEFGSGPWLLFRGQLPGHLTEDNGFDVFVNGRRGGGGXAMRRANIADYFVGPGLDDLIEQLTQNDRRGPPPAAQSSIDAMPTSSIDAMPTVKITQRHLSGDSHCPICKEKFEMGSEEAREMPCKHLYHSDCIVPWLEQHNSCPVCRYELPPQGSATGASCSRARSTDQSQSSSSSSSSGRTSGRQRRRNPFSFLWPFRSSSSSR

SEQ ID NO: 10170 - protein, 370 aa, Brucella melitensis 16M
MKSRAAVAWEAKKPLTIETVEIGGPKAGEVLVEIMATGVCHTDAYTLSGLDSEGKFPAILGHEGAGIVREVGADVTSVKPGDHVIPLYTPECRQCKTCLSQRSNLCTAIRATQGQGLMPDKTSRFSCDGGEVFHYMGCSTFSNFTVLPEIAVAKVREDAPFDKICYIGCGVTTGIGAVIYTAKVRPGSNVVVFGLGGIGLNVIQGARMVGADKIIGVDINPAKVEMARKFGMTDFINPREIGNDKVVQAIQDLTDGGADYSFDATGNTDVMRQALECCHRGWGESIIIGVAEAGKEIATRPFQLVTGRVWKGTAFGGARGRTDVPKIVDWYMEGKINIDDLITHTMPLDEINTAFDLMHEGKSIRSVVIY

SEQ ID NO: 10171 - protein, 221 aa, Triticum aestivum
  unsure (1)..(221): unsure at all Xaa locations
MPSRSRVAVIGAGAAGLAAARELRREGHAPVVFESAAAVGGTWRYEDSNAADPADPLGAGGAHSSLYASLRTNLPRESMGFLDFPFVADRSSADPRRFPGHXEVLRYLETFARRFDLLGLVRLQTEVVGVRRSRVDGVGAGAAGWTVSYCSRKLAGGELQEEEEQSEVFDAVVVCNGHFAEPLLADIAGIGGWPGKQLHSHSYRVPDPFHGQVVVVIGYHP

SEQ ID NO: 10172 - protein, 210 aa, Gossypium trilobum
VYYWECKGYTPLFPRILGHEASGIVESVGEGVNDLKPGDHVLPIFTGECKECRHCLSEETNNMCELLRINCDRGVMLADGKTRFSINGKPIYHFVGTSTFSQYTVVHVGQVAKISPTAPLDKVCPISCGICTGFGATVNVAKPKKGQTVAVFGLGAVGLAAAEGARVCGASRIIAVDVNPRRFEEAKRFGITEFVNPKDYDKPVQEVIVE

SEQ ID NO: 10173 - protein, 585 aa, Zea mays
MGKQQQAPPARRSPAMSAPPPPKRRKKKGRPSLLDLQKRNLRLEQQLQQQQQQQQPKGRRSNRRSAGSADEDDDGPASGSGRREKKLRLVMGLHDGSPKVEKARKATDGHEEPSDSGPTTPLPNKKLLLFILDRLQKKDTYGVFSEPVDPEELPDYHDIVKHPMDFSTIRKKLDKGAYSNLEQFEDDVFLISTNAMCYNSPDTIYYRQARGIQEIAKKDFENLRQDSDASDPEPEPELGLEPEPEEPKPQPRRGRPPTKNTTRQKVGKPPTERATADFSGATLATAANIGRHAQADVDLSRRAMDKAMMDMLRASFANRRNEHNWSGERKFERFEECSGYRGTWSAKMGKRPILMEDSRRSTYCETQPSNSIYELPVSSSYNGTKKLLVPVGVQLQQSYSRSLARFAAQLGPVCWEIASRRIERSLAPGTKFGRGWVGDGETPNSFQPPVLAAFSETTTPQDRTAASGEQPCPSMSSPPATEACAGNDRSHLAGSQPDATPYASTSTTQRMSSEALASQQCGSLPQISINRAERTLEMMKGSPNNLHGHPGMQQTANGFNDVPGPMMFPHVAQLVVNQMQTHTAD

SEQ ID NO: 10174 - protein, 375 aa, Fagus sylvatica
MCGGAIISDFIAPTGSRRLTADYLWGDRKKPISGKRFSKPVVDLDDEFELDFQGFKDEEESDIDEEEVLVQDVKPFTFSAPPSSGSKPVKSVEFNGQAEKSAKRKRKNQYRGIRQRPWGKWAAEIRDPRKGVRVWLGTFNTAEEAARAYDAEARRIRGKKSKGNFPMRLPVPKRSVKANLQKPLAKANLNSVQPNLNQNFNFMNSDQDYTMGLMEEKPFTNQYGYMDSIPVNADVGLKSFASNNTAPYFNSDQGSNSFDCSDYGWGEQGSKTPEISSVLSATLEGDESQFVEDAVPTKKLKSDSGNAVFIENNTAKTLSEELSAFESQMNFQMPFLEGSWESNMEALFSGDTTQDGNSMDLWSFDDLPVMAGGVL

SEQ ID NO: 10175 - protein, 111 aa, Buchnera aphidicola
VSDECAIITGSIGMLPSASLNEKKFGLYEPAGGSAPDIEGKNIANPIAQILSVSMLVRYGMNLKKIADKIDQSVISVLKKGYRTADISNNNNYLKTNEMGDVIANTLISGE

SEQ ID NO: 10176 - protein, 225 aa, Zea mays
  unsure (1)..(225): unsure at all Xaa locations
MAEEKKQGLQLLDFWVSPFGQRCRIALDEKGLAYEYLEQDLGKKSELLLRANPVHKKIPVLLHDGRPVCESLVIVQYLDEAFPAAAPALLPADPYARAQARFWADYVDKKLYDCGTRLWKLKGDGQAQARAEMVEILRTLEGALGDGPFFGXGDALGFVDVALVPFTSWFLAYDRFGGVSVEXECPRLAAWAKRCAERPSVAKNLYPPEKVYDFVCGMKKRLGIE

SEQ ID NO: 10177 - protein, 461 aa, Xanthomonas campestris pv. campestris str. ATCC 33913
MPLPTDPVAETASSAAPALRHALKPRQLMMMGLGTAIGAGLFLGSGVGIHAAGPAVLVSYLIAGALVIIVMNALGEMAAAKPASGAFSVYAADAMGPTAGATVGWLWWLQIVVVIAAEAVGAASLLATVWPALPVPMLASVFMATFTVINLLGVRNFGEFEFWFAILKVVAILIFLMIGGALLAGLLPGVASPGLSNFTQHGGFAPKGLAGIGTALLVVVFAFGGTEIVAVAAAETADPGRSLARTIRTVAWRILVFYIGSISVIVAVVPWTSDALSSPFAAVLEVARIPGAATGITLVAVVALLSALNANLYGASRMIFSLAQRGEAPRWLGNTSRQQVPLVAVIASVLFGFAAAVLELLYPGKVLPMLLNIVGATCLLVWTISLLSQLILRARADRAGIALPFRMRGYPVLTLLALAILAVIFVLLALSADTRAQFLSMVGLTAGIALVSELARRMRKR

SEQ ID NO: 10178 - protein, 129 aa, Arabidopsis lyrata subsp. lyrata
KRVPGRTDNQVKNYWNTHLSKKLVGDYSSAVKTTGEDDDSLPSLFITAATTSSRHHQQENVYENIAKSFDGVVSASYEDKPKQELAQNDVLMATTNDPSHYYGNNALWVHDDDFELSSLFTRNDEFCFW

SEQ ID NO: 10179 - protein, 224 aa, Gazania splendens
GYPGPQGPYYCGAGADKSFGRDISDAHYKACLYAGINISGTNGEVMPGQWEFQVGPSVGIEAGDHIWCARYLLERITEQAGVVLTLDPKPIDGDWNGAGCHTNYSTLAMREDGGFEVIKKAILNLSLRHMEHISAYGEGNERRLTGKHETASINTFSWGVANRGCSIRVGRDTEKAGKGYLEDRRPASNMDPYTVTGLLAETTLLWEPTLEAEALAAQKLALNV
